United States Patent Application Publication US 2005/0208558 A1 - sequence listing, part 31

SEQ ID NO: 32419 - DNA, 4731 bp, DROSOPHILA
cagctcaatacgtggtcggattggcttttccgccttgcgagttgtggcggtgatataaagaagctgcattggttacaaggcttctatccactcattctatagtcgcttttattttctttttttatttctgcttttgccggcctttttgtcagtgctagccagtgttagccaattgaaggtccaattatcgattaaactttgcatgcaattttcaatgtctccgcgagccttgatccaaaaaggtcgggttataaaaacacaaatggggggcttactcatacctggcgaagactgacatacgcctgtcaattatgcaaattaattgctgccgtttctcaagtcgatagatagataggttcgcctcaagtggcattcgaaaaaccgacttagatcactttttggcgccgaacaaatatcgatcttgaaaacctttgatccaattaaatgaaataataacgaaattgaaaaggtttcaatgcaagcttatgatatataaatagctatgcctatattgtatgaaaatagtgcagtattaaaaataaataagtttccccaatttgtttacttttattaacttttagcttacctatttgttactcacgaagcgagctaccgtaattttcgtttaataaatagcaaacgaaagttaatttattagccaatttcttataaaatgcagtagctacagttttataccgctacctaacgaattgcccatgcagttaagtaaagtaatcaaattatttttataaccacaattctagctagcaatgtatagtttttcatcgttactgtcagatacataaacgagatacatgaaggaggaggcttaaattcaactgcttccacaattgactgaaaattcccaaacgcttgccagctgatgcgcttttaatttttttgccagccatttgtctgcaaaccgcatctgaacgaagcgaagaagtgaaaattcaattgcattttaatttgaataatgggaatttgttgcttttgacggatggcttttgcagccgttggtgtcaaaagtcgttgacattgttttggggcttgggatttgttttttttttttggccgccagcacagtggagcaatttggtgcaaaatgcaaaactaagtgagaggtggtactggcagatcttttgtttttactcacttattttacaacttggccggcttgcagccaattgaaaatgcaaataactaagcaattagtagtcgagtgctgagagctgagttaaccttgcggttttagcctggcttcgagctttgtgactgtctacgtgcccattgttggctttactttcattgtcttgactgccatataattggcaacacgtcatagaaccaacaatatcccatatatgcacacacaattaactttcattttttctctacctttgacagaaactcgagcaggagaagcatgtgctgcgccaaaaattggcgatcgccgaggatgagagcgatcagcgtgtcctcgagctgcagtccgatctcaccgagctgaaggataagctgcagacccaagacaccgccatccggcaagcggagaaggagaagaccatcctaattgatgagctgcagcaccagaacacacggctcaccgaacagatccaggaggcacacgccaccgagctcaagctcagcgcacagatccaggagctgaaggatcagtatcactacaggaacagcagcctccaggtaaggtctacacttacgccttaatggttatgtagtttaaaatatgatatgatatcgctgcaggaacatgtcaacagcctggagtccatcaaaacagaacttaacctcactacgggaaagcgtcaggagctggagcgtcgtctgcaaatcgcccaggaagagaaggagagcctcacctcgtcgctggaggagtcctccgacagaatccacatgctggagcgccatgcccgcgagcaggaaacaaaattagaggtaagtcagctagagtttggaaaagaaaagttggatggggtggggaagtcagaatttgctttatcacgtcgcgtcaacggaatcgtgatttaaccgccaaatgaagattatttatgggcaggcggagccaaatgcgcagtttcttgagtgccaagtccaggcttatctgcccggcaacaactttcttttttctctatcgtgagcaaagattaaactccattctataaatatttaatagcatggactcatcaatgaagatttaatgcaagctatctaatcaatttcatgtggcaaaaacattttgccatgattgagagatttttggaaaatcaaagcaagatattttttatattttatatatatttcatatatattttatatttcatcaaaaattttctttaactaattaaaaaggaatcagtaaagcaaataaatgcacacaaattatacactctcttttcctttttatactagttacaattatattttctatcatgtctttaatctaaaatatttatatttactatatattgctatttttcagaccaccttacaagcactggaacgctcccagcgcgaaaacaatgtactcagtgaacgtttgggtgccgtaagtttacctttctccgatttaatgctttcccatttactaaccaaccattatgcgctcctaaatggatttctaactaacctcatcaaaattataaggaacatttatagaacttaaacaaacattatcagcaagcatttccccttaaatcaatcggtatacaccgaaaacctcagtcaaacgtgcacattaagctgtagttataaactttttactctttaatccttgcccgcaggacacaaactcgagcactccgggcagaaagagtttgcaattcgaaatggaatgcgacgaggacgatggcagctatacggaaacggggaagcccaaccaaatgttcgtggaagcccgatccgtttacatacaacttaagtccctggtagattcactaaaagttagccacgatgatgactcaggtgggttatttagttgtaaaacaaaaaataatttttctaactctttctaatttttaatgccgtttccaggactcaactccgacatatcgctggagctggagtcgatggacaacaccatctcgagctcggaacgccacgaggatggacacctggccatcgagtttcgccagggcatgttgtcgtcgatgtccgacgagctgacgcggttgctgctcaaccttgacgctggcaatttcaagaagatgctggaccagacgcgcaacctggtgctggagcaggaggacgagatcaagcgcagccaccagcttattcagcaactggaagccaaggtcacggtaacggacgtggagctgcagaacgtcaaggaggagagagatcaggcacgcggtgatctcgaggacaacacggatcgggatgagctgctgtccaaggcgcagacagaacgggatgcggccaatgataggcgcacgaaggccgaggttgagctggccaagacgcgagtggagctgatgcaagccaatagccaactgctggagtccattcagcaaaaggtggagctgtcacagcagctggaacagtggcagatggacatgcacgagctgatcgacgagcagatgcgctccaagttgatcaacaaccggcgagcgatggccgccgagtcctccgccccatcgccacccagcagtgctgccgccaatctggccaagcgcgtgaccagctacaagctttggagtttatttcagcgataattggagtaacctaacgacccgctggaaggtctacgccacccttctgttcttgatgtaggacgggaatctatatatttttaatatttatatttatacacaacaaacaacacacacaaatcggagagcctaggcatcataggtattgtacttaattgttatttgtatacgggaagcattgcccttcttctgttcgtagtgaaatctatctaattacgctttattaattttaaacacttaccgcatattcgatatgattattgtacctattgtaattactgtaatgaaaccgtactcgtacctatgtttaaacacaaatcgtctctattctctctttatttagtttatccttaattgattttaaattccgatatggaccccacaactaattcgaatcgagagataaatgtttttaaggcatgcggtgttacttgttgggtccgttttggtcaaaactgttaactgataatcaaaaaaaaaaaaaaaaacaaggaaacatatcgcacctttatgttggcggcttaaaaagcccccatatctcgggagaaactgttgcgattcatcaaaatcaaaaataaaatcaaaatcaaaatcaaaatctgtacgtaagcaaatattatgtgtaagcaaggcatttatgttatagcaaatagaaatattcatcagctggcaatcggaagggcgcaggattagttggaaactgtgcaacagacaaaacttgccttaatgaacggacaatgaaattttagattgtttaaataacataacttaccaataaacttacgattataccacaacaatgatttttggtaacatcagattgttcaaatttaatgatttccttacacgaagtctgtagttatatctacttaacacttattataactaatggtcttatgctggggctacaggataatcttatattatttctttaggttgtgaagtcgcaagtgcttttttaagctcttctgggagaaaaatccctctggacattgcgggcatg

SEQ ID NO: 32420 - DNA, 1428 bp, DROSOPHILA
atggcttttgcagccaaactcgagcaggagaagcatgtgctgcgccaaaaattggcgatcgccgaggatgagagcgatcagcgtgtcctcgagctgcagtccgatctcaccgagctgaaggataagctgcagacccaagacaccgccatccggcaagcggagaaggagaagaccatcctaattgatgagctgcagcaccagaacacacggctcaccgaacagatccaggaggcacacgccaccgagctcaagctcagcgcacagatccaggagctgaaggatcagtatcactacaggaacagcagcctccaggaacatgtcaacagcctggagtccatcaaaacagaacttaacctcactacgggaaagcgtcaggagctggagcgtcgtctgcaaatcgcccaggaagagaaggagagcctcacctcgtcgctggaggagtcctccgacagaatccacatgctggagcgccatgcccgcgagcaggaaacaaaattagagaccaccttacaagcactggaacgctcccagcgcgaaaacaatgtactcagtgaacgtttgggtgccgacacaaactcgagcactccgggcagaaagagtttgcaattcgaaatggaatgcgacgaggacgatggcagctatacggaaacggggaagcccaaccaaatgttcgtggaagcccgatccgtttacatacaacttaagtccctggtagattcactaaaagttagccacgatgatgactcaggactcaactccgacatatcgctggagctggagtcgatggacaacaccatctcgagctcggaacgccacgaggatggacacctggccatcgagtttcgccagggcatgttgtcgtcgatgtccgacgagctgacgcggttgctgctcaaccttgacgctggcaatttcaagaagatgctggaccagacgcgcaacctggtgctggagcaggaggacgagatcaagcgcagccaccagcttattcagcaactggaagccaaggtcacggtaacggacgtggagctgcagaacgtcaaggaggagagagatcaggcacgcggtgatctcgaggacaacacggatcgggatgagctgctgtccaaggcgcagacagaacgggatgcggccaatgataggcgcacgaaggccgaggttgagctggccaagacgcgagtggagctgatgcaagccaatagccaactgctggagtccattcagcaaaaggtggagctgtcacagcagctggaacagtggcagatggacatgcacgagctgatcgacgagcagatgcgctccaagttgatcaacaaccggcgagcgatggccgccgagtcctccgccccatcgccacccagcagtgctgccgccaatctggccaagcgcgtgaccagctacaagctttggagtttatttcagcgataa

SEQ ID NO: 32421 - protein, 475 aa, DROSOPHILA
MAFAAKLEQEKHVLRQKLAIAEDESDQRVLELQSDLTELKDKLQTQDTAIRQAEKEKTILIDELQHQNTRLTEQIQEAHATELKLSAQIQELKDQYHYRNSSLQEHVNSLESIKTELNLTTGKRQELERRLQIAQEEKESLTSSLEESSDRIHMLERHAREQETKLETTLQALERSQRENNVLSERLGADTNSSTPGRKSLQFEMECDEDDGSYTETGKPNQMFVEARSVYIQLKSLVDSLKVSHDDDSGLNSDISLELESMDNTISSSERHEDGHLAIEFRQGMLSSMSDELTRLLLNLDAGNFKKMLDQTRNLVLEQEDEIKRSHQLIQQLEAKVTVTDVELQNVKEERDQARGDLEDNTDRDELLSKAQTERDAANDRRTKAEVELAKTRVELMQANSQLLESIQQKVELSQQLEQWQMDMHELIDEQMRSKLINNRRAMAAESSAPSPPSSAAANLAKRVTSYKLWSLFQR

SEQ ID NO: 32422 - DNA, 2552 bp, DROSOPHILA
tttcgccatttggccaagaagtttccgtttgcgtcgttagcagtttcagtttatgttatagtttgcagctcgagtttcggtttttggtttgcgtttccgctgcctcagtggtttatagctcgctttggacaaattggccaaaccccggtgcacattacgtatacgtcatgctgcacattacgtatacgtcgccggccgctgttgttgcttttggtgctggtggtgatggtagtggtgcttctgctgctgctgctgctgctgctcctgatgatgatgtttagccttgtcccgcctgccgttgtcaagtggccaactagctagctgcctgccctgcatgataattttatataatttgcccccgctgccacaaatcggctcgagtggcgcttgtttttgttggttttacttctaccgttgccgttgcggtcagcagcgtcatcatcttcgagtgacccactaatgtgtgttgcatgtgcagcaccgctgcacgtctgccgccgccttctagtcgggtattaattccatgcaaactgcagatttatggcacgaactttgcgaatctgggttggtcctctttcggtctgccgcggctcgttatcccgagctgaaattgcacggaaaaaggtcaaacatataaatttgtgctttcactaaaataaccataaataatatgagtagtgcgtgccatcacattaaataatcacgtagattacgcgtttgaaaacgttttctgaaagtgaacgcaattttaactgcgtgtagataaagtggatctataaacgttcgttttatattgtagacgacaaacaatatattattttattccacaacataaaacgttatatatctacttgatttataaaagtatttacaggtaaccaccaggggctaatattattatctaaaatttctaaaacaaattgataatcaaaaaaacatctacacagctggcccaaagtaaacgaatgtgtgtttgtttaatcatatttacttttgattcatgaaaaacgagattcgactgatatgttggtatataaaccagaggattgagctttcttcgtttagatcacaaaatctccccaaaacgaaaatgaaacttcttctggttctggcattggcagtcttcgtagcccacgtggctgtggcccagacaactgattcgtctgacgatggagattactcttacgattacgctgatgacaacgatactgccggtagctccgaagacaacactgctgattctggagacactagtgatagctccactgacgtcgacagtggaaacgactctggggacgtcgattcctatgacgactacgagggctctagcgatgttacggaagcaccaactgctgctccagttgtcaaaaagaacaaaagagctggtgccaggaaaaacaacaggaacaacaagaataaggcagcagctaaacgtcgcaatgccgccgctgccaagaaaagtaataacaagaaggcggctaagaagcgaacacctgttgccgccaagaagcgggcaaatgctggacccaacaaacgtaggcgctctggataaatccagtttattatattcgtagctacaaattataaaaataaaaaattataccaaaaaaatttgttcccaaaattaccaagatttttttctatgacgtttataagttaggttttgaattaatatataataatgataatgatatttaccaagaatgtggttgttgggtatgggtgtttattattatgaattttgtacaaaacttgaatatcacagaaattttgaaatatatttaactatttcacccaatgttcaaaagacaagaaaacattctacataagtttttatcggcacgtgttttttccctcatttgtaaataaatatatttttgataaacaaaaacatacaccgcatatacttgaaaaattatataattttaaagacgtttaatgtcatatctattttttctataaaactactagcaggtcgcctaacgcgtaaaccatagacaaattgttcaaaaatccagataagacatttgtgaccttggctcttttaatataaaagagtttatattactttttcgtgctctaacacaaaatataatttcataatttcaacatatagcaatcgaaaaatgttaaacaaatacaagcagcacacacaggtgctctaagccaccgaaaattaagacgatgaattaaaaaaccaatatttgcattctacagatgtacatagaaaaataatgtaaaaaagctttatatatttataaatttcttcagaggagaaaaaactataaatacccagtgttgaagacttttaaactcagacgtttatacctaaggttacctatctgttcgttgactctatagatacaaaaaaaaaaagatgaggctgctgttggttttaagcctggccatattggttgccttcgtaacgggtgctgatgacactgacgatgactattacgattattacgactatggtgatgactactatgacgactctgatgtagagtccagttcggaaagtggtgttggtgcatccagtagctcagaagatg

SEQ ID NO: 32423 - DNA, 552 bp, DROSOPHILA
atgaaaaacgagattcgactgatatgttggtatataaaccagaggattgagctttcttcgtttagatcacaaaatctccccaaaacgaaaatgaaacttcttctggttctggcattggcagtcttcgtagcccacgtggctgtggcccagacaactgattcgtctgacgatggagattactcttacgattacgctgatgacaacgatactgccggtagctccgaagacaacactgctgattctggagacactagtgatagctccactgacgtcgacagtggaaacgactctggggacgtcgattcctatgacgactacgagggctctagcgatgttacggaagcaccaactgctgctccagttgtcaaaaagaacaaaagagctggtgccaggaaaaacaacaggaacaacaagaataaggcagcagctaaacgtcgcaatgccgccgctgccaagaaaagtaataacaagaaggcggctaagaagcgaacacctgttgccgccaagaagcgggcaaatgctggacccaacaaacgtaggcgctctggataa

SEQ ID NO: 32424 - protein, 183 aa, DROSOPHILA
MKNEIRLICWYINQRIELSSFRSQNLPKTKMKLLLVLALAVFVAHVAVAQTTDSSDDGDYSYDYADDNDTAGSSEDNTADSGDTSDSSTDVDSGNDSGDVDSYDDYEGSSDVTEAPTAAPVVKKNKRAGARKNNRNNKNKAAAKRRNAAAAKKSNNKKAAKKRTPVAAKKRANAGPNKRRRSG

SEQ ID NO: 32425 - DNA, 2561 bp, DROSOPHILA
aacgtgcaagaacgatgtagatggactggatcatgctgtcttggccgtgggctatggctcgatcaatggagaggactactggctggtgaagaactcgtggtccacctactggggcaacgatggctacatcctgatgtcggccaagaagaacaattgcggtgttatgaccatgcccacttatgtggagatgtagattgtcccgctcccgcctacatatttcttattttgtgtactctttttatttttacgcccacagggcgctaaatatgcaatacatttcataaactcttttgtaatccaagtcttttgaatcttatcactgctccgcttggctggaaatggagctaagtttagcttgggtcattatctccgcagtccatggtgtttcttaagttaattccatgccgataagccgataagcctagaagacaatgaccagttaccagttgaactttgcgcaagttgcaacagttttatgcgaatcggggtctttgccatttgtagtggaaatcatttctacagtaaaaactcgctacatttttaaaaattttaatcatttaatttcatcaatattaaattaaacatataattagttttaagaatctttactttgaataatgattctaaaaataagtataccttcttatttaaaaaacttgcaagcaaagcattgaatttttacattaaacccgttttacagtttttcaattaaaataaattaaaaatataacatgaagaatactttcaactgattctacaattttcactgctactacatttcattttagattaattgttcattttaaataatatatttataagttaatttgatataacaacaaataagtctaaatttaaatacatatttattggcatagatgttgcatccctggaattgcgccaattggtatttttctgttttggcttgatggtcatccgatacagtttagttattctttttgaattgtatttgcttggaatcgaaggaagcaacgaagccatggatgaattggtgaagatgtgccgggtgtgtatggacgagccgaaggacctgctagacatctacgacaacaagagcttgggggacagactgagcgacgatctacagcgaaccaaggaaccggagcccacgccggctgatttgctgaatatctgcagcgcatatccagtggataccggggacggctttccgctgaaaatttgcgaaccgtgccttattaaattgcgtgaggccttgagattcaggagacgctacacaaggaccatggaatacgtggcgcgcgtgaagagggagcaaagcgacaaggagacatgcgatctcctggaggccgaggattgggattttacggatcgcatcaagagcgaggaggaggaggaggaggacgatggggaccggaacgataagcagccgaagaaggagactcgcaacgaggtggataagaggcggcccttcaaatgcaccgactgccaaaaaagtttcaccggcaaggcccagttgaccatgcacaggcgcacccacaccaaaggatccacaaggaccagacgaaaagctcttaaatagtccttggcaacgcttggcaaaatgtagccaactaaaatagtaattaatcatcttgtatcatcgttttaaaaataagttcgatatatttttaaagtagaaacaagttagcgactaataatgaaagtacatatggagtgtagttttaaaaacaatttcatgttctcatattgacaataagataataaagaaatgataatcggatcgattcacaacagtttttaagcagctttctcactttggttgcgattactagctttgtcgatttcaaacaagaaattattatatggacattcaatatatgaaaatacctttaacaaatcttaactatttaaacttatttctttttgtttcttggctgctcgtccgtcgcttccctcgcgtgtgtgctgacatgtgtttttgtaggccgtttagttgcttgaagctttgctgacatttggaacatttgaacggctgttcgccagtatgagtccgggtgtggacttgcagttgcccaacttgccggaagcgcttggggcagttcggacaaccgaagggacgctcgccggtgtgacaacgtgtgtggctctgcaggttgcccttctgggcaaaggatcgcggacatagggagcacttgtagggtcgctcgccagtatgtatgcgcatgtgaatctctaggttttgtttttgggtgaacgactgtgtgcagagcttgcaccgatatggtccgggaacccttttcggtttgccccgttttgaggcgttccagattttatcatcatcttcgtgttcaagctcactatccgggctccatgagtcattgtccgagtaggatctcgccctcctcttggacttattgtgtggcgtctttgctggagaataactttgcgcgagcttatgctcattgttgtctggaagaggagaagatattggcttcggctctggaggcatgtacttaacctgcacaagctcaactaaaagaggttcggatgtctccggcgttttaccagcttccattacc

SEQ ID NO: 32426 - DNA, 561 bp, DROSOPHILA
atggatgaattggtgaagatgtgccgggtgtgtatggacgagccgaaggacctgctagacatctacgacaacaagagcttgggggacagactgagcgacgatctacagcgaaccaaggaaccggagcccacgccggctgatttgctgaatatctgcagcgcatatccagtggataccggggacggctttccgctgaaaatttgcgaaccgtgccttattaaattgcgtgaggccttgagattcaggagacgctacacaaggaccatggaatacgtggcgcgcgtgaagagggagcaaagcgacaaggagacatgcgatctcctggaggccgaggattgggattttacggatcgcatcaagagcgaggaggaggaggaggaggacgatggggaccggaacgataagcagccgaagaaggagactcgcaacgaggtggataagaggcggcccttcaaatgcaccgactgccaaaaaagtttcaccggcaaggcccagttgaccatgcacaggcgcacccacaccaaaggatccacaaggaccagacgaaaagctcttaaatag

SEQ ID NO: 32427 - protein, 186 aa, DROSOPHILA
MDELVKMCRVCMDEPKDLLDIYDNKSLGDRLSDDLQRTKEPEPTPADLLNICSAYPVDTGDGFPLKICEPCLIKLREALRFRRRYTRTMEYVARVKREQSDKETCDLLEAEDWDFTDRIKSEEEEEEDDGDRNDKQPKKETRNEVDKRRPFKCTDCQKSFTGKAQLTMHRRTHTKGSTRTRRKALK

SEQ ID NO: 32428 - DNA, 3643 bp, DROSOPHILA
aggccccattcttgcatggtcctctgtgtttttcaatttttcaattttttttcttcgtttttcgttgtttttcattaagctcagccattttgcagtggattgaggatggagcgcggcagccattttatgtttaatttataaaacacttgtgtgactgtgtgtgtgtgaatgtgtgtttttctgtgtgtgtgtgtttgtgtccgtatatgtgactgtgcacaatggcgacgaggtaacgtgaagaagaactgaaaagagaagcctgcatacggtggcaacttaaatagatttttatcgattttaaagccgtccgcatattgcaaactaaaaataaattcaacggcaggaaatgggaatgaaggcaggaagagttgaagggaaacagacgaaggaaaacaggcaggaagggctggttagccaaaaaggtagtcaggtgcaaaatgcacttggaaatgtcaaagctgctggcggtttgtcacacacaaacatccatgccaatacacgtggttactcaaacgaggacggacggacggacacatggctccgtgagacccggacaataaaacgaaattgaaaactaaattgcacgtaagagcttcccatgcgaaaaggcacggagaacacggagaagccatcaaccaaaaccgactgggcgtaacactggtatcaaacaccaaggggcgtggcagcggacagattaaatgggtagagaagtgttgggaaatttcaggcttttgcgacaaatcggggggcttaacaaggtttactgcttcttatttatttactatgtataagccaataacacgagattaaggtgcaaattatgtttgaaacgctcatcccgacgctcatccccaaacaatatatatctttaaattgcctggtcacctgaatcacttatacgactagttgaccatccccaaatttatagctaaattaaattcggtttaaaaatattcgaaaggacattctttcgttcgattgcagtgaagttttctttttagccatttatgcactcacctgagtctttgcctcctttaacgcaaatgccgaaaccatgatcgatttgctggtcgcgcgacatggaaacggttcgcgtcgtaagttcatggatattcgggacactacgatccctttcccgctcccgatcccgataaatctgaaaaataataacacattagaaaaattagaataatcacatagcacttagaatttgaattttgaggcatttaaaatgcatttgataatcattaacgattatttattgcatttgcgaatgtatttaggacagtaatacttcttctaaagattatcaaggtgagatcatattttagtccctaacctttttatctctcaaacaataattttttatacaccatttttatatatgtataaaaatgatttaaatatttgctgtatgaatatatgaatagagtgaacagattgacacccacctggtgggtggtggaaggcggactgctggcggggctccgcctgccggtgcgatcccgatcccgcgtgccgccgttgctgtagtggtagctactcgtaggaactgatgacgactgggtggcgccgaacatgcgtagcacctgctccggcgagatgggtcgcttcttgttgccattgctgctcgcgtgctggcccatcgatcgcccactggccgccgtcgaggtgggcagggtgcctgccgttccggcggccatgtggctggcgggtgaggagctaagataggcgctgccacgccccggcaacgagccgcccttggtgggcacgcccgccgagttgaagtagtagtgcggcgagtgggggcgctcgacgatcgtgtaagaggtgcccggcggggagtaatataatcccgatcgaccgccggcgccgcgcaacgaactggtgctgttgccaacgcgcgaaccgcctgccgccgccgacgatccaacgtagggtccgctgcccggcggcggactgatcatgccaaaggccattccaatgtcctccgcctcgaagctgctcggtcccggcgctccactactgcgcaggtggtgaccactgagtcccgccgatccgcccgtcggcacgctcgacgacgactgcgttccgcccattgagggcccaaggccaaagctggcggctgccgctgcggtcgcattgtatccgtagggtcgggcactccatcgcgagggtccaagatcacagagttcggcatagtcgttgccagctgcgctcattgtcagggggtcgccgtcgtatggaatgccactgcccccaaggcgcattacactgctggagctgcaatggattgattgacattaatcaaagggttaaatgttgactaaaagtagaaaggaatcttctagttacaaattgagctttgaaccgatccaccaagtacggtttctatgttcccatagatgtgtgaaatggtctcttttttcatatttcttgaaaaggcctaatcgactccggctgtcataccaggtactaacaggccagaattgggttaaaacatcccctctgcaccgctcctcttcaccattcaatctgcaatcccgcgaacaacttttgtttgcgtacgcaggccgctaagccgccgctcgcactgagcgccacattcagtgcaaacaatggcttaatctccagagtcatatgctatagtgctgtccctcttccctgtttcaccagccacgcgaacacatacacgccaacacacacacagacacattcatttgcgcacactgcgaaatcaatgggaacttatgccccgtgcttcattatttatgtgccaactttggttggcaaaacaaaaacaggttagcacaaaggcagcctatgtgccacactcccggtggcggagctcttggcccaaaccatccttacacatttacacgtcgtcctgatgaaggaaagagggcacctcgctactcataaatagttgaaaattgccgtgctcacacattgccacccacttagccatggccctggttacggaaatgactggaacacgatagccattctgtagttctggatataaaatatttgaaattttacaggatttaacaaaaacgctgtatattttacaggccgatgcatcacatgtattggcattcaataattactccacattccaaactctttcaaataaaaaagtccaactaagaatgcaaaacttcaaaaataatggaatacaggtttaaataaaaattaaacaaacacatatttcagtcttaggtcatacagccaagcatctaaatgttaaaaattagttttaaataaccgaaaaagtgaattttcattcaaacattttaaatagtagtacacatgttaattgaattacagacaactcaaaaaaaattcaatttatttttaaaaaaaagtttgaatcaatacaattccaaactgactagctcaatgattggatttcgaatggcaatcaagggcaagttccttaactttcgatcagcccatcgaattcaattaaaaaacttccccatcgattatgccaataaaagttgtagcaaagccataaacgaaacgctgtcgattaatcgagtgtaaatagcaaataagtttcgagtactcaaatactcgggcatatgtgagtttttctttttttgcatttgcatttgcatttgagttgttaagctgc

SEQ ID NO: 32429 - DNA, 1104 bp, DROSOPHILA
atgactctggagattaagccattgtttgcactgaatgtggcgctcagtgcgagcggcggcttagcggcctgcgtacgcaaacaaaagttgttcgcgggattgcagattgaatgctccagcagtgtaatgcgccttgggggcagtggcattccatacgacggcgaccccctgacaatgagcgcagctggcaacgactatgccgaactctgtgatcttggaccctcgcgatggagtgcccgaccctacggatacaatgcgaccgcagcggcagccgccagctttggccttgggccctcaatgggcggaacgcagtcgtcgtcgagcgtgccgacgggcggatcggcgggactcagtggtcaccacctgcgcagtagtggagcgccgggaccgagcagcttcgaggcggaggacattggaatggcctttggcatgatcagtccgccgccgggcagcggaccctacgttggatcgtcggcggcggcaggcggttcgcgcgttggcaacagcaccagttcgttgcgcggcgccggcggtcgatcgggattatattactccccgccgggcacctcttacacgatcgtcgagcgcccccactcgccgcactactacttcaactcggcgggcgtgcccaccaagggcggctcgttgccggggcgtggcagcgcctatcttagctcctcacccgccagccacatggccgccggaacggcaggcaccctgcccacctcgacggcggccagtgggcgatcgatgggccagcacgcgagcagcaatggcaacaagaagcgacccatctcgccggagcaggtgctacgcatgttcggcgccacccagtcgtcatcagttcctacgagtagctaccactacagcaacggcggcacgcgggatcgggatcgcaccggcaggcggagccccgccagcagtccgccttccaccacccaccagatttatcgggatcgggagcgggaaagggatcgtagtgtcccgaatatccatgaacttacgacgcgaaccgtttccatgtcgcgcgaccagcaaatcgatcatggtttcggcatttgcgttaaaggaggcaaagactcaggtgagtgcataaatggctaa

SEQ ID NO: 32430 - protein, 367 aa, DROSOPHILA
MTLEIKPLFALNVALSASGGLAACVRKQKLFAGLQIECSSSVMRLGGSGIPYDGDPLTMSAAGNDYAELCDLGPSRWSARPYGYNATAAAAASFGLGPSMGGTQSSSSVPTGGSAGLSGHHLRSSGAPGPSSFEAEDIGMAFGMISPPPGSGPYVGSSAAAGGSRVGNSTSSLRGAGGRSGLYYSPPGTSYTIVERPHSPHYYFNSAGVPTKGGSLPGRGSAYLSSSPASHMAAGTAGTLPTSTAASGRSMGQHASSNGNKKRPISPEQVLRMFGATQSSSVPTSSYHYSNGGTRDRDRTGRRSPASSPPSTTHQIYRDRERERDRSVPNIHELTTRTVSMSRDQQIDHGFGICVKGGKDSGECING

SEQ ID NO: 32431 - DNA, 2282 bp, DROSOPHILA
aaatcgaataaatattactaaataacgaatatacaataagatcctgctcagtggccactaaaccacaaaaaaaaaggaacgtataaaaccaaactgaaattgatagtaactgataagagtattgagaaacgtgttaaaaatcgaacttacaatattatctattattatcgcatatatatacaaatacaaaaaagaaaaaaaacgacagcaatatacattgactcatcagatacttagaccagaaggttaatgacctgtttatattttgctattgctagttctgaaacgaaaatgatcatacttgtaatttcatgaggtgcacagtatattacaattccctttgtaccccaatgaaaattataaacttcggctctgctgatgtgctatatacatacatattatatagatttttgtaaaccatctgaaaaattaagttttcagttattttcggttgccaaattgaaaagtgaaactaaacttttgttagttaccatcgaaaaatgtcttaataaatctatgccgtattggtcaaaaataaaattcctaaagatcttcaatctattgaagcctttgtccatcacacatgcatatcctaagttaagtttagtgcgcattgtttaaccctaatgtagaattagtttaatctgtaagggacaagtattgtttcaccctcatcaactaaccaataaccacataactaacccaaaccaagcctctattttgtattctagcgctaacccattaagctttaatcctattcggtgatgatttgcatggatcgaatttagttagctactaagactagtatggattattatttttgctaacgctttcatatgagccttataatgcattgggtcagatccgtgtggttttcccagtatcaagttaagaatgaaaccgttccagaaagtctcttttttgaccaagccagactttcaaaataataaaacccaagagatttgtgctaaacattatcaaagcttgtttttattgacttttatccattgaacttgcagaagccccacttgcaatttctcacggtgttcgagacgggacgacaccagttgttcttccaggaacagtagaccacctggtaaaccacctcaggagcgttggtggtcgtcgtggcggagctcgatggtgccgccgttgttgttgttgttgtggtcgttgtactcgttgtgggtgctggtaccacatagatcactcgccgcttgaatcccgatgcggactggaaaagaacgattgcagccaaaacacagatcacaaagtacttcatcgttgatattctctaaatgatccagcagttaataattcgaaatctctcaggtggaacatttatatgcccacacaattcaatgtaagtttctgattgtgtgtcaagaaatacagaacatctgtttggaaggccaagagtctggcggtttggtattagtcgatgggattccaaacagtttcaatatcgatgaaaaaccttgacattggcaggtatacttgcttttattgtttgtatactaacacagatattcggaagtagtgtattttcttatttacatttgactatggcatgtacacatattaaaacgattgattttatacttagtaccttgtggtttcatttagaatgtattaattgtttttgtatttctttcgttcgtggttatcagacagaaaagatttactttagttgtccctcttatgagttctgttttcggtgacgtactagtagttctttaatgcaaaatcttacaggcatacaagtagatcagattcggtagatgttactaaatgaagaacaaaacacggccaggtgagaatttttaatcaatctcggaaccgaataattccccgatgctatgttgcagagcatcgtcgatgatcgaactattttggcaagggatcggatcggttgtcgcaacactcgggctgtcagttctctggtggcattcgtggcgcgtgcatcttgcaatcttttaatatatttatacatcaatacacatagcatatacatagctgattcgagaatacccaagaaagagtactagaaggcgaagttggtagcaggcaggatcaataggatttcatcgtggcaacctgaggacaaacggaagacgctgtggagctgcaaagagaaaaggcgctcgaattcttccgagtcctgacctttgtgctactcttcctgatcatctccctgtatctatatcgattcgcattctaaaggactagcgctgactgcctgggatttttgggtgaggatcgagtccgttgtgtaaccagac

SEQ ID NO: 32432 - DNA, 282 bp, DROSOPHILA
atgaagtactttgtgatctgtgttttggctgcaatcgttcttttccagtccgcatcgggattcaagcggcgagtgatctatgtggtaccagcacccacaacgagtacaacgaccacaacaacaacaacaacggcggcaccatcgagctccgccacgacgaccaccaacgctcctgaggtggtttaccaggtggtctactgttcctggaagaacaactggtgtcgtcccgtctcgaacaccgtgagaaattgcaagtggggcttctgcaagttcaatggataa

SEQ ID NO: 32433 - protein, 93 aa, DROSOPHILA
MKYFVICVLAAIVLFQSASGFKRRVIYVVPAPTTSTTTTTTTTTAAPSSSATTTTNAPEVVYQVVYCSWKNNWCRPVSNTVRNCKWGFCKFNG

SEQ ID NO: 32434 - DNA, 8472 bp, DROSOPHILA
tacgcacatacttatgtacatgcttgtatagatgtatatgtaacgatctttatagctgctgtaattcgtactattgagaacggatctatagataggataaatcatggaaccaaacgatgtagagcacatcaactacggtcaacaaccttggtatcaaatattaaataatattaccatcgattaagtaacttacatttgatctacacattttttttcgattattgtattcagttgaaacgcctctgtagaaaaattcgtaagtcgtaaattaaaattgactatgcacatccagcaaacggaatatgcgtttagatttctattcctacaaagaaccaaacatatcattcatttcctggcttaatttctcttactttgatctattaacacttttgatttatttcgtggcgatggcttaacataattattgatttagctagaacaatctggcattatccgatcattatcaattatcatcgtgagtacaatttacaagaaactaccgttgtataaaccgattttgtataaattcatattgcgtatattgtatcagtactatctcacactaacgataaacactagactaatttaagctaatcaattcatattgatctacataagtgaaaagccaagtggtatatcaattcttcagcagcaattctcaaatcggtcgccaccattttttcataccccctacacttggccttgtataacttctacaaaaaatgtatgacaatatacacacacgtataaaatgtttcgatttgctcctctacgcattataatacacacaaaggctgtcttctagtttgggaactcacttatcgtctaatattactcactaagcttaagcctgactacaacacgtttgacgttcaatttgaattaagattaagtagcaacggtctcctatggcaatcgcttgcctactacgcaaattagatgagaaatcttcgattacttaagacctaatttacaactcgagcctacttatgcactaactttaaagagcctcagtcgaggagctgcaggggccgtggtatccattcgaagtgcctggcgatgattgggaggcagctgctctcaaagcggccccggctccagaggaacctgacgctccgccggcctgaggctgtatgaactgtttaagggttgcttccagccggggaggatactgtggataagggttagatagagtaaccaccaaaaacctaatcttgtgatgcaatatctttcgaaagtttctatcattttgtctccatttttggtaaacaaattggctacccatttacttggacaggtgttccaactcacctcctggttttcatccaccgatggcagcagctcgtccagtgagttgggcgtcaggggactgggcgtggccatggtgacgcgactgagggcgccatgttgcatcaacgcctcaccgatgacaatctgcggcttgttctgggtgagatgctgctgctgctgcaatcgcgccagtcgcagcttcatctcctgccgaatctccttctgctgcgtctccttctcgaagcgcatcatgctgtagctgcgcaccgaggagctggtgctgtgcaccgacgctagacttggtcttcgagaacctacaaacgaagcaaccaaaaacacaaaggtgtcagccagttgaatcgatgtggagaaatattcggatggggttgctgtattaaaactgagtgagtatcggagcgttttggttagaagaaacggcgtggtagagaaagatagtaatttagatatgagaaagaaaggcgacagcgatgcaaagccacagcgaaaggtcattccgatgcgattggaaagcaagctaagcaagtgcgattagctatagactcctaagttgcttgtatttcgaaaatatattattttaattcaaaattgtttgtaactataacctaacaagtactttaaaactgggcatttgatttagtttacagttttctttctattacacatcataaataatattttaattttgaattaaacttttcatttattactcttgatttttactaagtaacgatttaaacgtttacaacatgttaaactttctttaaccagcaaaaatgtatgtatttcttacatatgtacatatgtacacatgtaactaaccatcaagataaaattacgtatacgacaagtggtacaaacatattgaacttttccctacaactagtcccaaaatgttggataacaattcgctaagcttgccaaggagctcgcaaccggtttgtaggataagaatgaggacaaacaggaacttcatacacgaaaagtttctttcaaaatgatgtcatctttagttgaaaagttcaaggcgcacaggaagaaaagtagtagacgtagaagaagagcaagaagcgcaggacattcacatatagagttgcgggattaacatatatggaagaaaattttcatatcgtttatcgatttgtgtgtgtctgtgtatacgtgtgtgtgtatgcgtgtgtgtgtagggctttaaggactcaaccgaataagttcaggcaaaggtcagccggaggttgagtgacgtagaaaatcctgacggcagacaagtatccttagctgccggcaggatgcatgcaattgcaattgtgtgcgtgttccttgtgtctatgtgagagagagtggtataatttgtttgtaatttgcaatagttgaatatattagctagaaaatcgtgtggggttatgctatattacattgtttttcgtgttagtttggttaggatttctatgaacatagtcaccgccatattgcttcaatatcatcttgtcgaaatgtattactcatcatccttagaatccgtgattttttaacaacatttcctttacattagttattcgttaaataacattaacagtttgattaattagtttgtggctttgtgcgcgtgttttgcgttgtgttcgtgtgtgtgtgtgtgtatgtgtgtgtcttggtaacgatagaaaaagtaaaacaatttaacaacttggtatttggaaacagagggagctcggaagcacatttaacatcgatcatcaagaaacgtaaaatttgtttataagtttatcgtttttaactagacagagttgtcaatttaaacactaattagacaagcagggggacaggtttaaccaacgccaatgtacacaaattaaatatcaactgtaaataaactgagctgaattaacgatacatgattacgtgaataactcaatttgcgcgatttaattatggcacatgagacatgattttaatacgaattctgataactatgcaagggggggcgaaattcatttgaacaatgtaaatgagccacaatgtattccgttttcgagtttttccgggtcatgaacaataaaacatgtaatcaaattcaattcgccgaattttgctcttctaattgaattacagattcccatgctttttaactgtacgaatttgttagtacttaatttaaaatgcgtctagcatttgcattttcctcgtatactaaagagatacgatatttaaatgtatatgtaaggacattatttgcgatatataatatctgatagaatatctaaatttttcacagaacaatagatggtaaaaataaagtaatgattcaaatatactgtctgtactattcaaatgtacaaattcaacaattgaaagatcgtacactaaagactgaaagatctagagtttagagatagataaatgaaaatacaaactaagggctagcacagactttgaaattgatctctaaccaggagtggatgcaaccattgaacagatacgagtagcatatagttgaccttgtttttgttgtgatgtggaagtgtctctatattttgtatggacatggacatggacatggcgatacggaatgcgaatgggaatgagcagaccacacgatcgtacaaatggatgcgggatgactgatgcttgagttgatttaccgcaaatcgtggcgtttcactcgccggcgtgggcagtgcgccaatttgcaggtgatgcagctcggcgccagtggcgaatccgccgctggagtcgccgccattggtgtcggcatcgccgtaaccaccaaccacaccgacatggccatagccgtagctgtagccgtagccaccaacaccaccagcaccaccaccaccaccaccaccaccagcaccaggatgagccggatcgctatcggcatgggcaatggcatgggcatcatgtgcatgagggactgtcgtgctgggttctatgctatgcggaccgcactcatcgtcctcatcatcattgcccccaaaattctcaatgccattcatgcccaataatgtcctaaatctatcctgattcctcgacctcgccggcgacagctcgaagctgagcagatgccgctggtggttcagttgcttctgcaggtggcggttcatcgagagcgtgctctcgcagctgcggcaaccactcccactgccagttccaccgccaccaccaccatcatccaggtcgtcccgcgaatgctggctgcagcccgctccggatgtgtgccgcgacgaggcccgggaattctgtttggacaccgccgctatgtgacacgatatgagcaatatggcggccgatctagccgcacctgttcgtgacgtcgacaccaggatgcccttcgagccgccgcttccggacgcccctccaccgccggccccgcctgccacgcctccggcggcacccccgcccagtccgccggccgaggcgcgtcgattgccgtaggagccaatcgatcccgtcgaccgaatgctggaacgcgacgacggacgcgccgagtgaacggtaagcggtattcctgaaaacaaggtcatacatttatgagtaagctgaatatcagtacaaacttcaagcaaagcaaagaaatatataatggagatcactaaatgtcaaaaagggaataactaattccagtttacagattaagagaaaggttgaattgttatgctattaattcactacgaaaagaacagaaatctatatatttattttaaattaaactaaaggactttacattgtggacatttgagaattgtttgaaccactcacctgtatcgctggagtacagaatgggcggcggaatgctggcatctccgtaatttcgatgccgcggatacttcgtcttgctgaacagatgcagcaccatgcagatgagcccggccagaactgcgatgcccgtggagacgcccaacaaggtgggcagatccgagctcagttcgctgagatctatagaaataaaatgattaaacataaatagtcgcataattggtagcataatgattttaggtaacagtagctaatgctacttatactgcactcgctccaaagtatgttacaacatattagaactatttaaattgttaatttgagtaagaaaaaccttacctggtgtgcaaaagacacggcgcgttggcttcacgtagctgactgagtgaaatccgctggcacactggcacatcgcattgtgccgcacctgaacacaaagggagttctcatcgttgtagatgcaggtctcgtcgtagaaacactgatcgcccagttttttagctgtgaataattaatatgggcaatcaatatatatatatctaatctatatgctgagcagcaatagcaatatcttacgtttggcgcaaccctttatcagtccaagttgcactgggtagttgcgttcgcagctgcaggtctgcgaatccttgtcgcaggatacgtgcagcagcttgacgtcacacttcagctcgttgcacggcgctccaatatatttccccttagctgcaatgcgcaaacccaatttgcattaacaattaagccatctttaaaagaatgcaaattaaatgaatgtcaggccatcaaaacgaccaaaagccttttgcacagtttaaggacttattgagctttgcaaatgtgttatatatgtagagcagccttatttgaatattcctcttaattggtatttaaaatcaattggtgttggaaaaaaatgtgtgcacatgtttgctaataaagtgtgaaactataatattttacaattgtaacaagtacaagttataaattgaatttacaatgcacttttttcagaaatgtgccgagtaatttactaacagattatcaaatgtggtaaaatatttcgtacgtttatcagaattcagagtgtttactcaaccgtaaatcataaaatttaattgtcttcatacaaatatcaaatgcaattctcttagaatcaaatattataggctggcacattaacaacgcaaattaccaaatttgtcagaaataaattgaatgttcatattaggtgcaaatatgcatatatgaaatgttactatcagcttgccgttggcatgcaaattggatcaaaattgaatatttaattgcacaccgaatatcaattgcattaaaatcacaattctatctgtttgcacatccatgctgttttcctactattttttttggaaaaacttataatgggctaccagcgtgtgttttcgtatttggtaattcccgcatcatggccaagataaaatggatgggaccgtgaatcatgcagttgcagctgctgcggcagatgcggtgccaggtggtcaggatgtgccaaaaataaaagttaaacaaacaaccatgaaaggacccgaatggcgactggatgttgtgcaatttatggctctcatgatctcggcggtttttggacttgggactccggaaccgagcaaaggtcaatgcaaactaacgaaacgcagcgacggccaagtgcattatcaacaaaaattccatttatttcggttcgcaagtgcagcagccacaaatattcatttacgaaatgggattaaacaaagcggcgcacagataagttttcacagcaagtacttgtatttaaggacttaattaagtaactggtgtgtatatacatttaaacaaaaataaaagctgcagaattggaattatatgtacaacgaaaatacatgcaagttattttatagttatagaatttgggatttctttaaacatatttatcaatagctttaaaatagattttaaaataaaatgtagtgatttttgaacccgaacccacctgacttattattaagcaaggcctccaattcgtcgacgtcgtccggataactgccatagtcgtcatcatcaggcacattggcggcatcacgcttccgcgtgcgtttctcggtatgctcatgctgttgctgctgcggtacgccatccagatccatcgtgctggagatgttcagcaggatcggaatggcggccgagtcggaggacgtggccaggacagaggcggacacggaggcgtggagcaggagaaggcaaccgtagaggagcacggcctggcccagttgcatggccatcaagtggcagccgtgtggatgcagctgctgctgtttttgatgttgttgcgccatcagctgcagtcgccgcagtagacaaggcaacgttaacttcgccattttgtcattttcgcaccgccagccgcttctcaacacattcgcaattgtttgcgaactttcgccatttggccaagaagtttccgtttgcgtcgttagcagtttcagtttatgttatagtttgcagctcgagtttcggtttttggtttgcgtttccgctgcctcagtggtttatagctcgctttggacaaattggccaaaccccggtgcacattacgtatacgtcatgctgcacattacgtatacgtcgccggccgctgttgttgcttttggtgctggtggtgatggtagtggtgcttctgctgctgctgctgctgctgctcctgatgatgatgtttagccttgtcccgcctgccgttgtcaagtggccaactagctagctgcctgccctgcatgataattttatataatttgcccccgctgccacaaatcggctcgagtggcgcttgtttttgttggttttacttctaccgttgccgttgcggtcagcagcgtcatcatcttcgagtgacccactaatgtgtgttgcatgtgcagcaccgctgcacgtctgccgccgccttctagtcgggtattaattccatgcaaactgcagatttatggcacgaactttgcgaatctgggttggtcctctttcggtctgccgcggctcgttatcccgagctgaaattgcacggaaaaaggtcaaacatataaatttgtgctttcactaaaataaccataaataatatgagtagtgcgtgccatcacattaaataatcacgtagattacgcgtttgaaaacgttttctgaaagtgaacgcaattttaactgcgtgtagataaagtggatctataaacgttcgttttatattgtagacgacaaacaatatattattttattccacaacataaaacgttatatatctacttgatttataaaagtatttacaggtaaccaccaggggctaatattattatctaaaatttctaaaacaaattgataatcaaaaaaacatctaca

SEQ ID NO: 32435 - DNA, 2415 bp, DROSOPHILA
atggcgaagttaacgttgccttgtctactgcggcgactgcagctgatggcgcaacaacatcaaaaacagcagcagctgcatccacacggctgccacttgatggccatgcaactgggccaggccgtgctcctctacggttgccttctcctgctccacgcctccgtgtccgcctctgtcctggccacgtcctccgactcggccgccattccgatcctgctgaacatctccagcacgatggatctggatggcgtaccgcagcagcaacagcatgagcataccgagaaacgcacgcggaagcgtgatgccgccaatgtgcctgatgatgacgactatggcagttatccggacgacgtcgacgaattggaggccttgcttaataataagtcagctaaggggaaatatattggagcgccgtgcaacgagctgaagtgtgacgtcaagctgctgcacgtatcctgcgacaaggattcgcagacctgcagctgcgaacgcaactacccagtgcaacttggactgataaagggttgcgccaaacctaaaaaactgggcgatcagtgtttctacgacgagacctgcatctacaacgatgagaactccctttgtgttcaggtgcggcacaatgcgatgtgccagtgtgccagcggatttcactcagtcagctacgtgaagccaacgcgccgtgtcttttgcacaccagatctcagcgaactgagctcggatctgcccaccttgttgggcgtctccacgggcatcgcagttctggccgggctcatctgcatggtgctgcatctgttcagcaagacgaagtatccgcggcatcgaaattacggagatgccagcattccgccgcccattctgtactccagcgatacaggaataccgcttaccgttcactcggcgcgtccgtcgtcgcgttccagcattcggtcgacgggatcgattggctcctacggcaatcgacgcgcctcggccggcggactgggcgggggtgccgccggaggcgtggcaggcggggccggcggtggaggggcgtccggaagcggcggctcgaagggcatcctggtgtcgacgtcacgaacaggtgcggctagatcggccgccatattgctcatatcgtgtcacatagcggcggtgtccaaacagaattcccgggcctcgtcgcggcacacatccggagcgggctgcagccagcattcgcgggacgacctggatgatggtggtggtggcggtggaactggcagtgggagtggttgccgcagctgcgagagcacgctctcgatgaaccgccacctgcagaagcaactgaaccaccagcggcatctgctcagcttcgagctgtcgccggcgaggtcgaggaatcaggatagatttaggacattattgggcatgaatggcattgagaattttgggggcaatgatgatgaggacgatgagtgcggtccgcatagcatagaacccagcacgacagtccctcatgcacatgatgcccatgccattgcccatgccgatagcgatccggctcatcctggtgctggtggtggtggtggtggtggtggtgctggtggtgttggtggctacggctacagctacggctatggccatgtcggtgtggttggtggttacggcgatgccgacaccaatggcggcgactccagcggcggattcgccactggcgccgagctgcatcacctgcaaattggcgcactgcccacgccggcgagtgaaacgccacgatttgcggtaaatcaactcaagcatcagtcatcccgcatccatttgtacgatcgtgtggtctgctcattcccattcgcattccgtatcgccatgtccatgtccatgtccatacaaaatatagagacacttccacatcacaacaaaaacaaggtcaactatatgctactcgtatctgttcaatggttgcatccactcctggttagagatcaatttcaaagttctcgaagaccaagtctagcgtcggtgcacagcaccagctcctcggtgcgcagctacagcatgatgcgcttcgagaaggagacgcagcagaaggagattcggcaggagatgaagctgcgactggcgcgattgcagcagcagcagcatctcacccagaacaagccgcagattgtcatcggtgaggcgttgatgcaacatggcgccctcagtcgcgtcaccatggccacgcccagtcccctgacgcccaactcactggacgagctgctgccatcggtggatgaaaaccaggagtatcctccccggctggaagcaacccttaaacagttcatacagcctcaggccggcggagcgtcaggttcctctggagccggggccgctttgagagcagctgcctcccaatcatcgccaggcacttcgaatggataccacggcccctgcagctcctcgactgaggctctttaa

SEQ ID NO: 32436 - protein, 804 aa, DROSOPHILA
MAKLTLPCLLRRLQLMAQQHQKQQQLHPHGCHLMAMQLGQAVLLYGCLLLLHASVSASVLATSSDSAAIPILLNISSTMDLDGVPQQQQHEHTEKRTRKRDAANVPDDDDYGSYPDDVDELEALLNNKSAKGKYIGAPCNELKCDVKLLHVSCDKDSQTCSCERNYPVQLGLIKGCAKPKKLGDQCFYDETCIYNDENSLCVQVRHNAMCQCASGFHSVSYVKPTRRVFCTPDLSELSSDLPTLLGVSTGIAVLAGLICMVLHLFSKTKYPRHRNYGDASIPPPILYSSDTGIPLTVHSARPSSRSSIRSTGSIGSYGNRRASAGGLGGGAAGGVAGGAGGGGASGSGGSKGILVSTSRTGAARSAAILLISCHIAAVSKQNSRASSRHTSGAGCSQHSRDDLDDGGGGGGTGSGSGCRSCESTLSMNRHLQKQLNHQRHLLSFELSPARSRNQDRFRTLLGMNGIENFGGNDDEDDECGPHSIEPSTTVPHAHDAHAIAHADSDPAHPGAGGGGGGGGAGGVGGYGYSYGYGHVGVVGGYGDADTNGGDSSGGFATGAELHHLQIGALPTPASETPRFAVNQLKHQSSRIHLYDRVVCSFPFAFRIAMSMSMSIQNIETLPHHNKNKVNYMLLVSVQWLHPLLVRDQFQSSRRPSLASVHSTSSSVRSYSMMRFEKETQQKEIRQEMKLRLARLQQQQHLTQNKPQIVIGEALMQHGALSRVTMATPSPLTPNSLDELLPSVDENQEYPPRLEATLKQFIQPQAGGASGSSGAGAALRAAASQSSPGTSNGYHGPCSSSTEAL

SEQ ID NO: 32437 - DNA, 2159 bp, DROSOPHILA
gggactccggaaccgagcaaaggtcaatgcaaactaacgaaacgcagcgacggccaagtgcattatcaacaaaaattccatttatttcggttcgcaagtgcagcagccacaaatattcatttacgaaatgggattaaacaaagcggcgcacagataagttttcacagcaagtacttgtatttaaggacttaattaagtaactggtgtgtatatacatttaaacaaaaataaaagctgcagaattggaattatatgtacaacgaaaatacatgcaagttattttatagttatagaatttgggatttctttaaacatatttatcaatagctttaaaatagattttaaaataaaatgtagtgatttttgaacccgaacccacctgacttattattaagcaaggcctccaattcgtcgacgtcgtccggataactgccatagtcgtcatcatcaggcacattggcggcatcacgcttccgcgtgcgtttctcggtatgctcatgctgttgctgctgcggtacgccatccagatccatcgtgctggagatgttcagcaggatcggaatggcggccgagtcggaggacgtggccaggacagaggcggacacggaggcgtggagcaggagaaggcaaccgtagaggagcacggcctggcccagttgcatggccatcaagtggcagccgtgtggatgcagctgctgctgtttttgatgttgttgcgccatcagctgcagtcgccgcagtagacaaggcaacgttaacttcgccattttgtcattttcgcaccgccagccgcttctcaacacattcgcaattgtttgcgaactttcgccatttggccaagaagtttccgtttgcgtcgttagcagtttcagtttatgttatagtttgcagctcgagtttcggtttttggtttgcgtttccgctgcctcagtggtttatagctcgctttggacaaattggccaaaccccggtgcacattacgtatacgtcatgctgcacattacgtatacgtcgccggccgctgttgttgcttttggtgctggtggtgatggtagtggtgcttctgctgctgctgctgctgctgctcctgatgatgatgtttagccttgtcccgcctgccgttgtcaagtggccaactagctagctgcctgccctgcatgataattttatataatttgcccccgctgccacaaatcggctcgagtggcgcttgtttttgttggttttacttctaccgttgccgttgcggtcagcagcgtcatcatcttcgagtgacccactaatgtgtgttgcatgtgcagcaccgctgcacgtctgccgccgccttctagtcgggtattaattccatgcaaactgcagatttatggcacgaactttgcgaatctgggttggtcctctttcggtctgccgcggctcgttatcccgagctgaaattgcacggaaaaaggtcaaacatataaatttgtgctttcactaaaataaccataaataatatgagtagtgcgtgccatcacattaaataatcacgtagattacgcgtttgaaaacgttttctgaaagtgaacgcaattttaactgcgtgtagataaagtggatctataaacgttcgttttatattgtagacgacaaacaatatattattttattccacaacataaaacgttatatatctacttgatttataaaagtatttacaggtaaccaccaggggctaatattattatctaaaatttctaaaacaaattgataatcaaaaaaacatctacacagctggcccaaagtaaacgaatgtgtgtttgtttaatcatatttacttttgattcatgaaaaacgagattcgactgatatgttggtatataaaccagaggattgagctttcttcgtttagatcacaaaatctccccaaaacgaaaatgaaacttcttctggttctggcattggcagtcttcgtagcccacgtggctgtggcccagacaactgattcgtctgacgatggagattactcttacgattacgctgatgacaacgatactgccggtagctccgaagacaacactgctgattctggagacactagtgatagctccactgacgtcgacagtggaaacgactctggggacgtcgattcctatgacgactacgagggctctagcgatgtt

SEQ ID NO: 32438 - DNA, 159 bp, DROSOPHILA
atgcagggcaggcagctagctagttggccacttgacaacggcaggcgggacaaggctaaacatcatcatcaggagcagcagcagcagcagcagcagaagcaccactaccatcaccaccagcaccaaaagcaacaacagcggccggcgacgtatacgtaa

SEQ ID NO: 32439 - protein, 52 aa, DROSOPHILA
MQGRQLASWPLDNGRRDKAKHHHQEQQQQQQQKHHYHHHQHQKQQQRPATYT

SEQ ID NO: 32440 - DNA, 3020 bp, DROSOPHILA
atccctggaattgcgccaattggtatttttctgttttggcttgatggtcatccgatacagtttagttattctttttgaattgtatttgcttggaatcgaaggaagcaacgaagccatggatgaattggtgaagatgtgccgggtgtgtatggacgagccgaaggacctgctagacatctacgacaacaagagcttgggggacagactgagcgacgatctacagcgaaccaaggaaccggagcccacgccggctgatttgctgaatatctgcagcgcatatccagtggataccggggacggctttccgctgaaaatttgcgaaccgtgccttattaaattgcgtgaggccttgagattcaggagacgctacacaaggaccatggaatacgtggcgcgcgtgaagagggagcaaagcgacaaggagacatgcgatctcctggaggccgaggattgggattttacggatcgcatcaagagcgaggaggaggaggaggaggacgatggggaccggaacgataagcagccgaagaaggagactcgcaacgaggtggataagaggcggcccttcaaatgcaccgactgccaaaaaagtttcaccggcaaggcccagttgaccatgcacaggcgcacccacaccaaaggatccacaaggaccagacgaaaagctcttaaatagtccttggcaacgcttggcaaaatgtagccaactaaaatagtaattaatcatcttgtatcatcgttttaaaaataagttcgatatatttttaaagtagaaacaagttagcgactaataatgaaagtacatatggagtgtagttttaaaaacaatttcatgttctcatattgacaataagataataaagaaatgataatcggatcgattcacaacagtttttaagcagctttctcactttggttgcgattactagctttgtcgatttcaaacaagaaattattatatggacattcaatatatgaaaatacctttaacaaatcttaactatttaaacttatttctttttgtttcttggctgctcgtccgtcgcttccctcgcgtgtgtgctgacatgtgtttttgtaggccgtttagttgcttgaagctttgctgacatttggaacatttgaacggctgttcgccagtatgagtccgggtgtggacttgcagttgcccaacttgccggaagcgcttggggcagttcggacaaccgaagggacgctcgccggtgtgacaacgtgtgtggctctgcaggttgcccttctgggcaaaggatcgcggacatagggagcacttgtagggtcgctcgccagtatgtatgcgcatgtgaatctctaggttttgtttttgggtgaacgactgtgtgcagagcttgcaccgatatggtccgggaacccttttcggtttgccccgttttgaggcgttccagattttatcatcatcttcgtgttcaagctcactatccgggctccatgagtcattgtccgagtaggatctcgccctcctcttggacttattgtgtggcgtctttgctggagaataactttgcgcgagcttatgctcattgttgtctggaagaggagaagatattggcttcggctctggaggcatgtacttaacctgcacaagctcaactaaaagaggttcggatgtctccggcgttttaccagcttccattaccgagaccggcatctgtggttctatgttatcccctatattcaggcaatactctatatcgtccagctccttcatcatcagacgcagctgttcaaagtactgatggctctttcggcattgccgtcttagccgataggcatttcttacggcctccgcacactccacgcagatgaactgcggcattccgtcctccttatgcacgctgcatccgctgcattccctcagcattgtggccaagaccggctcctgctcctggacccgattggaggaggcatatggctctgtatatatatccaacaggcagtcggattcgtccctgcaaacgcggcacatttgcgaaatgtccatcgtggccgagctccagagtttcgtaggcaggatcaaaaatatacaatatcaacaaaatgcaactattaaaataccaatcactggaatataccaacaaaaaaataccgaataatcagctgtgcttcgcatcttattaatttatcagctttgatttatgatttaaagttgtttttttaagttaaaaatgggtttttcgtattttttaaatattttattttaatctggctcttagagcatcagaatattccccacttatcgatataccttaaagctgtacaatgggcgcgaagcttaaaatgtaacgctgttttgaatatgagtaattttttgaatttgtatgaaatcacggaaaaacatagtttgacaataattgaattgaacttaagaacttgcttgtacaaataaataacaaaatatgtagtctacaagcgtaaattgatttgcttcgcaaactttacaaaattagatgcatacctattttatagattatattcaaaaactaaacaaaaacattcaacattaaaatctaggaatgcaaattcgtcccaaactctacttggtattgtacatggatgcaattgcaggatcttcggtttcgtaaatgataagcacatccctgaatttatcaagcaattgcagcagttgcgaacgtcgcaggttctcgaagtacatgatctcctccagatgatgctcgctcttaaagtaacccatctgatacagcttcacaagcagagatagatcatccacgttggcagaggcgggaattcgacggatggcggctcgatccgcatcgctgaaaacctgtagcagctccttcagcttctgctcatcctccatggaatcgaggctgtcgcaattgtccgtgctcatcgaggcggtgatgctgaaattggacttgtggctggatgatggctgcacggcgatgttgtccgaggccagtgatgaatggtcctcggacgcctcacgacgatgtccgcccaccaataccgctggcactggc

SEQ ID NO: 32441 - DNA, 1020 bp, DROSOPHILA
atggacatttcgcaaatgtgccgcgtttgcagggacgaatccgactgcctgttggatatatatacagagccatatgcctcctccaatcgggtccaggagcaggagccggtcttggccacaatgctgagggaatgcagcggatgcagcgtgcataaggaggacggaatgccgcagttcatctgcgtggagtgtgcggaggccgtaagaaatgcctatcggctaagacggcaatgccgaaagagccatcagtactttgaacagctgcgtctgatgatgaaggagctggacgatatagagtattgcctgaatataggggataacatagaaccacagatgccggtctcggtaatggaagctggtaaaacgccggagacatccgaacctcttttagttgagcttgtgcaggttaagtacatgcctccagagccgaagccaatatcttctcctcttccagacaacaatgagcataagctcgcgcaaagttattctccagcaaagacgccacacaataagtccaagaggagggcgagatcctactcggacaatgactcatggagcccggatagtgagcttgaacacgaagatgatgataaaatctggaacgcctcaaaacggggcaaaccgaaaagggttcccggaccatatcggtgcaagctctgcacacagtcgttcacccaaaaacaaaacctagagattcacatgcgcatacatactggcgagcgaccctacaagtgctccctatgtccgcgatcctttgcccagaagggcaacctgcagagccacacacgttgtcacaccggcgagcgtcccttcggttgtccgaactgccccaagcgcttccggcaagttgggcaactgcaagtccacacccggactcatactggcgaacagccgttcaaatgttccaaatgtcagcaaagcttcaagcaactaaacggcctacaaaaacacatgtcagcacacacgcgagggaagcgacggacgagcagccaagaaacaaaaagaaataagtttaaatag

SEQ ID NO: 32442 - protein, 339 aa, DROSOPHILA
MDISQMCRVCRDESDCLLDIYTEPYASSNRVQEQEPVLATMLRECSGCSVHKEDGMPQFICVECAEAVRNAYRLRRQCRKSHQYFEQLRLMMKELDDIEYCLNIGDNIEPQMPVSVMEAGKTPETSEPLLVELVQVKYMPPEPKPISSPLPDNNEHKLAQSYSPAKTPHNKSKRRARSYSDNDSWSPDSELEHEDDDKIWNASKRGKPKRVPGPYRCKLCTQSFTQKQNLEIHMRIHTGERPYKCSLCPRSFAQKGNLQSHTRCHTGERPFGCPNCPKRFRQVGQLQVHTRTHTGEQPFKCSKCQQSFKQLNGLQKHMSAHTRGKRRTSSQETKRNKFK

SEQ ID NO: 32443 - DNA, 4628 bp, DROSOPHILA
aaccaagcaagaaaaacaaaaaccaaatccaaaaaacagaaatagaaacagaaacctaaaactttagcaaacaacaaaaaaacaccacaacaaccacatcaataacagagcattttgtacaacaagcacaacaaaagcttgaaaagtcccaccattatcatcatcaacaacaacaataacaacaacaaagactcatttgaattgcaacaaataatagacaacaagaacaacaaccagcacgtacacaatgtgacaataaaacagtgtggccagtagcagctagaaagcaaaaagccaaaaaggaatttaattgcacgcactagacgagaagtagccattaaaagagccagcagaaacagccaaaaacagccagaacaccgaaacagtgataaaaatcgagaacgagcgcacaagcagcgagaaatccgagaacgcagccgagaaagcagaagttatataatatcaattcaagcgtacttttccaacttgtttcctctcttgttgtcgaatgtccttgcaccgcctttaaactctcgctctgtgtgtgtgcatcccgttcacatgtgtgtgtgtgtctcccgtcccaccagccaccttcccacacatccgttccacgatcggtgtccgtgtttgtcgtgtagcaccaccaccacctagagaaatccagcaccaccaaaccaaaagcaatataagagcaccctcacaagtataaataagattaaaaccgcagcaaccacaatatataccacctgcaacacctgcaatcgcaatcgcaatagcaatcgacttggcggtgcaaccaccctaagagccagctgaaccaccgacctctggggctgacagacaggtcagagtgaagtacccactagccaacccaaatagcctcctggttcctggtagctcccgatagctcccccgattgatccactccacataaccacataccagcaccacaattgcacattactaccatagatacccccggcagtactactaccgcatggagcgcggcaccagcggtggtcagcagcagcagcaccagcagcagcagcagtcatcgcaccaccaccaccagcagcagcagtcgtcgcaccatcagcagcaacacgcgcaccaccagcagcagcgacaccaccagcatgtcgtcgctgtgcacagcttcgatccgtatctgaccgtcggcggggcggacgaggagcacacgtcgggcacctcgtcctttgacaatcccgccaccaaaaagaagccgcccaagctgaagcccatccaccgatccctgtccatggccatcgataattatgcaccgtcttccggggatctcgacatggatttggacatggaaatgggcatggacatggacctggatatggagatggacctggagggcgagggcatcatcatcagtgagaagccgctgatccaccgctcggcctcgcccctgccccatccccgatccggagccctacccccgcagaccctagcaatcccagcacaacagcaacagcaacatattatatcccatcccagccagcgtggcggcggtggtggcaccggcagtggtgccgtttccccagccctttctgcccgccagcaacaccatcacctcctccaacaacaacaacaacaccaccaccagcaacaacaacaacaccaacaacaacaacaacaacagcaacatcagttgcacttgcacacttttcagcaacttgccgcacaggcagctgctgcaaggcatcagacaacccaccagcagcattcactatcgcaccgccaacatacgcaacaacatacgcatccacatcaacagcttcaacatccgcatccgcatcagcatgcgcactcgaagagctcaccaacctcacacgcggttagcccggtgctgggccaacagcaccgccagcagccggacatttacctggtcagcagcagcagcagcctgggcgatggtgtcggtgtgggcagcttgggcgtgggcatgggcatgggcatggggcgatcgttgggcgggagcacatcgcccattcagttcatcgatgtggacgatatgcccaatccaacggtggcccctcatcagcgcccaatgcatccgctgaagaagaacctgttccggcgatccgacaccattgacgtccatccgtctaccaattttcagatgaagaaaacgcattccttccacgcgcaacaggatcccgccgccctggaccaaatccagctggccgtagcagccggctcggcgacctccagtcgtcgtaccagttcggtgaggggcaacttcctaatgcccggtccaccggccggcgccaaagagatatcccgctcaccgtcgcccagccgacggggctgtcgctcccaccgatcgttcaacgatccgggtcggaggcccagcgtgaaaccggactctgtggtggaatcgcagatacgacatccctcgctgaacgatgacctcatggagccgatgaacggtcggaatctctttgcggcacccaccaatctgtcgctggaaaatgagctgttcgttgacacgcgttcgcgcagcaacagtcacaccaagatggaggagctcggtctggcggagattaccgccgctgccgtggcagtgcagcgattgcgcaagagctccggagcaggatcctttgaggatgcagccgccggccacagtgccacccacccgccttcagcagcaaatagcatcaagcagaagcgggactcacaccacccacacacccgccaagttagcactcacagtttggagctagacggacgaccatcgacctctgcggcagcggcagccgcagcagcgggcggacatggcctgcagctccacagcgcggcggcagcggccagtgcagcgtaccactttaagcggggcgctcagcacggacggtcgctctacctgtcgcccagcaatctggaggagctcgccgtccaccggccaggtgttctggctgcagcagcagcattccagggcaccaacgccagtgccagtgtgaagcaggccaaggccctgcacagcgccagcgtacgactccgcagctatcgggagacactgagcgcctccaagaagtccaaaagcttcatcggagacgccagtgctggcagcggtccgcaggcgggcgacgacttcgagctgagctcgccccaccgacgcaacagtcgcccgctatccacagttgtgcctgggtcaagcatcgaggaaataaagaggagtcctcgacccatttccgcttcggcggcggcggctgcctttttggaggagaagcgacccagcttcgagaggaagtcctcgctgacgtacgaccacgagctgagcgatgccgcctttgcggcccaggtgctgaggcccttccaccacaaactggctgccggaaggaaggggtccgtgaccggaggctcgcacaaactgaagaagaagtcgctgagcgatgacaccgacgaggatgaagcggcggatcgcaagcgcaagcggatcgtctgcattgtcctgtccacggtcctgttgtgcctggtgtgcgccagcgtttttgtgctgaccatcacgctgacctccagctccggccagggcggaaagaaggcgcattcgttcagtagggacacccccgtccattggacgggcatgaggccctcatgaactccaacgcagaggctgtgcttcggccaattcaccaacctgccagctggttatcccctgactttggactcgatttcgttaacgtttgcgttttcgcttccgcttcgattctgtgctgtcgttccgctctacgttttgtttcctctgagtctccgggtctctggtggccccgaattgtccaactgacgtttaaagactgcgggaatgaagcaactagaggagaggcagcggcaactatcgaagagtctgtaagtaggcaaggcaatgagtttgcgtttccaaaagtagaaatggatgttgctcgatttgcacaagtctcaaaccgcagagagcttcgattgttgataaatgatttgcgtcttgtggggaaaataattattttcatgctgagtgtagcctattttcagccccacattgggcgccaatttgttgtgtacgcacgtcaatggtttgtgtctaagacattgttgttagtgaattaaatctgttatatttttgagtctcaagacttggcagtaaaaaatatacgttatgtatttaaataaatatgttaaaagcagtggcatatattgaatactagaaattttaaacatatacgtaaatcgtaaagatatcaacaatcgaataactactcaaggtgaaattgagtattctgattttgctatatcttaaactgcattccatctctacctcagtgatgcaaatcaataaacgaggtcagcttgggtccattatcgggcttaaagcatcacagtcggtgtggccatattgcaatatgtccttacagaccataaaactgtgcaaatacaaatatgtgtgtcagctcccactcccacatcccctctgcccacaaaacgctccctttactatacaccgcccccaaacaaggcgaacaaacaaacaaacacgacccagcagctggggaggaattttcaaatattgagctggcaaaagctcagcaaaatctcgagcattacataactgactaactgactaacct

SEQ ID NO: 32444 - DNA, 2572 bp, DROSOPHILA
atggagcgcggcaccagcggtggtcagcagcagcagcaccagcagcagcagcagtcatcgcaccaccaccaccagcagcagcagtcgtcgcaccatcagcagcaacacgcgcaccaccagcagcagcgacaccaccagcatgtcgtcgctgtgcacagcttcgatccgtatctgaccgtcggcggggcggacgaggagcacacgtcgggcacctcgtcctttgacaatcccgccaccaaaaagaagccgcccaagctgaagcccatccaccgatccctgtccatggccatcgataattatgcaccgtcttccggggatctcgacatggatttggacatggaaatgggcatggacatggacctggatatggagatggacctggagggcgagggcatcatcatcagtgagaagccgctgatccaccgctcggcctcgcccctgccccatccccgatccggagccctacccccgcagaccctagcaatcccagcacaacagcaacagcaacatattatatcccatcccagccagcgtggcggcggtggtggcaccggcagtggtgccgtttccccagccctttctgcccgccagcaacaccatcacctcctccaacaacaacaacaacaccaccaccagcaacaacaacaacaccaacaacaacaacaacaacagcaacatcagttgcacttgcacacttttcagcaacttgccgcacaggcagctgctgcaaggcatcagacaacccaccagcagcattcactatcgcaccgccaacatacgcaacaacatacgcatccacatcaacagcttcaacatccgcatccgcatcagcatgcgcactcgaagagctcaccaacctcacacgcgcagcagcagcagcctgggcgatggtgtcggtgtgggcagcttgggcgtgggcatgggcatgggcatggggcgatcgttgggcgggagcacatcgcccattcagttcatcgatgtggacgatatgcccaatccaacggtggcccctcatcagcgcccaatgcatccgctgaagaagaacctgttccggcgatccgacaccattgacgtccatccgtctaccaattttcagatgaagaaaacgcattccttccacgcgcaacaggatcccgccgccctggaccaaatccagctggccgtagcagccggctcggcgacctccagtcgtcgtaccagttcggtgaggggcaacttcctaatgcccggtccaccggccggcgccaaagagatatcccgctcaccgtcgcccagccgacggggctgtcgctcccaccgatcgttcaacgatccgggtcggaggcccagcgtgaaaccggactctgtggtggaatcgcagatacgacatccctcgctgaacgatgacctcatggagccgatgaacggtcggaatctctttgcggcacccaccaatctgtcgctggaaaatgagctgttcgttgacacgcgttcgcgcagcaacagtcacaccaagatggaggagctcggtctggcggagattaccgccgctgccgtggcagtgcagcgattgcgcaagagctccggagcaggatcctttgaggatgcagccgccggccacagtgccacccacccgccttcagcagcaaatagcatcaagcagaagcgggactcacaccacccacacacccgccaagttagcactcacagtttggagctagacggacgaccatcgacctctgcggcagcggcagccgcagcagcgggcggacatggcctgcagctccacagcgcggcggcagcggccagtgcagcgtaccactttaagcggggcgctcagcacggacggtcgctctacctgtcgcccagcaatctggaggagctcgccgtccaccggccaggtgttctggctgcagcagcagcattccagggcaccaacgccagtgccagtgtgaagcaggccaaggccctgcacagcgccagcgtacgactccgcagctatcgggagacactgagcgcctccaagaagtccaaaagcttcatcggagacgccagtgctggcagcggtccgcaggcgggcgacgacttcgagctgagctcgccccaccgacgcaacagtcgcccgctatccacagttgtgcctgggtcaagcatcgaggaaataaagaggagtcctcgacccatttccgcttcggcggcggcggctgcctttttggaggagaagcgacccagcttcgagaggaagtcctcgctgacgtacgaccacgagctgagcgatgccgcctttgcggcccaggtgctgaggcccttccaccacaaactggctgccggaaggaaggggtccgtgaccggaggctcgcacaaactgaagaagaagtcgctgagcgatgacaccgacgaggatgaagcggcggatcgcaagcgcaagcggatcgtctgcattgtcctgtccacggtcctgttgtgcctggtgtgcgccagcgtttttgtgctgaccatcacgctgacctccagctccggccagggcggaaagaaggcgcattcgttcagtagggacacccccgtccattggacgggcatgaggccctcatga

SEQ ID NO: 32445 - protein, 356 aa, DROSOPHILA
MERGTSGGQQQQHQQQQQSSHHHHQQQQSSHHQQQHAHHQQQRHHQHVVAVHSFDPYLTVGGADEEHTSGTSSFDNPATKKKPPKLKPIHRSLSMAIDNYAPSSGDLDMDLDMEMGMDMDLDMEMDLEGEGIIISEKPLIHRSASPLPHPRSGALPPQTLAIPAQQQQQHIISHPSQRGGGGGTGSGAVSPALSARQQHHHLLQQQQQHHHQQQQQHQQQQQQQQHQLHLHTFQQLAAQAAAARHQTTHQQHSLSHRQHTQQHTHPHQQLQHPHPHQHAHSKSSPTSHAQQQQPGRWCRCGQLGRGHGHGHGAIVGREHIAHSVHRCGRYAQSNGGPSSAPNASAEEEPVPAIRHH

SEQ ID NO: 32446 - DNA, 2420 bp, DROSOPHILA
ctttccagctgctcaactaaaagcattgagtgttaatgggtaataaaaacaaaagctggagaattggttaaacatatagcttcaattcgattagatatattaacttaaatgttactttttcaattgtttcactactggtttctagatcaactgtgatggtcgaggaaaactaatccaaatcaacgcctaatggactccgaacgcatctgcaggagactatataaagcttcgctgcatcccttatcaaccgaagcactcgggaaatgaggaaatggcttaaagcagttaccgttctctcttggccacttcaaaggcggcgaatgcacttaattgagtggtcgttagtcccggaggaggcggcatggcggagcagaggcaaccagatcaaaggagcagctcagacccgccagaaagctgcgtcaatcggacacctccattaggccaatcaacctcggaatgcccgaatggaggatgcgagtgtggaatggaagtggcagcggaagcggacactcaattaaatcttactgcacatttcgcaacaattggccagctactttgcagccggcttactgcatgtaatagccatctggtcatccgctcggaatctgtgtcatcggatcggatcggattgggctggactgaactggatcgcagtgccatccatttggcgactctcattaaaagtggcgtggcttttaagtaccttaaattgccattcgcgtgcaaacagacgcatttatcacgttcgcagatggtgcactggaaaaaagcggcatcaactagctaggaagtgtagatgtatatggcacggaaagtgtggctttttatcagagtgattaaattgaatacataatattgtagtaattttttgaattcgaacattattataccatcttacaatggtcttaacttatggtaagactcttaagtgatgatttgatgacacagaatatgtcgaagatatgctgtcttaagttcttttggaaaatcaggaataaattcagcaaaaaggattgctagcaatttgtatctgtgcatctgttgctgatttacgcttgtgagatgcgacatcagagctttttccctgcgcctttatcgctttaattgtgggtcctgctggccgcgggacgagtagcgaggggttgaaaggggcgaagggatcatctccggcttcctgtgtcatacttttgcttcctgttgcagggctacggcgctgcaggacctgctgctgctcttcgtcctcctcctcatccgtcagccggtgctctttcgtcaggattgtttgccacgccaacagcaaacaggccaacaatgatgcggatgggatgttgggacgatgcgacgatgggatgatggtggtgtgaatgtcgtgggctccgtgccggattctgggacggctgttggtgccacgatgatgcatccacggctgtttgggctgacagcgatccaggtcactgcactgatggcatcaattacgccggagccggcattaaagtaatttcaatttcgcagccgactctaacggatgcatacccgtttctgttttctttcggtgcgaaattcaattaggctcagtgacgaaggccaccgccgcagtggtaataattacaaaaacgaaggctaacaggtgtggcggattgcgcaattaattaccacttttctgcgggccgatgtaattctttaattaaggtggtttttttttgttcactaaatcactctttttgacgcccagttatgatattaaaggtatttccgtttattgcacacaatccatacagcatcgtggtttgaacccctcctgccacaaagctcaatcgtaaatcaacaaagcgaaataatggcctcttccaactcaatctaacttagctgtggtgcatcccaaacaggcattaaattatcattatcatagtggctaggcataattcaatatcccatgccatttgtgcaatatcaaatggttggtggcaaatcaaagctgttaactattaaacacgatctcatggccattaggccaaaaccgtccaaagtcagagccacagacagatgcaccctgccacatctacgttcgcacattaaatgaggcccatactcgcattgtaaatcaaattacgcatacgactcatgggccgcagcacgaaaattgcagcgatacatgcaggcactgcaaaaaatagtatcatattagttttaatattttgaacttaattggatggcgtttaaatttgtagttatgtcatgctagccatgatattggacacattttcttgatagcagatgtagaggcgaatcgaacaatttgaaagttatgattctttctgtgcatttgtatttcgggggggatgcattagcttgagctgcagtttaatacacatagcgcaaataattcacacaataagctgccgccggagctgctgctgctc

SEQ ID NO: 32447 - DNA, 420 bp, DROSOPHILA
atgcatcatcgtggcaccaacagccgtcccagaatccggcacggagcccacgacattcacaccaccatcatcccatcgtcgcatcgtcccaacatcccatccgcatcattgttggcctgtttgctgttggcgtggcaaacaatcctgacgaaagagcaccggctgacggatgaggaggaggacgaagagcagcagcaggtcctgcagcgccgtagccctgcaacaggaagcaaaagtatgacacaggaagccggagatgatcccttcgcccctttcaacccctcgctactcgtcccgcggccagcaggacccacaattaaagcgataaaggcgcagggaaaaagctctgatgtcgcatctcacaagcgtaaatcagcaacagatgcacagatacaaattgctagcaatcctttttgctga

SEQ ID NO: 32448 - protein, 139 aa, DROSOPHILA
MHHRGTNSRPRIRHGAHDIHTTIIPSSHRPNIPSASLLACLLLAWQTILTKEHRLTDEEEDEEQQQVLQRRSPATGSKSMTQEAGDDPFAPFNPSLLVPRPAGPTIKAIKAQGKSSDVASHKRKSATDAQIQIASNPFC

SEQ ID NO: 32449 - DNA, 3324 bp, DROSOPHILA
ttttaatttgttgagactgcaatggaatctcgaccacgtgactgcaatttgaattgcaatcggtgaagtgcatttccctgcgcatcacaaattaatcttgcaacattgagttctgcaaacaagccagtagaactcgatttgcagttataatcgctgcactcaccggtcgcctatcatatctataatacttacatttttatatatatttttttaatcgtttccaatgcggtgatgttcgctccacgttctttaaaaaagtgaagagaagccagtgaagttggcggcgattggtggtgcagtgtgcacgctgcttgtactttcaagaatactgaaacgcctaacgcctgcgtttgtggtctgttttcaaggtggcgcactgttatgaaaaactgatttaccaaaacaagttcgcattgaacgatttaagtaaatacatacaagttattgccccatattaaacttaagtcaatacttgatttaatttaataaagaagaaaataaacaaagaaaaagaattcacacaaataaaacactaataatattttatgtttaataaactttaaataaaatgaatagatcttagacaaatactacccgactagaaaatactcttactcagctagtggatatgcgaacacgaaaatttatcatgatagatactgctaaataaaatgagaaaaaattaaaaattgttcataagtgtgttttgagcgttttgtaattataaggaggggtgtggcaaaggtgctcgacttggctattgatcctgatcaagaatatgcttttgtatactattttacactacgagtaacgggtgtaaaaactcaaaagctgaccagtgcaaagaagttttacttcgatttatccgggtggtaatattcgattgcagcacttgcagctctacaaacgcggtggttctaactgtttttcttgcggaccagactgacgcggcgccaagctttttttgtttctatattttaggcttaattgcgagtgcacgatgacggatttcaatgcatccggagtcattctgtctttgggtacgtaaaaatgtctgctcaatttgtgatcgtccttaaaatattcgttttttttatctgacagatgagtacttcgagcaatgcgtagtaccaaaacccagaataccaccacgatactcgagtaatgcagcccccaagggcgataatcgccagctggggcacttgcaaacctacaaggaccaggatcagggtggcgataccgatgttgaagttgaagatttccagggttccgtgctagcaaatggccaatcaattctaaccgagttcgattccaatgtttcgcaaatcaactttgagattaatgactttgataaggtgtactgcgagacggagtctcaaagctcggaggcctcacaaggctcagccacgtggcgcatgaatggtaacaacgtcaaccggccatcagcggcggctcaactggggctcagtgaccaggcacgtggtcacgttaagtcgcgccttgatctgagagaaggctctcgatttcgtaataattttaacaagagacgcaatcgtcagtataatcaccatgaacggaatgaattccatcgtcatcagcaccagccccagattgccaagaaggaggtcctgcgctacgcctacaatgccttcagcagtcaagaaatccattcaaatcaacaaactgaccttgacattgatgtaaataaacatttccagtatactcaccaggcacccactgatccgcgtagcagccgcaactacatgggacctgaccactacgactggaccggctccacctcgatcggctctttaatcgattcggtgtcccacattccggataatcgtgtcaagaaccatttgccttgtgaaaccatcacgcgttacacggacaactcgatgaatgtgtttgctggagaagcgcaggatattaataagccgcagactgacctgaaacccgcagcagttgattccgagagcatgaaaatcagtaaaatggcccacaacgtgatgctcttgctcaagagcgttgcccagcaaaacaaccaaggagactcgtgtgacatcttcaaggtaatattcgaaatcatgtgtaatctaataccacacaatagagatttgaaagaaagccttacaaactgcacgtgtaagaaaaaaggcattaagcttcaagaaatgattcatattaactttgtatttttaaataagtttacggttttcttatttaagaacatcgactggataaacggaccgatggaggagtcccgaagtgtcgcattgcctgaacgtgaaggaggaagggaccaactgcaacgttttaactagaaaaccgacatcaagttgcatttaagggatctatctgacttctgttatttctaagtactcagcagcccatgtttaaattaagttcgccggattggcgggcactttctgtgcgaattgcgagtcgacgcaggcaagaagaagacgatttcgacgatgcccagtgaatggcaggggtgaatagtcgctttctgcctcttttttttatatatataacacatatttcggctgataagaacaggctgggcctcttatcagtaatgcacaacaagaagtacacacggacgaacgagatgtgagaagcgaaagcggacgaaaatagaaacaaacggcgataaatttacagcgaaggcgattttatatacatacataactgatgtgccggagacgaacagagtaataatcagttaatctgccaagcacccagagagcggacgtgaaaatgatcatcgggatcggatagcgggatagttagtagtgatcgtaacttaggatagtgtgctaaacactaacctcaacctatgttttgtgctttgtcgagtgtagaacgaacacgcagttattttgttgtttgtgcaaaagcattcgaaagtggccaactgaagaaagagccatcgattctttgcatttggttacttttatagcgtagtctttttcccaaacgattttcttaacgaatacgaaataaactgaacacagtaccctaaatgtgcgttgttcgtcttcggtagtgccaagcatgttgaagtcgaagcagttgctccaacagttttccaaaggtaaggatgtgtgggtttccggagccgaaatggcacaacttgaggtgttttacacaccctagctatctgtgttttcgttgccgcctccattatcagccttaggcatgtgctggagtaaactaataccatatcaccagatccgtaggctcgccttgacagccttaatcgcatctgacgccgaccaagccgaagattatcagtaaacactttttcgccaaattctt

SEQ ID NO: 32450 - DNA, 1104 bp, DROSOPHILA
atgacggatttcaatgcatccggagtcattctgtctttggatgagtacttcgagcaatgcgtagtaccaaaacccagaataccaccacgatactcgagtaatgcagcccccaagggcgataatcgccagctggggcacttgcaaacctacaaggaccaggatcagggtggcgataccgatgttgaagttgaagatttccagggttccgtgctagcaaatggccaatcaattctaaccgagttcgattccaatgtttcgcaaatcaactttgagattaatgactttgataaggtgtactgcgagacggagtctcaaagctcggaggcctcacaaggctcagccacgtggcgcatgaatggtaacaacgtcaaccggccatcagcggcggctcaactggggctcagtgaccaggcacgtggtcacgttaagtcgcgccttgatctgagagaaggctctcgatttcgtaataattttaacaagagacgcaatcgtcagtataatcaccatgaacggaatgaattccatcgtcatcagcaccagccccagattgccaagaaggaggtcctgcgctacgcctacaatgccttcagcagtcaagaaatccattcaaatcaacaaactgaccttgacattgatgtaaataaacatttccagtatactcaccaggcacccactgatccgcgtagcagccgcaactacatgggacctgaccactacgactggaccggctccacctcgatcggctctttaatcgattcggtgtcccacattccggataatcgtgtcaagaaccatttgccttgtgaaaccatcacgcgttacacggacaactcgatgaatgtgtttgctggagaagcgcaggatattaataagccgcagactgacctgaaacccgcagcagttgattccgagagcatgaaaatcagtaaaatggcccacaacgtgatgctcttgctcaagagcgttgcccagcaaaacaaccaaggagactcgtgtgacatcttcaagaacatcgactggataaacggaccgatggaggagtcccgaagtgtcgcattgcctgaacgtgaaggaggaagggaccaactgcaacgttttaactag

SEQ ID NO: 32451 - protein, 367 aa, DROSOPHILA
MTDFNASGVILSLDEYFEQCVVPKPRIPPRYSSNAAPKGDNRQLGHLQTYKDQDQGGDTDVEVEDFQGSVLANGQSILTEFDSNVSQINFEINDFDKVYCETESQSSEASQGSATWRMNGNNVNRPSAAAQLGLSDQARGHVKSRLDLREGSRFRNNFNKRRNRQYNHHERNEFHRHQHQPQIAKKEVLRYAYNAFSSQEIHSNQQTDLDIDVNKHFQYTHQAPTDPRSSRNYMGPDHYDWTGSTSIGSLIDSVSHIPDNRVKNHLPCETITRYTDNSMNVFAGEAQDINKPQTDLKPAAVDSESMKISKMAHNVMLLLKSVAQQNNQGDSCDIFKNIDWINGPMEESRSVALPEREGGRDQLQRFN

SEQ ID NO: 32452 - DNA, 2692 bp, DROSOPHILA
tgtatgttgatgatgatgtagctgtttgtctgatggacttaataatgtgtgaacgaacgtaagtttgaaaaatgaaatggttatttgcaataattgtattttcttttaggaggccatcacattactctgacatcgagaagcaacagctaatttctgtgttagtacgaccacatgtactagatattttagagctgctttacaagttccaaaaatgtcaagaagtaagatgaaattcagaaatcgcttgcaaataaatgtcttcggatagactttgattgaaaactattcattcatacaatacatcatcagattttgttaatgttactaaaatttgtccttttagtatttaatatccagtgtccttggtacaccaaaatttgactacttcgacgcttgcatggattttattaatgctgtgtctacagacgatgcggatgtgctcccatctacttgccgaacattacaacaaacttttgaatatttgtttaaaggtaaggtgtcgattcgatcatatttatttcttactacttactgagcccacagatgctaaaaattttgttcacggcgaacgctataatcaagtattggatgcgtttggttgtcttttgtatttagtgggtaacatagaactacataggtatttctgtgccggcatatttcaaaaggattttattacatcgcaagtgtgtgcggatattctcatgctgtgctttcggttagtaattataaatcatacattttaaaatttatttcactattctatgtttttaggctaaaagaggccaacaaatgctggacagatcatgccataaaagaggctatggctcactggcataagtgcaataattcttacgccatgttttccacaaatccaagccaattgcatgtacaacgattccttaggtacttccactgcttgggaaagcaggaacttcctgtcataagcattcaaaacttccggcacctgtctgtcgtcgcaaaatcagatggccacgtgggaatgaagatattgaagcgcttagaactcatctccacctcagcgcccacaaaagttgagttgtactatgaagtggtaagcaagtagaagtacacttataaaatggatatacataccttgattttttatacccaaaggttgctctactggaacttttggtgcaccacgatcaaatcgactgttcccattggtttcagcggacatcggaaatggccaataaacttttaggcattgacaagagcattagctttgctaatgtttacttcaaactactagcgcgtgcgaatggatccaccaaattacttatacttaggggactgcctccaaatgctggatgcacaaactggtatcgcgagaaattcctcgactcctgcaaagtcagcgatgacgcccaactaagagcatttagtgcccgccatgcaatatacccattgtttaaggcattgcatgtcgaacccggaactgttgtcgacggttcatttgatctcagtaaatcaagctacattcgccatggagatcataaatgtccggtctctagtctaaaacgtcgacggagtgaattggcgcctaaagaaatccttcgtaatatatatgaggcttctcttcaactgacccagtgcaccgcgaatttcgatgctgccgactgggaattgctcaagaaggtaatggccaatttgagtggaattgtaccctagctccctgctctatgcttttcgtatcgctcacttacctaaatcaattaattaccacctgtgtactcattttgaataagaatccctaattaagatgttgtgcgataaggcggttaaaaataacgtgtaaataaagacagtttacctgcaagcgaagcggatgtaaagctaacgaaactgcctgcgaaataggatcgaaaggctaccctggtgatgtctgatcgtcgggatggtgccattgcactcagcgaagcgatgacaatgcccagggatccgggattggcaaacccacaaagggcaaaagtggctatggcagcgctccgcggctataagaatactagttttaaaataatctataagaatagaatatgcagatgggtactcacatcaacctttttatcgctaaccaatatgcccaggtttctataagccacaaactcgtttatgaacgacttttgggccaccaccaggccaattgcttgacaatcgtgccacggcacgcccatcacgaagacaatcgggataaagatctgggagagaatgtagagtagggtgatgttatgcagtccaattagctcgaaaatccactccgttacagcgtctaggaagaacacaatggctaggaaggcgatgatattcgagacgattccgagcacaatcaacaaggctgctgcagctcccgaggcggccgcatccaaaatagacgtatccgtccttggcaaggtgtctgggcgattatcaaatgttgactcttatgaagaggaacttacgagctttccagcttaatgttgtcggacctggtcagagattcctcggtctcggggtagaacagtttggcgaaagccagtgaacccggagcagccattacgctggctgcgataagaaagctggcggaagcaccgaaggacacataagcccccaagacagtaccggccactgtcgcgtagccggaggtgcatatagcgtgcaactcgctgacggtcagtatttcgatgtacggccg

SEQ ID NO: 32453 - DNA, 630 bp, DROSOPHILA
atgaagatattgaagcgcttagaactcatctccacctcagcgcccacaaaagttgagttgtactatgaagtggttgctctactggaacttttggtgcaccacgatcaaatcgactgttcccattggtttcagcggacatcggaaatggccaataaacttttaggcattgacaagagcattagctttgctaatgtttacttcaaactactagcgcgtgcgaatggatccaccaaattacttatacttaggggactgcctccaaatgctggatgcacaaactggtatcgcgagaaattcctcgactcctgcaaagtcagcgatgacgcccaactaagagcatttagtgcccgccatgcaatatacccattgtttaaggcattgcatgtcgaacccggaactgttgtcgacggttcatttgatctcagtaaatcaagctacattcgccatggagatcataaatgtccggtctctagtctaaaacgtcgacggagtgaattggcgcctaaagaaatccttcgtaatatatatgaggcttctcttcaactgacccagtgcaccgcgaatttcgatgctgccgactgggaattgctcaagaaggtaatggccaatttgagtggaattgtaccctag

SEQ ID NO: 32454 - protein, 209 aa, DROSOPHILA
MKILKRLELISTSAPTKVELYYEVVALLELLVHHDQIDCSHWFQRTSEMANKLLGIDKSISFANVYFKLLARANGSTKLLILRGLPPNAGCTNWYREKFLDSCKVSDDAQLRAFSARHAIYPLFKALHVEPGTVVDGSFDLSKSSYIRHGDHKCPVSSLKRRRSELAPKEILRNIYEASLQLTQCTANFDAADWELLKKVMANLSGIVP

SEQ ID NO: 32455 - DNA, 7274 bp, DROSOPHILA
tcgaaaaatacgctcgattgaacagcggaaacagatttattcattcatcgaaatcatttattcaagctattatttatgattcctcgtgcgcatcgcttgatcctgtgatgaaagttgaacgagcccaaggacaagtggccatcgcaatttgatggaggcgtaatgttccacatgataaactaatcaagccagctggctatgaattatcctgttgagagttctcagccttcaagggtttgctcgagattaacgtttgttcatttgccttcgacggggcaatttgtttttcaacttttttgtttcattttttcctctctggcgtgttttttttttgtaaggacgaaggacctggtccgctgacaacggacactctgtaatttcattgggccgcagctgccgtaaccttgcccggctgattcagccttggcagtgggactgcctgtttgactttggccgggtttcctgttgcccttccagtggccgtgcctcataattagccactttctttgacactcgacggctggttctgcccgtctccatcccaaccaaaatacaagcaacatacacctgtgacctttgacgccaactaattgaattgaaaactcaactcgactcgcgcgtaatttgcctttggaaatgttcattacccaaacacctccagaaaccattttaaagtagttctggcaaatgtttactttgcactcacttcccattttaagggcgtttgcggccaaagctgcagaagtgtaaacttttccgttgtttgtttgctgttttcccgaagttcagttgctagaacttctttaattgccagctggctaaagttttgctccaaattgggcttatcccttcggtttttattattttttgctgctttattttttagttgccatgctgtaaatgtgggccacaacattggcccgcttttcgtgactttatggcgttgttgaggaattttatttatgtttatgtaggagctcttcatataaaattgtcttttatggcaggcggctgttgctgggtatatggggaacttatattaccaacacacgttcataaacacatagagaaaacaatataatcagtttcaagtgcactttttatacccgttactcgtagcgtgaaagtatgtactatattcgttgaaaaattgaaatagttaaaggacgtgttttcgactctatacagtgtatataattttaatcaaagttaaacaaattctgttgataggtttcaaaaatacagagaaaaggaaatcatttatttcatgattacagtgatatattaaatggaagtccacaaatggaattccaaagacctattttttctcagtgcacacacaatagagtggggaaaagggttttggcgaaaccgcaatttacgatacggatacgagctgcctttgtctttgcctctacctgaatattgcgtatacgcaacattgactgtcgggggagtaggtgggtggtgtgtggatggtactggaaggcgggttctgttggttttgcttttgatgtaaagaggcactcgaggcaattttgcgctcttatcccaatcaacgagcagtaatggcgagcagcacaagggcgacggatagctaacctttgttgtacgttacaccgtcctagaacaaccatcagacacatcagcaacagggccagccgcaacagccacatcagcagcagcagcagccgccgcagcagcagcagcagcaacagcatcgccagcattcgcagcagcagcagcaagcacagcaggatgccggactgggggacacgctgtcctcgctgccacaggcctcgttcaactacatcaactccatcgtgggcagcggcgtcatcggcataccctacgcccttcacagggccggattcggactgggcctggccctgctcatcctggtggcctacatcaccgactactcactcatcctgatggtgagtggcaggcccccctaactcgatgcctttcccaaatcggttttaaagttccaatcaggcaatctggacatctgaccagaccgaagcgaccaaagtcacatgccaaacgcatttccgctcgactccgggcattagcatttgctgcataattaacgagcccactcatttgcgagggcgtgtgctgccgtttaagcctcatttcatttgcaggtcagatgcggccacatctgcggtcggttcagctatccgggcatcatggaggcggcctacggcaagtacggctattacctgctctccctgctgcagttcatgtatccattcctgggtgagttgtgcaagttattgcatactttgcacatttcattattatttcaatactatcataaggttttagtttgttatacttaagcactatttttcattagcatatgttatattattttattagtttccccttgtttttcgaagagccaacttgtttaagttagaagcttaattaaattaataaattttattttaatgctagggtacacatccttaatatcccttatatattccctttatattttgcaatgcctttacttaagtcgatttttttgttatctctattaatcaattgtgatttgatgtttgcaatattacacttttatgatgtaatataaactttatgagcaatgtttgtgatggaaacccaaccctcttttcagccatgatttcctacaacgtggtggtgggcgatacgctgtcgaaggttctggtccgcttcttcccctcctggggcggttccatgggcgccgtccgactgggcgtggtcttcttcgtcaacgtgggcgtggtgatgcccctctgtctctacaagaacgtctccagactggccagagccagcttcattagcctggcgtgcgtggtcttcatcctgtttgccgtcatcatcaagctcatgtcgggcgattataaggtgtaagtatgctagctcaatgccttcaattttccaccaagagcacacaatgtcagtgattcgaggatattctttaaaattgattacttggttatttcattaaagtcaggcttttagttttggtgcaaaaatttacatttttacatttgttgaaacagcatggcgtgcaaaactaattgattgccattttaagtgatgtgacaatgcctattgattgagtcaattaccgcttgaatttaggcaatgaaatgcaattactacctgatcactgactaattccataaatacctaattagcagaatttagagggccaggaatttggcataacaaatgagatgggaatgtattcaaatttttacgtaccgttaataattacattacactatttggttttattatcgaaagtattgattttatagactcatagggaattaaaaaaaaattgccaactgaaagtgattttcttttgtagaccagacactttccctaactttctctttaactttctggccgccgaagcaattaaaaaaatggcagaaggtaaaatagaaacaaacaacgctggttgtgcgcgtgaagatttatttacattttaattacaaattgtgtacttttcgccgattttccctaaccgccgacacagttgcagccagttggacctgggctggggaatagcgctccggatggggtatccccattgcgagggtgatggtggtctgacttggtctggcttgggggtgggtctgggtggtggtcctgggctttagtgctaagtgccgctttagtgctttcaaatctgtggcaactgcccggggcggtggtgctcctgctcccgccggtggtgcggaggaatctgcagggtggcgcagagctcataaaatttagtgtgccacttgtttcccttttatggcttttcattaggcgaggcgagtcgagttctgttgagtctgttgcagtgcaactgagttgcatgcatacatacatatgagtatgagctgaaagcaacaattttcccctgcagtttgaaggttaacgaggggcaggacttgcccctcttcagcaggggggggggggggtaaagcgaaccttgaatgctgcgtctgcggcttggtataaaatttaaataaatttcccattcgcagctgcctggccttcagtctacctttccattccttatctttgggtgcgcaccttttgtttttactcattttttatgcgaataattcacatttcctgcggctgtccgagccaacgaaatgttaatttggtgttaacttttgtgtaatgctttccgggaaaaaaacctttttcttcccttctctgcccgcaacgatttgtttccaggacggacacggcggaatcgtggcggttcgccaactcggatctaatcccggccacgggcatcatggtcttcggtgagcagagtgtggattttccacttgactttccacttgccttccatatatatccatatgcgtatcccatccatccatctatctatctatgtatctatctatctttttattggacatccgtccgtgcagctttcatgtgtcatcacaacaccttcctcgtttatcaatcgatgcgcgacgcgaccatggagcgctgggagaaggtcacccacatttcgattggatttgcctggacggtggcggccctcttcggcatcgccggctactccaccttccgcgctctttcccaaggtgagggattgacacaaattgcatttaattgcagtgacaggcaatttgtggatgtttcctgtctgctgttttcggcatttactatacttgtagtatttactgcttacgaccgttccaatcccgatgggattcggctttccttcttgcaggcgacctgctggagaactactgctgggatgacgacctgatgaacttctcgcgtgtgctcttctccatatcgatactcctgaccttccccatcgagtgcttcgtgtcccgcgaggtgagcatccggaatcgcagagccagtttagcaacatacttttattttgggccattccccacagattgtgcgcgccctcgtccatcggttcgtgctgaaggagcccatcagcgagttcacccaggacaaggaccccagcctggagaagggggccattatcgatgagtactcgaaagccattaccatggccatcgtgttcagcgccttcgtcatctcgcccatgaccgactgcctgggttcggtgctggagctgaatgtgagtaggattttccatgtcccttatccatgttcgcctagaaaatgggttgggtacccttgaccaaaagaaggcgtttctatatatatgtaagaatggtacccatccgatgaaataagaaacatttaaagtcttactttaaagtctttacttttacatttatttaaatcattgcgaccatgtgcacttgtaatcttctttatactttctttcaatactaatattttttacaagtccacttgatgtttatttatcccactttatgactttgtggttttacctcaatacacgcgataacttaaatccgcaaactcagctgcttacttgtgttttagtttaatcacaatcagcaagagtttacccaaaaccttttttaatgtacaaattaatcatttatgttcctagtttccgaaagaacacatttcttatcatttataatgctcagaccatttatcatcgagataacttcgactaagcaatttgcaaacttaaagattatttattacggttttcgtttgcatttatttccgagtgaatatttggcctagatgaaagagaataaattccaattcccaaagtccatatattcaagtagaaagctatgcaacaaagaatccaccaaatgcttcattaaatacatctgagactaattccgatttcaccattcacatttgccagaccaaagggagaaccgtatggccaagtttattattatcgtccgtagccatttgccccttgtattccagtcacgggtattggccacaacgccaatcccaaacggcatctacaaattctggccggaacccgtctttgtatttgccatgcaaatttatgccccacccatcagccagcccatcagaacatcagcccgtcagcccatcagtacattcaacaatccacccatttcagggtctcctggcggccattcccctggcctacatcctgcccggcctggcctacattcagatggagccgcacgccctgctcagccgggagaagctgcccgctctgggcctggtggtcttcggagccctggtgaccatcttgggggcggcggtgctcctgccgggtctaatgggcggcgactgccgatcggacattgtgatgggttactgccggcaggagtttcagaacaccacctcctcgaactaagttaacggaacggaagtcagcccacgatgtggggcgcgcgggttgggatcgcatttttatggtttgggtttttgggttgaaacttctgatttgaccttcggttaatacagctgcaccacgtcgcatcgaaagaaacttgtacctgagtcccagacgttcaaagtatctgcgtaagtaagtagtaggcacagtgttgaattggattagtggatagcggatagcggatgtgtgatacgggcgaacctcagtacaaaggccaggcattctctccgatcgagtaacccatgtatatttgcaccggatagtcgtttaaagtgtacatttcgttggatccccgttgttgatgtcgatattgttgaaagtagtgaaagttcctcgatatataagtgtgtgtgtactccgtactctgtactttgaagccatcaagttgagcaagcgatttgaattgaattgaatcgaaagaaacgagcaaaggcaaactaaaccgaactagaactagatgttatccgtagctttagcgtagtctgaaactatttgggcaccaatatacacatgcaatccttagagacaaccgactccccaagttgagaagtgaatcaaaatcgaaaacgaaatcgaacaagtattatatgtatgtaccgagaactatttgtaactatgtatgccccgacgttaccggatcgtattccccagttttatatgtatgtatatgtatacaagggtagataaaaatgcgcttgaaccgaactaaaatcaaactacaatatatccccatcaacacatcgatttgaacaacagttttgagttgttaacggcactgaattctgttttgaattgcatatgtacaccgaacacgatcgaatatttatatatacagaaacatagatatatttttgtacaactcttggtttatactgcacgatattatgtaaatacatgtgtatgcatttttggatgtgattaaagtctttacactcacacaaaagccatcacctcttac

SEQ ID NO: 32456 - DNA, 1479 bp, DROSOPHILA
atggcaggcggctgttgctggaacaaccatcagacacatcagcaacagggccagccgcaacagccacatcagcagcagcagcagccgccgcagcagcagcagcagcaacagcatcgccagcattcgcagcagcagcagcaagcacagcaggatgccggactgggggacacgctgtcctcgctgccacaggcctcgttcaactacatcaactccatcgtgggcagcggcgtcatcggcataccctacgcccttcacagggccggattcggactgggcctggccctgctcatcctggtggcctacatcaccgactactcactcatcctgatggtcagatgcggccacatctgcggtcggttcagctatccgggcatcatggaggcggcctacggcaagtacggctattacctgctctccctgctgcagttcatgtatccattcctggccatgatttcctacaacgtggtggtgggcgatacgctgtcgaaggttctggtccgcttcttcccctcctggggcggttccatgggcgccgtccgactgggcgtggtcttcttcgtcaacgtgggcgtggtgatgcccctctgtctctacaagaacgtctccagactggccagagccagcttcattagcctggcgtgcgtggtcttcatcctgtttgccgtcatcatcaagctcatgtcgggcgattataaggtgacggacacggcggaatcgtggcggttcgccaactcggatctaatcccggccacgggcatcatggtcttcgctttcatgtgtcatcacaacaccttcctcgtttatcaatcgatgcgcgacgcgaccatggagcgctgggagaaggtcacccacatttcgattggatttgcctggacggtggcggccctcttcggcatcgccggctactccaccttccgcgctctttcccaaggcgacctgctggagaactactgctgggatgacgacctgatgaacttctcgcgtgtgctcttctccatatcgatactcctgaccttccccatcgagtgcttcgtgtcccgcgagattgtgcgcgccctcgtccatcggttcgtgctgaaggagcccatcagcgagttcacccaggacaaggaccccagcctggagaagggggccattatcgatgagtactcgaaagccattaccatggccatcgtgttcagcgccttcgtcatctcgcccatgaccgactgcctgggttcggtgctggagctgaatggtctcctggcggccattcccctggcctacatcctgcccggcctggcctacattcagatggagccgcacgccctgctcagccgggagaagctgcccgctctgggcctggtggtcttcggagccctggtgaccatcttgggggcggcggtgctcctgccgggtctaatgggcggcgactgccgatcggacattgtgatgggttactgccggcaggagtttcagaacaccacctcctcgaactaa

SEQ ID NO: 32457 - protein, 492 aa, DROSOPHILA
MAGGCCWNNHQTHQQQGQPQQPHQQQQQPPQQQQQQQHRQHSQQQQQAQQDAGLGDTLSSLPQASFNYINSIVGSGVIGIPYALHRAGFGLGLALLILVAYITDYSLILMVRCGHICGRFSYPGIMEAAYGKYGYYLLSLLQFMYPFLAMISYNVVVGDTLSKVLVRFFPSWGGSMGAVRLGVVFFVNVGVVMPLCLYKNVSRLARASFISLACVVFILFAVIIKLMSGDYKVTDTAESWRFANSDLIPATGIMVFAFMCHHNTFLVYQSMRDATMERWEKVTHISIGFAWTVAALFGIAGYSTFRALSQGDLLENYCWDDDLMNFSRVLFSISILLTFPIECFVSREIVRALVHRFVLKEPISEFTQDKDPSLEKGAIIDEYSKAITMAIVFSAFVISPMTDCLGSVLELNGLLAAIPLAYILPGLAYIQMEPHALLSREKLPALGLVVFGALVTILGAAVLLPGLMGGDCRSDIVMGYCRQEFQNTTSSN

SEQ ID NO: 32458 - DNA, 4174 bp, DROSOPHILA
actaatataggcgacacttaagaaccctatttaatatgctaatccggccaggtggcgacaagttagaaagttacttaaatgaatgtgtggcccccattctcccttgtctagatggcctaaccccaaagagcactccgcttgccgccagtgaaatgagctgctcccattccggcgagagatggcagcggttcttgcaattatgtcgcataaaataattacaatagactgggagaacatttcctgcgccgctggcggcgtcatcagcatttcgtaataattagtagtgatgatgaagaagatcggccagcacatatgaggcagaagcagcagcagcagcagcaacttaagacagcagtcacttcaaactgtcggcagcagcagcaagagaagtccgaaccagaaccaagatgaacctgttgctgcgtctttcttggctaatggcgtgaagttagtttgcgtttggccagcggcgcgtatggttgtggtttattccccggaagaataccagaacacttctcagaaatcggaatcgaaagatgtggtgtgaaatgcaggtgcgtggctgctgggaaaaggaaaactgaacggaaaactgtgtcatcgagtcagtcggcacagaattggcatggttcccattatgattgttatataaaaatccattagccccgaacagcgacccatttgcaagcgaccccgaaacttgttcgcctatcaaggacacagatctcttttgcgccgagcagctccccgagagctccgtgagtcacccagacaggcccataaacagcaccgacttctagtaaaagtggagcagcaataataggaaacgtaagaagaaaacggcagcgcagagccagcttaaaagtgaataagaaactgtcatgctttcattggcaacaaaagcgttatagtccattctgatgagtgtttcagtttgagtgttatcctcctcggggagaagcgaagtgcgaatagtgacctcgaataatccgacgccaagatgcagttgctattgtggctgtgcctgtgcctcctcctgctcatctgtcagtctagtcccagtcaagccagtgagtacatatgcacgcgcgctaggaactccacgtctagtcacccaatcccgcccagatattctgaacaccctactgggggtgcccgcggaatgcgtccaccagagcggcgtatggccctgcaagctgagcttctcctgctggctccaaggcggcaagcacgcaaagggatgtggcagcaacaagtggctcttcagttgctgcgtcgccgagacacagcatccgcaccagcagcagcatcactccccctcctcgccgctggccaacctggtggactatggaaagctgaagttgaacctcaacagcctgcccaagcggatcatgctgcgccgacgtgacgacaacgagctgctcaatcccaaggtgggtctgctgtgctgcggcaattgagccattgcgaccgcagagcgggataattgagcaatttcatttgacagacgggcaggattttcctaattagagctagaatggagatgctacttattttcagtggttttccatttcggtgtacgactttcatatgtaaagttgagtgcctaaatgtacatatagacattaaatggcattgactcatgttacatgtaccatacttaatatacttaacattttcccagcccgagtgtggagttcctcggacggcgcagaacacgcttcagaagcgcattattggcggtcggccagcgcagtttgcggagtatccgtggcaggcgcacatccgcatcgcggagtatcaatgcggtggagtgctcatctcggccaacatggtggccactgccgcccactgcatccagcaggcccacctggcggacataaccgtgtacctgggagagctggacacgcaggatctgggtcacatacacgaaccgctgcccgtggagaagcacggagtgctacagaagatcatccatccgcgcttcaacttccgcatgacccagccggataggtatgacatagccctgctgaagctggcccagccgacgtcctttacggagcacatcctgcccatctgcctgccgcagtatccgatccggctgattgggcgcaagggcctcattgcaggatggggcaagacggaggcgcacatgggccacgcgggcaccaacatgctgcaagtcgccagtgttcccatcataagtgagtgctgaatcctactattattaaattatgttataatatataccttgtatttcagccacactggattgcattcgctggcacgagagcaaacagataaatgtcgagatcaaggccgaaatgttttgcgccggacactccgatggacacatggatgcctgcttgggtgagtcaatgccactaaaatgttggtttatttcattccaacgtccttaagcaaaaaaaatataaattgtatattgtatgtgttcgtttataagtaaacctgtttttaaagggaaatatttatctggtaatgagttgttagattcccgacccttaaatatatttactactccgctaaattaaaattggttcagagaccacaatcggttcatctcatgagacgttgcttatttcagccaggtatcacagcatactttcaggcttagcttttaaaatttagtgtttgtttttggcttacatacttctgataagtaatataatcttgcattaagctaaacttttaaaacatactaacgtaacaacaagattaagccccgtttcgcaaagaaaatataacacagattacgaatggcttgatacaacaaacttatattcttttttgtttttggctattttaatgaactaccataaatcaaagcttatgaagagcatattgtaaaggaaataattattaaaaattaatagctttaagaattaattcttttaatataaaaccctgtttcatttacgtatcccaggtgactccggaggaccgctggtgatcaaggagcgcggtcgctttgtgcttgtgggcataaccagtgcaggcttcggctgcggagtagatcatcagccaggtgagaatccgataccttgccaagtctatgaaaatcttaaactgttgcaattattcacaggaatttatcataacgttcagaagactgtgaggtggatacaggaagtggtggcccgcaacgagccatagctgcagacgaccctcgaaatcccatccgaacctttggcaatgcaacacatctcattagtttacggctcgtagcattaggcaatggcaatgtgcaatccgccgccagagacgcattacttattagatttaataaacaaaacaattagcctattgtaatagcgtttgccatttggggaagtgggctgcagaccgaccttgaacgccgccacccgccgccaaaaaagagaaaacatggcggctcaaacaaacgagcctcttgttgggttatgtcactggttgtggcctatttggtggggtgccacaaatggcacaatccctaactgccaggcggtaatttgtacattaggcgcattaagcttaggcagcctgcgttgcccaatgttgctgttgcgcagtgcaactgctgctgttgcaccgcatcaacattcgtatgggtcgctgtatgtcgctgagcggtggcaatgaaatccaaaatgtgtgtcatcgaacggtcagttattattggtaattggctgcgatttggctcggttcgaaaacttctttgcgccgaaagtaaatgtcacgcttgagacgctgttcgatgctgctgctgagtgctgagtggtatgttccgcctgcaatttgttcggcaattgttggttttgctaaaacaccaattcgagttttgagggaaaacgcgacttcctctttggcgtggaatggtgatggtagagaggcgaaattgggtattagtcatggcgacaaaagcagcaacatgcaattgccagttgccagttgagcgacaaaactcgttgccttggccactttcgttttcaatgcgggtctctcgccgtcttagcttggcttttctctcggtccgctctttggtgactattactcaatagtcggagctcggctgggctcgctccgtgccgtaccgctcgccagtcggttggcggtgttgatggcattttgattttgaatttgtcagccgccgtttattaagtgcttcgtcgcgacg

SEQ ID NO: 32459 - DNA, 1170 bp, DROSOPHILA
atgcagttgctattgtggctgtgcctgtgcctcctcctgctcatctgtcagtctagtcccagtcaagccaatattctgaacaccctactgggggtgcccgcggaatgcgtccaccagagcggcgtatggccctgcaagctgagcttctcctgctggctccaaggcggcaagcacgcaaagggatgtggcagcaacaagtggctcttcagttgctgcgtcgccgagacacagcatccgcaccagcagcagcatcactccccctcctcgccgctggccaacctggtggactatggaaagctgaagttgaacctcaacagcctgcccaagcggatcatgctgcgccgacgtgacgacaacgagctgctcaatcccaagcccgagtgtggagttcctcggacggcgcagaacacgcttcagaagcgcattattggcggtcggccagcgcagtttgcggagtatccgtggcaggcgcacatccgcatcgcggagtatcaatgcggtggagtgctcatctcggccaacatggtggccactgccgcccactgcatccagcaggcccacctggcggacataaccgtgtacctgggagagctggacacgcaggatctgggtcacatacacgaaccgctgcccgtggagaagcacggagtgctacagaagatcatccatccgcgcttcaacttccgcatgacccagccggataggtatgacatagccctgctgaagctggcccagccgacgtcctttacggagcacatcctgcccatctgcctgccgcagtatccgatccggctgattgggcgcaagggcctcattgcaggatggggcaagacggaggcgcacatgggccacgcgggcaccaacatgctgcaagtcgccagtgttcccatcataaccacactggattgcattcgctggcacgagagcaaacagataaatgtcgagatcaaggccgaaatgttttgcgccggacactccgatggacacatggatgcctgcttgggtgactccggaggaccgctggtgatcaaggagcgcggtcgctttgtgcttgtgggcataaccagtgcaggcttcggctgcggagtagatcatcagccaggaatttatcataacgttcagaagactgtgaggtggatacaggaagtggtggcccgcaacgagccatag

SEQ ID NO: 32460 - protein, 389 aa, DROSOPHILA
MQLLLWLCLCLLLLICQSSPSQANILNTLLGVPAECVHQSGVWPCKLSFSCWLQGGKHAKGCGSNKWLFSCCVAETQHPHQQQHHSPSSPLANLVDYGKLKLNLNSLPKRIMLRRRDDNELLNPKPECGVPRTAQNTLQKRIIGGRPAQFAEYPWQAHIRIAEYQCGGVLISANMVATAAHCIQQAHLADITVYLGELDTQDLGHIHEPLPVEKHGVLQKIIHPRFNFRMTQPDRYDIALLKLAQPTSFTEHILPICLPQYPIRLIGRKGLIAGWGKTEAHMGHAGTNMLQVASVPIITTLDCIRWHESKQINVEIKAEMFCAGHSDGHMDACLGDSGGPLVIKERGRFVLVGITSAGFGCGVDHQPGIYHNVQKTVRWIQEVVARNEP

SEQ ID NO: 32461 - DNA, 7137 bp, DROSOPHILA
gccgtcacagccgccgaacttgaactccacgcacttcttctgctccggatcgtagcgccaacgggggatcagggcgcggcagacgcccttgcgtgccggcatgaggcagaactgctccggatgggtgttgcgcccggtattggccacatcgtccagcgagatggcgtcaaagaagtcgctcacgtcgtcgtagaggtccatgggaaacgcctcgctccatctgatccccgccagcaggatcagcaccactgccactccaacgtactctttcagttgtccgcgcattttgtgtacttgatttagcttcgtatttaattcacttgatcacttggcgattgtcttcacgcaactgttggcgctgcagtccagcttttggatttatatggtgccactttgtagtccgaagcgggcgaagggaagcgaatactagacaatactcccatctaagagccagcagagctttccgttcgactccaacgctctttggttactctttcgaagagtccgcttttgtactgaaaatccaagtgtagatataactacttttgtttatttactgttgtgagcattatcatcgtaaaacatacaaccatattttttgtttttgttattttatggaaaaacaacctgtttgattttctatatggagtagacaaataaattttttcttaaactacaaatttaaagctattttccattgggtttcattgaaatagtttttatatttcaattagaaatatagaatgcctatttcttagttttgaaattgaaaattaaatgttttatggaaaagattactgttatcactatttatggatttttttaaaattcccgccaattgcatgctatcgatatcagtgggtggtgcaatcggtaatcatatcaggcatttaccattcctaatttgtggtagttggtgaaatctggcgcgtctttgtttaaatcgtaaattattacataaatttagttgggtatggcacgcgaatcaattctaacgtggatgcggagtctgggtgagaaggcgcgctttgatgagctggaactgctcattcaaaacactccaatagaaaaggttggacccataaggcggaaggcaatataaatcttaattgataaacattgcttgatagttaaaggaaacccttaaatccacaatgacacgcagcgagggcataacgtattggaactaccttctccgtggcttcaatccggagagcaaggatgcgctagccaagcgattcgaatgtgtccgcagcttcatggacggactgagcagcacggaactgagctacaaacagactttcgatctgatcacgcgcctgtcgcaggacctggccacctttccgtccgagcagctggcctggatcgtggagcactgcatggacgggatccgacaaggagacgccaagtgcgtcggctggaaggatttgctgccggacgcgctgtcgctgcttttggccagaccgcggtttcttctgaacggcatatccatagatggaatggagttcagggacactaccgtaaggagcattgccaccatgcaatggccagcctcaatcctcacgccaattgccgacatgttcaagtgggtgaccacccttaaattaaccacaatttaaccacacaactcatacaatccccctaggaccatgaatcttagcagtggcgaaattgtgacagtactcaacaaattctctggcgccctgcaggagctatctcccatggaactcccagcgctgtgcttccagctcttttcgatgtgcagcactgcttcccagttgatcattccgttgctggccctggagaagtatttccatcgcaactactacaagcggctcttctcagacatgtgtagcaactcaacgaacttggatagcattggtgagcctgcaccatatagaagactatattcctagaaattgacagcatctgatctttagacttgttctcggacaaggaactaagggaggccgaagagactatcctgcatcacttgaactactgtactatgtacaaacttactgaaaaacatttggccataatgctgagagtaagcaggtcccaaatcaatcgatcgcttagtaacttaactaaccatgtttcagaactttctgcacatgcccgatgtgatcctaactccgtttatgcttagcgccattatctcgatgaccagcattaatcgcgatccagagtccgctagaatatctcattccattttgctaccttttttgcgcaatgtgatcaaaaacaacgaggaagagcgaacgttagccgactactccgtgtggtatcgggatacattgcaacgcaagcaagtcgatttgcagcaggtcctcacggtgctcattgatcagaacaaagacggcaaggatgtgataactcctgggctggttcatctcgtattttacttgctgaaatcgcaatcgcccaagatgcacacattggccatcacatttctaaccaagttcattcgcaagcgattcatttttggacaaggcatcataaagcttatttcagagtggatgatagtataccaggaacaaaatcagttctcgggtaggtcaagcaaaatgttcttaataattctatgcaacaagaatacatatttgcagaatgcctcacacttctaagtgtggctgatacgtatacggtctccgagtgcatgaaaccaattcaatctgttttggagcacatgcaatgggcaagttagtccaatggcataattgttctttaagctaactccgttgtaaatattttagctgtctggtgagcagtccatgcgcatgatgaactttattctacctttgctaaagatctctaatcgcgtccgtgatgcgctaattgatgtactttgcaaagcaatgagctcgaggtgggtctaattacctgttcgtggtactgtatttactttttattctgcactttatattttagtggaattcaaaaacggcgaatggcgatttatgggttctgcatgatcctcaaacaactaaacaacagcaatgctgtgcgccagacctccagcgccaccagtttctgcactcaacacagtatctctggctactccataatgacccagaacacactgggaagtcgtagtaatcctcaaagaaatttcgacatgctcacgttggaaattattggaatgttgcgaaactgcttgcaacaacaattcgatatacggtgctccctgtatgaaagtgagtcgaatgaaatcaaataatacaacttctaataatgcatttcaaatagatcttcagagagcagtggagctcaatgctaaactagtgccacatgtgctgcaagtcattgactggcactttcgcagcttcttcgacaccccctctgcagaggatgctggtgacgatctagacacagtattccgcattcgctacgatcaattggttagctctagcgatgatcaacacatggagattcagcttaaagacaacctgggcaagttgattcagttcgtggccaactgcttggctgttttcgatcgagctccatcgggctacgacactcgtgagatgaatcggctcatgagtttctgtgtggatcgtatggtggcaaacagattacccctggaagagatagtgagcaagattattacttttaaatttcaataaactaatgccaactgatttcagacgccgccagccacacatctaaaatgtgccctcgttctgcagcaactgaatatcattgaaggaattatttgccacttattgctcaaatccaagccacaaaacaatgctgtttgtcaaatattgcctctttttaatcagcattgtaagcttttggagagtcttaaggcattatcggatgcatccaagaaagcccataaacagttgaagcaaaccgccaagaataatagcacatcaacgtgcaatttgacactgaacggcgtcccggtgaagaccatgtgtacacagcctgataatatttgggacttggccatattggataagctgctccatctacttcttgagttagtaaccttgacgttaatcctttctacttcttaaaactgttttcaattttccatttagtgacgtcgtagcctttgctgctccagaaaaaacagtgctcttgcgctccaacgagcccctcgtccggtatgttttatccgtaacggccagcagagtggagtctatacgcctggagcccgattataagcagttggcctacagtaaacgcacctttaagcaattgacggacattacaaaggtcatttacgagcgctgcattcaacgcttgccggagctgtggaaaaatttcgacatgcagagcgccgccctagccactcagtgtttttctgaatgcctaaaaacagctcatgaaacgtactcaaagaagttcgaagattttgtcaagtcatttggtaagttaagtcatgctaagtatatgaggataatctaaactatggtaaaacttttagatttggcatctataaagggaagcagaaacaaggaagtggtttacacaattcaggatgttttagacgactttatgacggagtacggcactgatgattcgatttgtaaaaatgagttcgtttccaaattgcctgtttacctcttggagtcgcttgaaattcttttggatcacattgactaccaggatcgtgctgccaccgaatcgtacacttggctgctaaatttttgcagcaaaaacgagattctcaacagtgaaatgggcctggtgcacagaatgctattcgttcagcgtcaaaagacccacttaggtcccttcttcgacagtgttgctcggcaattgggtcacgtactgggcgtacaaaatgaagacgctccctcagaatctgtggagctaactctaaagtccataagtacagtgaccatcgagagttgcctacagcatctgtatgctgccatccaaaagcagctgaacgatgtggactactttgtgacgaaagccaacaatctaaactacaaatgccaagtggttcccgaaattgaccagatatattggcggggcaacctggattccatggatcgttccatttgcacacaaataatccacataagtcgcactttgctggtgctcacaaacgtttgtattcctctaggttctttgatggacggtcttatgaagttgttgattcagcactacacttgtttgaaaagcctgaccaagcactacatatcgagctacacatcagatacgtccattgagaacattaaaagcaccaagtgagtccatctagtcgtagatttaatggatatctaatctgcattttattctccaacagatttgaacttctgctacgtgcagttggtaaacaacttccggcgaatatttacgagctcatcacgtacatagaagctaataccctggatgaggaagcgcagcagcatacaaaaaagcggaaggtccaggcagaacgtgctaaagttctgagagagactcggctaattcccaaggttataatggttatcgaggacttcaataagcacattattctcctgtccaaaaagaccaaaagcaagaatagacttacggactacctccacttgggaaccatgcgcgacttcgatatcaagtcgacggatttgagggcagctatagagcgtagtatctcggatggccgcaacatttctaccgaagacagtaatgctgaggatcgggatgaggatgaggatgaaaatgagaatgtagaggaagacgatgacgcacagtccaccacgtatccagaggacttggaggagaaggaagatgaatgcttagtcatagagaagaaggaagaaaggcgcaggaggcgtgcacctagcagtgaagcagaggatccacaacccaaacgaaaaagaggccgcaaagctgcagaacagctggaagctgaagatgaagagcaagtcgaggaagagcagcctgaaacgactttaaaattaaggcgaaacaaaaaagtggagccaaaaaccaaaaggagtgtggccattaaaaaacccgaggagcagccatcccatgagagtcgtaccagtaaaaggtcaaaaggtccagcggataagcaaacagcggagccagccaaagtggatctttgcgttcccgaagtgcccgctgagaagaagaaaccacaacctagtcgtagactgggaatacctcgtacattaaggaaatgatgttttgttaaaaaaaagtatattaaaaagtatatgtatttaaatcatgccagtccattgcttattcaaaaatggttgcgattatcgcaattacttaattttcattatgtgctgtattgctgttttctagaatttccacatgttcaaaaagaaaaattgttcaatgtttttgtgaatcttgttcatttaatatcattggaattttagctacctaatctctgtaaattaaaaggctgcttcccattatttattagtactgcaaataaaaaatatatataagtatattcataagcgaaacttgataaattaaacaatgtactcacttgcagcgtgtgcccatgtccagaaacaataacacttccgtcattgcccaccgagacagttcgtccatccggacgcttccacaccgacacactatcatcccaaattcctgcttgatcgtcacgagccacgaagttttctccctggacgcggccatctttgatgctgcggctgtccctttcaacaatcagtccttcaaagccctttgccaaggtcgctccacaggaaactggggactacgcctgcccctttggacaaaaaatcctccggaacccacatccacagtgcgaccaggacgctccacatggaactgaggactacgtctgctcctttggacgacaaatcctccagaaccaacatccacagtgcgaccacttcgctccacatgaaactggggattgcgaagtcccgcaggctgcacagtggagtaggcgggctgtacagcagctagacctggtcctctaagcgtatgtgttccttaaaatagtatccataataagatttatgcactgcctcgaaccatgattcttagccacctggtcctccagcgtcttttttgtgcacatacgtgatcccctgctcatccgtatagacgtgatctgctggcgacgatgcgtgatggaactgaccacctactcctggcaccttgtatacgccatcgttctgcccccgaatgtag

SEQ ID NO: 32462 - DNA, 4287 bp, DROSOPHILA
atgcggagtctgggtgagaaggcgcgctttgatgagctggaactgctcattcaaaacactccaatagaaaagttaaaggaaacccttaaatccacaatgacacgcagcgagggcataacgtattggaactaccttctccgtggcttcaatccggagagcaaggatgcgctagccaagcgattcgaatgtgtccgcagcttcatggacggactgagcagcacggaactgagctacaaacagactttcgatctgatcacgcgcctgtcgcaggacctggccacctttccgtccgagcagctggcctggatcgtggagcactgcatggacgggatccgacaaggagacgccaagtgcgtcggctggaaggatttgctgccggacgcgctgtcgctgcttttggccagaccgcggtttcttctgaacggcatatccatagatggaatggagttcagggacactaccgtaaggagcattgccaccatgcaatggccagcctcaatcctcacgccaattgccgacatgttcaagaccatgaatcttagcagtggcgaaattgtgacagtactcaacaaattctctggcgccctgcaggagctatctcccatggaactcccagcgctgtgcttccagctcttttcgatgtgcagcactgcttcccagttgatcattccgttgctggccctggagaagtatttccatcgcaactactacaagcggctcttctcagacatgtgtagcaactcaacgaacttggatagcattgacttgttctcggacaaggaactaagggaggccgaagagactatcctgcatcacttgaactactgtactatgtacaaacttactgaaaaacatttggccataatgctgagaaactttctgcacatgcccgatgtgatcctaactccgtttatgcttagcgccattatctcgatgaccagcattaatcgcgatccagagtccgctagaatatctcattccattttgctaccttttttgcgcaatgtgatcaaaaacaacgaggaagagcgaacgttagccgactactccgtgtggtatcgggatacattgcaacgcaagcaagtcgatttgcagcaggtcctcacggtgctcattgatcagaacaaagacggcaaggatgtgataactcctgggctggttcatctcgtattttacttgctgaaatcgcaatcgcccaagatgcacacattggccatcacatttctaaccaagttcattcgcaagcgattcatttttggacaaggcatcataaagcttatttcagagtggatgatagtataccaggaacaaaatcagttctcggaatgcctcacacttctaagtgtggctgatacgtatacggtctccgagtgcatgaaaccaattcaatctctgtctggtgagcagtccatgcgcatgatgaactttattctacctttgctaaagatctctaatcgcgtccgtgatgcgctaattgatgtactttgcaaagcaatgagctcgagtggaattcaaaaacggcgaatggcgatttatgggttctgcatgatcctcaaacaactaaacaacagcaatgctgtgcgccagacctccagcgccaccagtttctgcactcaacacagtatctctggctactccataatgacccagaacacactgggaagtcgtagtaatcctcaaagaaatttcgacatgctcacgttggaaattattggaatgttgcgaaactgcttgcaacaacaattcgatatacggtgctccctgtatgaaaatcttcagagagcagtggagctcaatgctaaactagtgccacatgtgctgcaagtcattgactggcactttcgcagcttcttcgacaccccctctgcagaggatgctggtgacgatctagacacagtattccgcattcgctacgatcaattggttagctctagcgatgatcaacacatggagattcagcttaaagacaacctgggcaagttgattcagttcgtggccaactgcttggctgttttcgatcgagctccatcgggctacgacactcgtgagatgaatcggctcatgagtttctgtgtggatcgtatggtggcaaacagattacccctggaagagatacattgtaagcttttggagagtcttaaggcattatcggatgcatccaagaaagcccataaacagttgaagcaaaccgccaagaataatagcacatcaacgtgcaatttgacactgaacggcgtcccggtgaagaccatgtgtacacagcctgataatatttgggacttggccatattggataagctgctccatctacttcttgatgacgtcgtagcctttgctgctccagaaaaaacagtgctcttgcgctccaacgagcccctcgtccggtatgttttatccgtaacggccagcagagtggagtctatacgcctggagcccgattataagcagttggcctacagtaaacgcacctttaagcaattgacggacattacaaaggtcatttacgagcgctgcattcaacgcttgccggagctgtggaaaaatttcgacatgcagagcgccgccctagccactcagtgtttttctgaatgcctaaaaacagctcatgaaacgtactcaaagaagttcgaagattttgtcaagtcatttgatttggcatctataaagggaagcagaaacaaggaagtggtttacacaattcaggatgttttagacgactttatgacggagtacggcactgatgattcgatttgtaaaaatgagttcgtttccaaattgcctgtttacctcttggagtcgcttgaaattcttttggatcacattgactaccaggatcgtgctgccaccgaatcgtacacttggctgctaaatttttgcagcaaaaacgagattctcaacagtgaaatgggcctggtgcacagaatgctattcgttcagcgtcaaaagacccacttaggtcccttcttcgacagtgttgctcggcaattgggtcacgtactgggcgtacaaaatgaagacgctccctcagaatctgtggagctaactctaaagtccataagtacagtgaccatcgagagttgcctacagcatctgtatgctgccatccaaaagcagctgaacgatgtggactactttgtgacgaaagccaacaatctaaactacaaatgccaagtggttcccgaaattgaccagatatattggcggggcaacctggattccatggatcgttccatttgcacacaaataatccacataagtcgcactttgctggtgctcacaaacgtttgtattcctctaggttctttgatggacggtcttatgaagttgttgattcagcactacacttgtttgaaaagcctgaccaagcactacatatcgagctacacatcagatacgtccattgagaacattaaaagcaccaaatttgaacttctgctacgtgcagttggtaaacaacttccggcgaatatttacgagctcatcacgtacatagaagctaataccctggatgaggaagcgcagcagcatacaaaaaagcggaaggtccaggcagaacgtgctaaagttctgagagagactcggctaattcccaaggttataatggttatcgaggacttcaataagcacattattctcctgtccaaaaagaccaaaagcaagaatagacttacggactacctccacttgggaaccatgcgcgacttcgatatcaagtcgacggatttgagggcagctatagagcgtagtatctcggatggccgcaacatttctaccgaagacagtaatgctgaggatcgggatgaggatgaggatgaaaatgagaatgtagaggaagacgatgacgcacagtccaccacgtatccagaggacttggaggagaaggaagatgaatgcttagtcatagagaagaaggaagaaaggcgcaggaggcgtgcacctagcagtgaagcagaggatccacaacccaaacgaaaaagaggccgcaaagctgcagaacagctggaagctgaagatgaagagcaagtcgaggaagagcagcctgaaacgactttaaaattaaggcgaaacaaaaaagtggagccaaaaaccaaaaggagtgtggccattaaaaaacccgaggagcagccatcccatgagagtcgtaccagtaaaaggtcaaaaggtccagcggataagcaaacagcggagccagccaaagtggatctttgcgttcccgaagtgcccgctgagaagaagaaaccacaacctagtcgtagactgggaatacctcgtacattaaggaaatga

SEQ ID NO: 32463 - protein, 1428 aa, DROSOPHILA
MRSLGEKARFDELELLIQNTPIEKLKETLKSTMTRSEGITYWNYLLRGFNPESKDALAKRFECVRSFMDGLSSTELSYKQTFDLITRLSQDLATFPSEQLAWIVEHCMDGIRQGDAKCVGWKDLLPDALSLLLARPRFLLNGISIDGMEFRDTTVRSIATMQWPASILTPIADMFKTMNLSSGEIVTVLNKFSGALQELSPMELPALCFQLFSMCSTASQLIIPLLALEKYFHRNYYKRLFSDMCSNSTNLDSIDLFSDKELREAEETILHHLNYCTMYKLTEKHLAIMLRNFLHMPDVILTPFMLSAIISMTSINRDPESARISHSILLPFLRNVIKNNEEERTLADYSVWYRDTLQRKQVDLQQVLTVLIDQNKDGKDVITPGLVHLVFYLLKSQSPKMHTLAITFLTKFIRKRFIFGQGIIKLISEWMIVYQEQNQFSECLTLLSVADTYTVSECMKPIQSLSGEQSMRMMNFILPLLKISNRVRDALIDVLCKAMSSSGIQKRRMAIYGFCMILKQLNNSNAVRQTSSATSFCTQHSISGYSIMTQNTLGSRSNPQRNFDMLTLEIIGMLRNCLQQQFDIRCSLYENLQRAVELNAKLVPHVLQVIDWHFRSFFDTPSAEDAGDDLDTVFRIRYDQLVSSSDDQHMEIQLKDNLGKLIQFVANCLAVFDRAPSGYDTREMNRLMSFCVDRMVANRLPLEEIHCKLLESLKALSDASKKAHKQLKQTAKNNSTSTCNLTLNGVPVKTMCTQPDNIWDLAILDKLLHLLLDDVVAFAAPEKTVLLRSNEPLVRYVLSVTASRVESIRLEPDYKQLAYSKRTFKQLTDITKVIYERCIQRLPELWKNFDMQSAALATQCFSECLKTAHETYSKKFEDFVKSFDLASIKGSRNKEVVYTIQDVLDDFMTEYGTDDSICKNEFVSKLPVYLLESLEILLDHIDYQDRAATESYTWLLNFCSKNEILNSEMGLVHRMLFVQRQKTHLGPFFDSVARQLGHVLGVQNEDAPSESVELTLKSISTVTIESCLQHLYAAIQKQLNDVDYFVTKANNLNYKCQVVPEIDQIYWRGNLDSMDRSICTQIIHISRTLLVLTNVCIPLGSLMDGLMKLLIQHYTCLKSLTKHYISSYTSDTSIENIKSTKFELLLRAVGKQLPANIYELITYIEANTLDEEAQQHTKKRKVQAERAKVLRETRLIPKVIMVIEDFNKHIILLSKKTKSKNRLTDYLHLGTMRDFDIKSTDLRAAIERSISDGRNISTEDSNAEDRDEDEDENENVEEDDDAQSTTYPEDLEEKEDECLVIEKKEERRRRRAPSSEAEDPQPKRKRGRKAAEQLEAEDEEQVEEEQPETTLKLRRNKKVEPKTKRSVAIKKPEEQPSHESRTSKRSKGPADKQTAEPAKVDLCVPEVPAEKKKPQPSRRLGIPRTLRK

SEQ ID NO: 32464 - DNA, 2658 bp, DROSOPHILA
agtgttacggatactgggaaatgcaattacgggatagtggatttggggtggtgtgcttggttgctagtgcttgtgtggcttcgccgaagggcttggtctttgatctttggctttggcttatcttatcgtatgattctgggaatactggtttggatggatcttaatggctggctggaaataacaagttggttatatgtagtttagatatctcattctttgtacaggcttccccatacgggcacaacatcgaacaggcgacacaaagctataacatatgtgtacattttcgcgattctagacagagatagttggtagattggtgtagtttagtcagtgtttagtactaggcgggaagttaggatagctagatagtgagtcacactacgcattaacatatgtgttattttgtggcacatgtaaagaaccgaacgcaggcattggtttcatcgatcgcattgctgattaactttccagccgaactggaagccttgacgcgaacaagtgcaaggttattaactgaccccaagtgggcgtggtggtgggcggtgggcgctacttgtgccagcacatggagaacccgagttgtgtgcaaaaaacactgctcaactcgttgggaacaccgaaaattagttttttatgcagaaatagtgaaggagaacacacacacaaacacacgaaggcgtactgcgccgtgtggttagcagagggattatagtggaaaagtgaagttttcgacggatgcacacacaacacataactatatttgcacactatttgttaattaccagctccggcttatatgttttttttttttttaaatctcgaactctacgggctaaaatcgagcaaagttgacgaataaaagtggatacacacccaaactagtgatgtgccgcgcggcgatagttcgggtgcgtgagcgcacccgcataccatcgctaatattcgcgcagaaaaacatacaatacgtatcagtttttagttccatgcgctctgcaaaatgatggccaaggacaagggtctggctgtggccggaacggcggcccccttaccggccgccctcgaccacgagtggtccgccgaggaagagctgcagctgttccatgcaatggaaggcctgcgcccggtgggcatcaacaagcacttctacatgtcctgcattgtccagcgtctgtccaagtcgctgaaccgtgaaatgcccagcgagctgatctggcgccacctgggcaccatgtacaagctgaaggaactggacgatctggagtcgctgccctttcccaacgaggagcgcgagttcagcctgccggagcaggattacggaacgctacagaccaaaaagacggtggaagtgcatgccaacgaggaggctgcagaggcacagtcggcccctccaacagcagagaccaatggcaaaggtagttcgttagttatcatcaggattcattcacttgtaatgttgttttacagctccacctgcaaccaaaacgccggtaccgacgaattccaccaaggacggcgacaaaaagcccgtcgccaagccccaggagcagctgcccaagcgtccggccaagcgcacacgcggctccatgtccaacgagtccatcagcccctccactacgccgccgccggtgcagagcaacaagcgccgtcgcatataggtgacccccgcccgaaactgacgattgttgatccgttttagctcattagttttactgtactctaataaaaggatttattcttcgaaatcgttgtcctcctcgttggagccgttcccgttctcctgcgccagaacctcggtggcctgcatgttttccaggagcgatttgagaaggcgtcggttgagatggtcggtctgcgtcagttcccggactgcctggggcggagcattctcgtctgccggtgcagggctgttctcagctggagtcggagtctctgccatggctttgatgtgctccaaaacaggcatttttcccccgagaaatttcagcttttgctatgacacacagtccgctgggtgactcgtgcacttggaaacttggctaagtgtagggtacactcgataaagtatcgataagttggcgttttacgtcagccctagttccacccctaagtcgatcgacttccaattggacagattctcccgctcgaatttaatttaatcggcaaatataaacaaatacgctccaaatgtttgttcccgaaacggaggatatgctgcccagactagcgcccaggccgagtgcagcagtgcccatgggccacaccaatgagattatagggcccaccgtgccggaggtatccatattgtttggccagccgccgcaggatccgcagatgcagccgcagcagccaaatcatgcacatcaggagtcatcccctcgtgctgcacccaccttcgcgtcctggaagaagcaaatgctgcccagggtcaacttttcgcccattttggccacagaactgggtcctcgcaccgctcccagcagcaatagtccgtgctcctcgaaggaataccaagtaatgccccgggatcgcaactatgcaagcgatgcgcagcagactaccaatcatatgaactgcaatgctggtggctataatgccgagcccaagcaacaggcatatcaatctaggcgcttgtccagctcctccaacgcagatgtc

SEQ ID NO: 32465 - DNA, 606 bp, DROSOPHILA
atgatggccaaggacaagggtctggctgtggccggaacggcggcccccttaccggccgccctcgaccacgagtggtccgccgaggaagagctgcagctgttccatgcaatggaaggcctgcgcccggtgggcatcaacaagcacttctacatgtcctgcattgtccagcgtctgtccaagtcgctgaaccgtgaaatgcccagcgagctgatctggcgccacctgggcaccatgtacaagctgaaggaactggacgatctggagtcgctgccctttcccaacgaggagcgcgagttcagcctgccggagcaggattacggaacgctacagaccaaaaagacggtggaagtgcatgccaacgaggaggctgcagaggcacagtcggcccctccaacagcagagaccaatggcaaagctccacctgcaaccaaaacgccggtaccgacgaattccaccaaggacggcgacaaaaagcccgtcgccaagccccaggagcagctgcccaagcgtccggccaagcgcacacgcggctccatgtccaacgagtccatcagcccctccactacgccgccgccggtgcagagcaacaagcgccgtcgcatatag

SEQ ID NO: 32466 - protein, 201 aa, DROSOPHILA
MMAKDKGLAVAGTAAPLPAALDHEWSAEEELQLFHAMEGLRPVGINKHFYMSCIVQRLSKSLNREMPSELIWRHLGTMYKLKELDDLESLPFPNEEREFSLPEQDYGTLQTKKTVEVHANEEAAEAQSAPPTAETNGKAPPATKTPVPTNSTKDGDKKPVAKPQEQLPKRPAKRTRGSMSNESISPSTTPPPVQSNKRRRI

SEQ ID NO: 32467 - DNA, 3012 bp, DROSOPHILA
cgaggacttcctgggcaaatttggctgggcagccggctggggagctctgaacccgggctcccggctgcgtcccaagacgctgcaggccgtggatgtgcccgtgatcgagaaccgaatctgcgagcgctggcaccggcagaacggcatcaacgtggtcatctaccaggagatgctctgcgcgggctatcgcaacggtggcaaggactcgtgccaaggcgactctggaggacctttgatgcacgacaagaatgggcgctggtacctgattggtgcgtatataatccctatgattctgaaaattaactaatacgattgctatcctttaggtgtggtctctgctggttactcctgcgcgtcccgcggtcagccgggaatctatcacagcgtcagcaagaccgtggactgggtatcctacgtcgtcggactcacgatgaacatctaatttattctcatcgcaatcgcaatcgtatcgcatccgcattcgcatttgcacctgcctgctaagtgggccacagattgttttgtacataactcacttcattctgctccttgctccgctttcgaaccacgccgcctaatttatggttacacaagaaatacaatttaaattaagagacaaattagcgcagtacaagttagcagttaggattggcagtgcgtatctgagagatagatacacacgtgtgcgatatctgtatctatttgtatctgcaagcaccctaagccttaaattaattataactgataattacggtttaatttacttagtcatatgcgctgttatgtaattttaaaactatttatgaactccatttcgtgtgtaaataaattatacaaatattgaaatgaattcgagttgtttatttatagtacttttttagtaatagtattatagttttattaatagtacaagcaaagtccaaatgatatatttttctaattttttgaattcgttgctgttggtgttgcagtctgggtctggaaatggttaatgtgcatgttacttttgcatcggcagacgcggcacatagacatgttgaaagggaaccccagccgcagtccatccatgctccgcatcctggtagtagagtccgcccattccgccatccttcgacagctgctccatcacgcgaaatagggtgaagacctcgtgatagatcttataaaatataactaaagcatacgtaaataattgggatctccgggtcaagatatagtcggcttacccagcacaaggttgaacaccagaagacacattagaaagctcgacaggtcaatgaacagacctgcggtcgcgtagaaaacccccaagtaaagaccaaagccaaaaataacgccatgatagatcagccaaggataaattaggcagcttgagtcctgtcgaggacatatataattatagtgaagctttaaattgaatgaaagtacatatataacgtttgccaatcaactgattcaaactgaattagaatgcaataatatccacttgttttacttacccgggcaataccaatcagcagcagcagactgacgcccatgttgatcagcgacagtccgtacacaatggagctaaagatggtcaacactgtggccaagtaatcatcattaggtaattccaaggttagtgcttaagattagggagtacttacaattgatcagtagctgctgttctgcgaccgggaccaagttcatgggccactggtttagcagcagctcgatgtccggacgaaagtggatggtcagcgccgagctgcccaagatgacggtggagatgatcacgcccagccagccgaggataatgacgttgtatttgaggttctggcattgcacgtatgagatggtgtggctggtggccatcgccacggcggttgactttccaccaggatgcgatggatcgttgggggccatgttaccgtttgttgttttccaactgaacgtgctttctgccggaatctgctgtttggggtctgtttgtgtttgcaacagaacaaacaacgatgtactgaaggctagacgagtgaaaaccaggtgacaggactgggatcagggcctgcttctttaacaccaacaaatatatttgtatctcaatcaagcatgcggcgtcattttagccggtttagagacatagaagaatgataaatgagtttttactttcttgggtcttaaaatccaatttcacctatccacccaatggcactaatataggcgacacttaagaaccctatttaatatgctaatccggccaggtggcgacaagttagaaagttacttaaatgaatgtgtggcccccattctcccttgtctagatggcctaaccccaaagagcactccgcttgccgccagtgaaatgagctgctcccattccggcgagagatggcagcggttcttgcaattatgtcgcataaaataattacaatagactgggagaacatttcctgcgccgctggcggcgtcatcagcatttcgtaataattagtagtgatgatgaagaagatcggccagcacatatgaggcagaagcagcagcagcagcagcaacttaagacagcagtcacttcaaactgtcggcagcagcagcaagagaagtccgaaccagaaccaagatgaacctgttgctgcgtctttcttggctaatggcgtgaagttagtttgcgtttggccagcggcgcgtatggttgtggtttattccccggaagaataccagaacacttctcagaaatcggaatcgaaagatgtggtgtgaaatgcaggtgcgtggctgctgggaaaaggaaaactgaacggaaaactgtgtcatcgagtcagtcggcacagaattggcatggttcccattatgattgttatataaaaatccattagccccgaacagcgacccatttgcaagcgaccccgaaacttgttcgcctatcaaggacacagatctcttttgcgccgagcagctccccgagagctccgtgagtcacccagacaggcccataaacagcaccgacttctagtaaaagtggagcagcaa

SEQ ID NO: 32468 - DNA, 773 bp, DROSOPHILA
tagccttcagtacatcgttgtttgttctgttgcaaacacaaacagaccccaaacagcagattccggcagaaagcacgttcagttggaaaacaacaaacggtaacatggcccccaacgatccatcgcatcctggtggaaagtcaaccgccgtggcgatggccaccagccacaccatctcatacgtgcaatgccagaacctcaaatacaacgtcattatcctcggctggctgggcgtgatcatctccaccgtcatcttgggcagctcggcgctgaccatccactttcgtccggacatcgagctgctgctaaaccagtggcccatgaacttggtcccggtcgcagaacagcagctactgatcaatttgttgaccatctttagctccattgtgtacggactgtcgctgatcaacatgggcgtcagtctgctgctgctgattggtattgcccgggactcaagctgcctaatttatccttggctgatctatcatggcgttatttttggctttggtctttacttgggggttttctacgcgaccgcaggtctgttcattgacctgtcgagctttctaatgtgtcttctggtgttcaaccttgtgctggttatattttataagatctatcacgaggtcttcaccctatttcgcgtgatggagcagctgtcgaaggatggcggaatgggcggactctactaccaggatgcggagcatggatggactgcggctggggttccctttcaacatgtctatgtgccgcgtctgccgatgcaaaagtaa

SEQ ID NO: 32469 - protein, 222 aa, DROSOPHILA
MAPNDPSHPGGKSTAVAMATSHTISYVQCQNLKYNVIILGWLGVIISTVILGSSALTIHFRPDIELLLNQWPMNLVPVAEQQLLINLLTIFSSIVYGLSLINMGVSLLLLIGIARDSSCLIYPWLIYHGVIFGFGLYLGVFYATAGLFIDLSSFLMCLLVFNLVLVIFYKIYHEVFTLFRVMEQLSKDGGMGGLYYQDAEHGWTAAGVPFQHVYVPRLPMQK

SEQ ID NO: 32470 - DNA, 2342 bp, DROSOPHILA
ttgcagctgccgatcttgtttgctatggttatgtccgtctacatctgggcgatcgatcgattgattgcccatcgcatgaatgggccagtttctcattgggagctcgtctgtgctttggaccatttccaagtgaaatctacatatgaaagttagcctgctgctactcgcctccggcaattgcgcccagcgatatctcgcacttttgaggccgttggtaattgttttcgctactcttggctcgaacggcccaaacagacaatatgcttataatgtttataaatattcaaaaaaataaaccagttgtctatcgctgaatggaattttgcaggctccaatcgattgaaagtcaacaaacaaacattcgtagttgctagaattgtctagaaatttggataagatagcattgttttgtttttaccaagaatagttgctatttaagggttcttttattaaatttgttatgtgattactaaaaaatgcactaaaatagtatagtatgcatagtatagtataggtattaactttttaagcatcttccagattccaaaatagtatactatacatagtatactataggtattaattttttaagcatcttccagattctaggaaatatttgtgagcttcagatgatcagtagacctctcccacatcagtgaacaccacatcgagttggtcgttataaaaaactctttattccatacaagtattttatcacaataacttaagctctagatgggtggtgagtgctggacggacacacccaggaaagtacaaagtagatggattcaatgacagaaactacataaatattaggtagaagaagggacggttagtcgcatggattgtgatgtttgtgtgtgagtttgggtgtggagaatgctgcctttggttcgctggattgcagagctcgaggggaagcagccgcctttggcaacacatcggtcgcggaggaccgatcgctatccggatcggaatgcgtatgcggatgcggagagccctacatgccctcgcaggtggacatgcagtccttgtagctggcgaagttgttctcgttgccgtcacagccgccgaacttgaactccacgcacttcttctgctccggatcgtagcgccaacgggggatcagggcgcggcagacgcccttgcgtgccggcatgaggcagaactgctccggatgggtgttgcgcccggtattggccacatcgtccagcgagatggcgtcaaagaagtcgctcacgtcgtcgtagaggtccatgggaaacgcctcgctccatctgatccccgccagcaggatcagcaccactgccactccaacgtactctttcagttgtccgcgcattttgtgtacttgatttagcttcgtatttaattcacttgatcacttggcgattgtcttcacgcaactgttggcgctgcagtccagcttttggatttatatggtgccactttgtagtccgaagcgggcgaagggaagcgaatactagacaatactcccatctaagagccagcagagctttccgttcgactccaacgctctttggttactctttcgaagagtccgcttttgtactgaaaatccaagtgtagatataactacttttgtttatttactgttgtgagcattatcatcgtaaaacatacaaccatattttttgtttttgttattttatggaaaaacaacctgtttgattttctatatggagtagacaaataaattttttcttaaactacaaatttaaagctattttccattgggtttcattgaaatagtttttatatttcaattagaaatatagaatgcctatttcttagttttgaaattgaaaattaaatgttttatggaaaagattactgttatcactatttatggatttttttaaaattcccgccaattgcatgctatcgatatcagtgggtggtgcaatcggtaatcatatcaggcatttaccattcctaatttgtggtagttggtgaaatctggcgcgtctttgtttaaatcgtaaattattacataaatttagttgggtatggcacgcgaatcaattctaacgtggatgcggagtctgggtgagaaggcgcgctttgatgagctggaactgctcattcaaaacactccaatagaaaaggttggacccataaggcggaaggcaatataaatcttaattgataaacattgcttgatagttaaaggaaacccttaaatccacaatgacacgcagcgagggcataacgtattggaactaccttctccgtggcttcaatccggagagcaaggatgcgctagccaagcgattcgaatgtgtccgcagcttcatggacggactgagcagcacggaact

SEQ ID NO: 32471 - DNA, 342 bp, DROSOPHILA
atgcgcggacaactgaaagagtacgttggagtggcagtggtgctgatcctgctggcggggatcagatggagcgaggcgtttcccatggacctctacgacgacgtgagcgacttctttgacgccatctcgctggacgatgtggccaataccgggcgcaacacccatccggagcagttctgcctcatgccggcacgcaagggcgtctgccgcgccctgatcccccgttggcgctacgatccggagcagaagaagtgcgtggagttcaagttcggcggctgtgacggcaacgagaacaacttcgccagctacaaggactgcatgtccacctgcgagggcatgtag

SEQ ID NO: 32472 - protein, 113 aa, DROSOPHILA
MRGQLKEYVGVAVVLILLAGIRWSEAFPMDLYDDVSDFFDAISLDDVANTGRNTHPEQFCLMPARKGVCRALIPRWRYDPEQKKCVEFKFGGCDGNENNFASYKDCMSTCEGM

SEQ ID NO: 32473 - DNA, 2611 bp, DROSOPHILA
cgggatgaggatgaggatgaaaatgagaatgtagaggaagacgatgacgcacagtccaccacgtatccagaggacttggaggagaaggaagatgaatgcttagtcatagagaagaaggaagaaaggcgcaggaggcgtgcacctagcagtgaagcagaggatccacaacccaaacgaaaaagaggccgcaaagctgcagaacagctggaagctgaagatgaagagcaagtcgaggaagagcagcctgaaacgactttaaaattaaggcgaaacaaaaaagtggagccaaaaaccaaaaggagtgtggccattaaaaaacccgaggagcagccatcccatgagagtcgtaccagtaaaaggtcaaaaggtccagcggataagcaaacagcggagccagccaaagtggatctttgcgttcccgaagtgcccgctgagaagaagaaaccacaacctagtcgtagactgggaatacctcgtacattaaggaaatgatgttttgttaaaaaaaagtatattaaaaagtatatgtatttaaatcatgccagtccattgcttattcaaaaatggttgcgattatcgcaattacttaattttcattatgtgctgtattgctgttttctagaatttccacatgttcaaaaagaaaaattgttcaatgtttttgtgaatcttgttcatttaatatcattggaattttagctacctaatctctgtaaattaaaaggctgcttcccattatttattagtactgcaaataaaaaatatatataagtatattcataagcgaaacttgataaattaaacaatgtactcacttgcagcgtgtgcccatgtccagaaacaataacacttccgtcattgcccaccgagacagttcgtccatccggacgcttccacaccgacacactatcatcccaaattcctgcttgatcgtcacgagccacgaagttttctccctggacgcggccatctttgatgctgcggctgtccctttcaacaatcagtccttcaaagccctttgccaaggtcgctccacaggaaactggggactacgcctgcccctttggacaaaaaatcctccggaacccacatccacagtgcgaccaggacgctccacatggaactgaggactacgtctgctcctttggacgacaaatcctccagaaccaacatccacagtgcgaccacttcgctccacatgaaactggggattgcgaagtcccgcaggctgcacagtggagtaggcgggctgtacagcagctagacctggtcctctaagcgtatgtgttccttaaaatagtatccataataagatttatgcactgcctcgaaccatgattcttagccacctggtcctccagcgtcttttttgtgcacatacgtgatcccctgctcatccgtatagacgtgatctgctggcgacgatgcgtgatggaactgaccacctactcctggcaccttgtatacgccatcgttctgcccccgaatgtagacttgattgccgggtgttccgaaaacgtgaggcccatcatgtccgtcgtatgtccgctggagatcggcagctgagggagcaatggaatcgtcgattagtctccgtttgggcgagaccatggtaaagggatttttcaccaacgcacaaaacagcgcaagcgatcggcacgagaagtccaagcaaatgcattgtcatctatgttccctgagtgaatggtgagctctaacaactaactggcttgacttgctcgtcgtggtatttataagtaggtgcgcagtagtccaacatcaggttattcatcaaattggcgacagcatctcaaaaattcacaaacgccgctggtgataggggagggcgaatgagaatttcaaaggaattgaatcgattgacgtgcacgatccctgaacacatctgttgcccgcttttgcctattagcccgattgtggatttgataagcaacttagattcgcatcaacgatcaataaagcatcactgataagaaatacaacttttatgctttgttttgattttgttataaagatagacaaatacaacatgaaataccaggagcttcgtagcaaatagcaacgcattaaaacataataaaattgggagaagccgggattttttcagatcggtgtagcgtttgtactgacgataacgttgattatgagtttcgtcgaattggcatcgggtttggcgacgaatcagtcctctggaaccttccactgcagctgctttccgcgttcgtaaagattcttgagagcgttggcaaacttcttctcctcctgcagcttcaaatagtgcttgtagagctgcagagtggtccgtgcatcttcgatggagtcgtgcgtctcggactgaatcttagtacctttggcattaggaaaacccaattagatacaattccaaatcgaagaaaacccctatacaaacccaagaaatgccaggctagaaatcttagggaaaccatgcgatgatgtggcatgtgaaacaggtgcaccgtatctattatctgctccgacggtacatagatgtttatgaccctgcaatcacatggaagtttagtggtctattggttccttacaaagcagggcatcccacctaaagtcgttcttc

SEQ ID NO: 32474 - DNA, 504 bp, DROSOPHILA
atggtctcgcccaaacggagactaatcgacgattccattgctccctcagctgccgatctccagcggacatacgacggacatgatgggcctcacgttttcggaacacccggcaatcaagtctacattcgggggcagaacgatggcgtatacaaggtgccaggagtaggtggtcagttccatcacgcatcgtcgccagcagatcacgtctatacggatgagcaggggatcacaggaccaggtctagctgctgtacagcccgcctactccactgtgcagcctgcgggacttcgcaatccccagtttcatgtggagcgaagtggtcgcactgtggatgttggttctggaggatttgtcgtccaaaggagcagacgtagtcctcagttccatgtggagcgtcctggtcgcactgtggatgtgggttccggaggattttttgtccaaaggggcaggcgtagtccccagtttcctgtggagcgaccttggcaaagggctttgaaggactga

SEQ ID NO: 32475 - protein, 167 aa, DROSOPHILA
MVSPKRRLIDDSIAPSAADLQRTYDGHDGPHVFGTPGNQVYIRGQNDGVYKVPGVGGQFHHASSPADHVYTDEQGITGPGLAAVQPAYSTVQPAGLRNPQFHVERSGRTVDVGSGGFVVQRSRRSPQFHVERPGRTVDVGSGGFFVQRGRRSPQFPVERPWQRALKD

SEQ ID NO: 32476 - DNA, 5092 bp, DROSOPHILA
gtatcactacagggtggtatctcctttggccagccgacccagtcagcagcatccgcataagccgggatccggagaagcccgtttcggtaaagagtccccacaacaaagtgacacgtcccataagaccaactactttcttctctagagcctcgtcttaaccgtcgctcctcggttccgatcagcattaactatcaaacggtgcacgtatcgagtccacatcctccggaaatggccaggcgcggctcggtgataagcctcactgggccaccaccagaagtcagtggtatgccaagtggagccgctgatccaaagcggcgcgtccgcatgataaatcgccattgaagtccagaagtccagatgagatcaggacacagcccaacgaaattgcaaagagactacagtattttaacacaccattcggaaacagaaaccgcacacgttgtagtccttcttaatgcgtttcttttaatcagttaattatgttatattattcaagtgttttaaaaaaacgtacaaagaatattcttctcgaagacaccgaatttacgcccacttcggcgggcagccgtttgccgcagcattttgccatcctattgtacattattctacttagggcaagattaaaaaaatcttaggctagcgtagtgtttagtttggaattcagtacctatgatataaccattatctacgaactaactacgaacttgtgatgctcattacaattacaatgacaattacatacagctgggtatgtatctgggttgaaagacctgctgggcgaagcggatgaagagggtgcaagatcttaactacggttgacgcgctactggatcggggtgcggagttatggtcggagtggttggtccctacggctaatacacgtattctacaaggcctccatcttcatcgaattttgcgctagtttctcctattccattaaatattaaaataaattacgtattttaattgcatgtggttgaagttcgtccctgcgccgcattcagctcagctcgttgccctcgtacaggctctcgcagctctcgagcaggcgcagcacgggggaaatgtcgtaggggtagagctggcgcgacacgaggcgggatatctgcaggcgcagccggataagaacgcccatcgcctcgtctagcatggcgctgcccatgccgaaggtgtgacagctgtgcacgaacatcgtccagttcatgcggatgtacttgagcaggcgcagcaggtagagcaggaagcaggtctcgttgctcaccagcaggtccagcagcaggtccgagctgttcgatgtcatcttgaggaactccaggaatgtgtacaccggattcagcatggccaccagctcggggaaggcgttgttgcggaacgatatcccagacgtgacgtccagcgtgcagaccatggcctcgatcaagtggtcgtcctggtcgtcgaacaggtggatcaggatcttgctgaagtggcactccggatggaattccagcgtctgctttatgaacgtctccagcttgctgagtacatcgcggatcgagcgctcaatgagcatcatgtcctggaaggcatcgtagtcggtggaatcgatggatgagtcggaggaatcgctgcgtatctccttcaccgtcaccgctatcgacttcagcaccaacagcaccatcttctgcaacagtgtcttatccatttcgataaggtccagtggcgcaccgtcctcttcgctgtcccctgattgcgcggcatgtgccagggtaattgttccattggcgtacaccatcggcttgccattgtagccgatcagactgaccatgttgtccggctgtcgccgcggcaacgactccagtatgcggaagccgcgcacatggcagactatctggtgagccagcttgcacgtctcctcgggcagcatgtcctgcagcgccagcgtggaaccatagcacaatgcctcgttgaagaggcacagcatctgcttgtacacggtgcaggagaggctgtggctgagcagcagctcaaacttgtccagctgggcgtagtagggtcgcgtctcgtcgatggacagattggccttcaccgagatgatgttttcccatagctgcaagaagttgagcacacagtgctcggccgcatcctgatgcgtcggcgccatcaactccgacatgttcttcaccagcgtgggccacttgtgctccagcttttgaatggtgatgcacttcaggtgcgtcgtatcgaagctttccgagtcggttagtgtgaccacatggcaaccgctgggcatggtcgtggactggggagcggggtgcggctcgtaggcgacgttcatatcctcgccaaagtgccgccgatgtcggtcgcggttgtcaggtgcttcctgccccgtctctcgttcaccttccgtatcctcgcgaaattgcagtgcaaaataattggtggctagcggctgctcctgcacgggaaaatgcatgtagctcacggacgcctctgtcgaaaggggcactactgacgaggctgcacttgtactattcgccgacgccatccagtcgtcgtccagcggatggatctccatatccttccactccactatgcgcttgatgatgtccaggctgaagtggatcttctgcacggccgcctggtcaagctgctcgaagttaaatagctggtcgacgatcttctgcagccactcgtcattcagctcttgcttggcaatcaccaggaatgcggctagcacacgtcccgccagaaattgcacgtaagagttctcgtagccggccagcacgataatctcgtcgataagcttgtggtcattgcgaatgagtgcgtcgcaaacgtccattatccgcgtgcagatgaagccctttgcgttctgcttcaggtagatatcgaacagtagctgcagattcgacagaaactgcagcagcttgttggtgggccactcccgcaggtaggctatccgtttctggccgttggtgtcctgtgagtaatgcgactggaagggcttgcgcagcgttcgctccgagacgccgcacaggcactggcgggtcagggactgctcgaactccagcatatcgtcgatggacgtggctgttgttgcttgcaagcaattgctcctgctgctagcatgactgccattgccgttggtcgtgtcgagggttagcaggttgggcaatttggccgccctgtccacttcgtcatgggcggattcaggctggctgtgcaggtctgtgtccccgttttgtggcaagatgttgtgcagcagctgggcgtacgacgccgcccgggaactacagggcgtggtggtgggggagttgttggcggtgcttggcgttgacagcgagtgcgaagaggacgaggagagcgaggagcacaggtggctgttgctgttggcgtccaggtccagtatatccggcggatggggcggctggggtggcagcgccttggagcccaccttgatttgctgctcgatcttctggcgcttggtctgcggctgttcgtttgatgcggaggtcgtggaggttgctaccgtggagcatgggcacacatcgcccgttccggctccagatcctgctgcggatgaggtgtccatcctccgcgctgacgtacccgacgtcctgcaaatggtctgcaagcgaaatgcccggtgagcagcgaatctaagcggcggctcgcagccacatacctacaaacccgattccgacaaacagcttccgtgctacgcgcacacaaggttacgtgtgcagacgctgctgcctggcttcgtggggcgattctctcggcttcctgagacacactatgatttcttgggggcgacgagggcgctctagctgccgccaggtgctctgactgctcctccaaacattttaaacggccacaattcgattttcacacacttgttgcactcttcgggccagcgacatgtcaatgtttatgtgagtttcactgcactcgcgtttcgcttcgtgcccgggccagtcgattgggtcgtgtgctgtttctcactttttaagcgcctccgattgtttctctggcactgcttttattttggttttattacactttattatgtgggaaaaaacaaaaattaagtgcgcgtcgccatcttttagcgagtttcagctacctggtaaccctacttgcgcagcgttgccaaacggatcttggtatttggcgttagctatatacatagccaggctcgcaaccatagctctgtcgtcacaactcaattcacatatattttactttccgaaatgtattattttttaaaaataattattgcacgcttataactttagcaacaatgtttgctaaagtaattctaataacaatgactccggtagttttaattttctaatgcgtgataataattaagtgcttgagaattataagattgcagagaacttaacaaaaaatattttgtgagaagctaattacagataacaaatatttttcaatttatatgtgctaatttaacgggtaactttaaagtaattttaagaatgtttttatttttacatttttgacattaaataatagaaatgctattcgatagtcattgacacctgacagccctgaacaccgagcgtgctgccacatcgagataaaattatgccgttagcggcggttaagtcgttttgaaaatttcagtttatgtccttttgcctaccggtgcagacgatctaggagtaggaagttctcagttcatctccacgcggccacacacagtaaattcgcacacactgcaaaccgatcggcacattaaaacaagagcgcggccgacgtggcaacactcgcttgtttttcatttgacattgaaaggtgctcgcgaattccagaaaggacgttggaaaatcggcagccgctcagtcagtacctatcaaaagcaaacacggcgaagttgtggtgcggtgctctggagatttgccggagccagataataggaactacccgacgcctaagcagccggatccgctattataagtgaagtgtcgcgagcggtcgaagcagttcgcctgtgctctcttctccgtgtgctactaatttgcatcgagtgctaaatagtcctcccttgcccttctactccgcatccgcctgctgttcctgc

SEQ ID NO: 32477 - DNA, 3035 bp, DROSOPHILA
agatggcgacgcgcacttaatttttgttttttcccacataataaagtgtaataaaaccaaaataaaagcagtgccagagaaacaatcggaggcgcttaaaaagtgagaaacagcacacgacccaatcgactggcccgggcacgaagcgaaacgcgagtgcagtgaaactcacataaacattgacatgtcgctggcccgaagagtgcaacaagtgtgtgaaaatcgaattgtggccgtttaaaatgtttggaggagcagtcagagcacctggcggcagctagagcgccctcgtcgcccccaagaaatcatagtgtgtctcaggaagccgagagaatcgccccacgaagccaggcagcagcgtctgcacacgtaaccttgtgtgcgcgtagcacggaagctgtttgtcggaatcgggtttgtagaccatttgcaggacgtcgggtacgtcagcgcggaggatggacacctcatccgcagcaggatctggagccggaacgggcgatgtgtgcccatgctccacggtagcaacctccacgacctccgcatcaaacgaacagccgcagaccaagcgccagaagatcgagcagcaaatcaaggtgggctccaaggcgctgccaccccagccgccccatccgccggatatactggacctggacgccaacagcaacagccacctgtgctcctcgctctcctcgtcctcttcgcactcgctgtcaacgccaagcaccgccaacaactcccccaccaccacgccctgtagttcccgggcggcgtcgtacgcccagctgctgcacaacatcttgccacaaaacggggacacagacctgcacagccagcctgaatccgcccatgacgaagtggacagggcggccaaattgcccaacctgctaaccctcgacacgaccaacggcaatggcagtcatgctagcagcaggagcaattgcttgcaagcaacaacagccacgtccatcgacgatatgctggagttcgagcagtccctgacccgccagtgcctgtgcggcgtctcggagcgaacgctgcgcaagcccttccagtcgcattactcacaggacaccaacggccagaaacggatagcctacctgcgggagtggcccaccaacaagctgctgcagtttctgtcgaatctgcagctactgttcgatatctacctgaagcagaacgcaaagggcttcatctgcacgcggataatggacgtttgcgacgcactcattcgcaatgaccacaagcttatcgacgagattatcgtgctggccggctacgagaactcttacgtgcaatttctggcgggacgtgtgctagccgcattcctggtgattgccaagcaagagctgaatgacgagtggctgcagaagatcgtcgaccagctatttaacttcgagcagcttgaccaggcggccgtgcagaagatccacttcagcctggacatcatcaagcgcatagtggagtggaaggatatggagatccatccgctggacgacgactggatggcgtcggcgaatagtacaagtgcagcctcgtcagtagtgcccctttcgacagaggcgtccgtgagctacatgcattttcccgtgcaggagcagccgctagccaccaattattttgcactgcaatttcgcgaggatacggaaggtgaacgagagacggggcaggaagcacctgacaaccgcgaccgacatcggcggcactttggcgaggatatgaacgtcgcctacgagccgcaccccgctccccagtccacgaccatgcccagcggttgccatgtggtcacactaaccgactcggaaagcttcgatacgacgcacctgaagtgcatcaccattcaaaagctggagcacaagtggcccacgctggtgaagaacatgtcggagttgatggcgccgacgcatcaggatgcggccgagcactgtgtgctcaacttcttgcagctatgggaaaacatcatctcggtgaaggccaatctgtccatcgacgagacgcgaccctactacgcccagctggacaagtttgagctgctgctcagccacagcctctcctgcaccgtgtacaagcagatgctgtgcctcttcaacgaggcattgtgctatggttccacgctggcgctgcaggacatgctgcccgaggagacgtgcaagctggctcaccagatagtctgccatgtgcgcggcttccgcatactggagtcgttgccgcggcgacagccggacaacatggtcagtctgatcggctacaatggcaagccgatggtgtacgccaatggaacaattaccctggcacatgccgcgcaatcaggggacagcgaagaggacggtgcgccactggaccttatcgaaatggataagacactgttgcagaagatggtgctgttggtgctgaagtcgatagcggtgacggtgaaggagatacgcagcgattcctccgactcatccatcgattccaccgactacgatgccttccaggacatgatgctcattgagcgctcgatccgcgatgtactcagcaagctggagacgttcataaagcagacgctggaattccatccggagtgccacttcagcaagatcctgatccacctgttcgacgaccaggacgaccacttgatcgaggccatggtctgcacgctggacgtcacgtctgggatatcgttccgcaacaacgccttccccgagctggtggccatgctgaatccggtgtacacattcctggagttcctcaagatgacatcgaacagctcggacctgctgctggacctgctggtgagcaacgagacctgcttcctgctctacctgctgcgcctgctcaagtacatccgcatgaactggacgatgttcgtgcacagctgtcacaccttcggcatgggcagcgccatgctagacgaggcgatgggcgttcttatccggctgcgcctgcagatatcccgcctcgtgtcgcgccagctctacccctacgacatttcccccgtgctgcgcctgctcgagagctgcgagagcctgtacgagggcaacgagctgagctga

SEQ ID NO: 32478 - protein, 858 aa, DROSOPHILA
MDTSSAAGSGAGTGDVCPCSTVATSTTSASNEQPQTKRQKIEQQIKVGSKALPPQPPHPPDILDLDANSNSHLCSSLSSSSSHSLSTPSTANNSPTTTPCSSRAASYAQLLHNILPQNGDTDLHSQPESAHDEVDRAAKLPNLLTLDTTNGNGSHASSRSNCLQATTATSIDDMLEFEQSLTRQCLCGVSERTLRKPFQSHYSQDTNGQKRIAYLREWPTNKLLQFLSNLQLLFDIYLKQNAKGFICTRIMDVCDALIRNDHKLIDEIIVLAGYENSYVQFLAGRVLAAFLVIAKQELNDEWLQKIVDQLFNFEQLDQAAVQKIHFSLDIIKRIVEWKDMEIHPLDDDWMASANSTSAASSVVPLSTEASVSYMHFPVQEQPLATNYFALQFREDTEGERETGQEAPDNRDRHRRHFGEDMNVAYEPHPAPQSTTMPSGCHVVTLTDSESFDTTHLKCITIQKLEHKWPTLVKNMSELMAPTHQDAAEHCVLNFLQLWENIISVKANLSIDETRPYYAQLDKFELLLSHSLSCTVYKQMLCLFNEALCYGSTLALQDMLPEETCKLAHQIVCHVRGFRILESLPRRQPDNMVSLIGYNGKPMVYANGTITLAHAAQSGDSEEDGAPLDLIEMDKTLLQKMVLLVLKSIAVTVKEIRSDSSDSSIDSTDYDAFQDMMLIERSIRDVLSKLETFIKQTLEFHPECHFSKILIHLFDDQDDHLIEAMVCTLDVTSGISFRNNAFPELVAMLNPVYTFLEFLKMTSNSSDLLLDLLVSNETCFLLYLLRLLKYIRMNWTMFVHSCHTFGMGSAMLDEAMGVLIRLRLQISRLVSRQLYPYDISPVLRLLESCESLYEGNELS

SEQ ID NO: 32479 - DNA, 2287 bp, DROSOPHILA
agcaagtcgggcaaacccgtcaagtacagcactggtccgatcgtgtggggcgagcctggcaccaatggccagcacgccttctaccagctcatccaccagggcacccgcctgatcccctgcgatttcatcgctcccgcccagacacacaatcccattgccggcggcaagcaccacaagattctgctatcgaatttccttgcccagacggaggctttaatggccggaaagacggtcgacgaggccaggaccgagctgtccaaggctggcctgtgcggcaacgagctggataacttgttgccccacaaggtgttcgtcggcaaccggcccacaaactcgattgtggtgaagaaggtttcacctttcaccctaggcgcgttgattggtacgtctcactgtttcagctcacgagcacctattaatgtcaattgattttgcagcgctgtacgagcacaagatcttcgttcagggcatcatttgggacatcaactcgttcgaccaatggggtgtggagctgggcaagcagctggccaaggccatcgagccggagctggatcactgcaacgaggtctccacgcacgacagttccacgaacggtctaattaacttcatcaaagccaattggaagtaatcatgtctggctatttgttgcgaattaaaaagaaatgtttacacaaatgctctaattgttagtagtttctgagccgttattcagtagccgccgcttatgtatactcgagctacaagccccctgttattggcacattattcaactgtatttatgaactggatatgtttgtttgcttgcgtatcgatgaaatctcgtgtcggaattagaccaacaattggctctcactattcgttgttgcacgtagtttaaaaccgtaaataaaaatttatgaattcgatgtaaaagactgtgtttggaaaaaaatgctaatttattttctcgcggcgcaacaacaagggaattgcatttaagcttaaattacgggtagactgtctaatccatggatacgtcagagtctgtgtctgcgtcggcgttaccatcgtcggtcgccaggtcgtcgtcggccaccagctcgtcttccaatgggctcttcggactgcctggctgatcctcctccagatcgctccagttcgtttctgcttcgggatcgggctcatctgcaagcaagcgaattaagactcgagccttgtgcgaataaaaccacttgataacttacctggatcttcgtccaggatcagggctttgttatcgttgagatgattgtccgcgttgcgtttcatctggttaattatcaggttgactcgcccggttattctaaaaataaagaaggcattgaaaaggtgttataacaatattgccaatataacaataataggagtacacgcattactaaattttgtcgtggccagatttcgaaaatggatcttttgtgcaatgatggcgctagctgtatggactacttctccagcccccacaacaagaaacccccgagtccaggcagtggcgtgccagcattgggaccaggcggtgccctacccattgccataatacccagcatatccagcttagtcaaccagtgcaacaagccggcctgcgatgacgctgatatgcagtgcatcatcgacctgatcgaaggcacactctgcgaagcggtggccattattgagtcagacccgcgtggtctttttatctacaactttccgaaaaagcaaaagatgtcctccatcagcctgatctcttcagtgttcaccgacaccattgtggccaacggagaggatgatccctcgatcacgaatcattacacgggtggccttggcatttcggcggactccgtatccagtggcttggcgcgcaagatgctgaccatcggggactttgaatactccaatgccattgccgacattagggattttgtcagtcgctgggaactttcgccggacacgaagtgtgtggtgatcagcaatccgattcgacacgaggtggccaaaaagggaaccattctctttgtggatgcccatttctctcggccaacaccccgttgtccgaatcctctggccgtcgccaaggtgcgtttcatcatttccttgtcgaagattctattgaagcattatcccgtgatgatcacctaccgcttcgagggttacaacacgctctactacggcctgggcgaacgatgcctcaactcgttcacttttcagcgattctacatcgacaccattctgcacaccaagctgaccttcttcgctgcgatctcggagtgtcgccacggcaccattgaaa

SEQ ID NO: 32480 - DNA, 228 bp, DROSOPHILA
atgaaacgcaacgcggacaatcatctcaacgataacaaagccctgatcctggacgaagatccagatgagcccgatcccgaagcagaaacgaactggagcgatctggaggaggatcagccaggcagtccgaagagcccattggaagacgagctggtggccgacgacgacctggcgaccgacgatggtaacgccgacgcagacacagactctgacgtatccatggattag

SEQ ID NO: 32481 - protein, 75 aa, DROSOPHILA
MKRNADNHLNDNKALILDEDPDEPDPEAETNWSDLEEDQPGSPKSPLEDELVADDDLATDDGNADADTDSDVSMD

SEQ ID NO: 32482 - DNA, 2234 bp, DROSOPHILA
cgacggatgcacacacaacacataactatatttgcacactatttgttaattaccagctccggcttatatgttttttttttttttaaatctcgaactctacgggctaaaatcgagcaaagttgacgaataaaagtggatacacacccaaactagtgatgtgccgcgcggcgatagttcgggtgcgtgagcgcacccgcataccatcgctaatattcgcgcagaaaaacatacaatacgtatcagtttttagttccatgcgctctgcaaaatgatggccaaggacaagggtctggctgtggccggaacggcggcccccttaccggccgccctcgaccacgagtggtccgccgaggaagagctgcagctgttccatgcaatggaaggcctgcgcccggtgggcatcaacaagcacttctacatgtcctgcattgtccagcgtctgtccaagtcgctgaaccgtgaaatgcccagcgagctgatctggcgccacctgggcaccatgtacaagctgaaggaactggacgatctggagtcgctgccctttcccaacgaggagcgcgagttcagcctgccggagcaggattacggaacgctacagaccaaaaagacggtggaagtgcatgccaacgaggaggctgcagaggcacagtcggcccctccaacagcagagaccaatggcaaaggtagttcgttagttatcatcaggattcattcacttgtaatgttgttttacagctccacctgcaaccaaaacgccggtaccgacgaattccaccaaggacggcgacaaaaagcccgtcgccaagccccaggagcagctgcccaagcgtccggccaagcgcacacgcggctccatgtccaacgagtccatcagcccctccactacgccgccgccggtgcagagcaacaagcgccgtcgcatataggtgacccccgcccgaaactgacgattgttgatccgttttagctcattagttttactgtactctaataaaaggatttattcttcgaaatcgttgtcctcctcgttggagccgttcccgttctcctgcgccagaacctcggtggcctgcatgttttccaggagcgatttgagaaggcgtcggttgagatggtcggtctgcgtcagttcccggactgcctggggcggagcattctcgtctgccggtgcagggctgttctcagctggagtcggagtctctgccatggctttgatgtgctccaaaacaggcatttttcccccgagaaatttcagcttttgctatgacacacagtccgctgggtgactcgtgcacttggaaacttggctaagtgtagggtacactcgataaagtatcgataagttggcgttttacgtcagccctagttccacccctaagtcgatcgacttccaattggacagattctcccgctcgaatttaatttaatcggcaaatataaacaaatacgctccaaatgtttgttcccgaaacggaggatatgctgcccagactagcgcccaggccgagtgcagcagtgcccatgggccacaccaatgagattatagggcccaccgtgccggaggtatccatattgtttggccagccgccgcaggatccgcagatgcagccgcagcagccaaatcatgcacatcaggagtcatcccctcgtgctgcacccaccttcgcgtcctggaagaagcaaatgctgcccagggtcaacttttcgcccattttggccacagaactgggtcctcgcaccgctcccagcagcaatagtccgtgctcctcgaaggaataccaagtaatgccccgggatcgcaactatgcaagcgatgcgcagcagactaccaatcatatgaactgcaatgctggtggctataatgccgagcccaagcaacaggcatatcaatctaggcgcttgtccagctcctccaacgcagatgtcctcaccatctgtgctggcacacagaccgatcccttcaacccatctcctccgcgaaaatcactgccccaggttgtctattccgacatcgacgtcagcaacttggccaataagagtgatctggcggctctggtatcccttgtggagtccgtgcgccatgagcagcaacagcttcggaatctctgcgagatgattttggagcaacagcagcgagcgaaacccgaagccatttcaaaagccagcagtaccactggcacccagtgcgatattctgaccaccaatcaaggtgcgtacgttgaatctgtatgaaa

SEQ ID NO: 32483 - DNA, 234 bp, DROSOPHILA
atgcctgttttggagcacatcaaagccatggcagagactccgactccagctgagaacagccctgcaccggcagacgagaatgctccgccccaggcagtccgggaactgacgcagaccgaccatctcaaccgacgccttctcaaatcgctcctggaaaacatgcaggccaccgaggttctggcgcaggagaacgggaacggctccaacgaggaggacaacgatttcgaagaataa

SEQ ID NO: 32484 - protein, 77 aa, DROSOPHILA
MPVLEHIKAMAETPTPAENSPAPADENAPPQAVRELTQTDHLNRRLLKSLLENMQATEVLAQENGNGSNEEDNDFEE

SEQ ID NO: 32485 - DNA, 2627 bp, DROSOPHILA
aaccctgttgcttaaagtcttttaatcggatttcttggtgaatcctgtttaaaagggcctaagtgctattctccaatccaattttaaattatataaaatttatcaaatatttaaaggaaagccaaaccccatttggcgcaataagaaatgtaataaacccacatttatgcaattaaaatttcccgcacctaaagtgtttaattgtcgagtggtttgagttaagtaggctccactgtggttgcgacacagcaaccagcaacccattccactcccagattttccatctgccccattttaggggaggtggcaaatctagcactcgcttctcgggatcttgatctgggatggagatggggatgtgattggggctgggggtcgccgggcagctagcggctgtcaaccttcaactttcgacgtccatggctgccggcgccgtccagggcaatcacgtgcccagccgacttgagccgaagcacgcccctgggagctgtcaaacggatctggaccgtttcgcgctttccacccaaggaaatttcaaattattttcgccttctcctgctactcccgttgctcctgctgccggctaattagtaaaactctctgcgaaattatgctcacccccacagtggctgtgcctcctcggaatccttatctaaataaacacccacattgacgggaagccgtaagaactgggtggaaatttacataaactaattcgctggctgatttgaataaggtaatggcaatggcaatggcaagtggatgtggctgccggacaggggaaatcaggcggaccgagatgccgaagagaaagctcctaaactagctacatccttgcgagtaggttggatacagttacgggtatgctggtgttggatgatgtccagggcgacatggttgctcagaaccggggctcactgccggagagtatccgcacggtggtgctgcagctggtgctactgctgctgctgttgatgatggccccagttccagcctacagctatacgaggtgtccgtccgcatctgtgtaggccaccggtatgccgccggcctggcttacagcgccgaagctgctcaagcccaccgtcgtcgggtcgaaggcgttggtagtcattagcaagttgttgcccagtccaccgctcgccggcggcaggttgaggatctgcaggctgcccaggggcgccgacaccggcactcccacgcccaccaggctggcgttcagcagctgctgctgatgctgaagctgctgctgctgctgctgctgctgctgctgctgttgctgctgtttgttgcgattgggatccttcaggatgccgtgtggctggcgtggcagcgtggcggtggccgtcggcagactgccattcagtgtggtgctggtggtgagcgtcgaagcgctgaggttcaccggatgcaggtcgtgcagcatctgcatcggactaccgcccaccgtcgacgtgtggtgggtgacatcaggctggggcacgcctaccactccgcgaagaatcccacgccgcaaggtgcctgaaccgccggccaccgctgccaccgatccgttgccgatgagcgtgggtccaccattggtggccagcgaggtcaccgtcatgggttgcaggtgcgccatgggcatcggctgggcggtgaagtccagggctgctgggtattcctgaaatgtgacacagaggcgaagaatggctttagtgcattgaagctggaaaacggaattagctagttggtattaattacttagttcgagctcttttgagctgttagattgagctctttgccaatgtataataaatatttctgattgcgtttacaaacacactgtcataaatcttattataagaacactaaaataagtgggtatgatagaactgcatctttaagaactcacttaaagtctgagaggataggcaagctttaaattcattcatttattactgactcttaagaactatttctgatttcgggatctactttgtttttccagtgtggattaagtgggtgtaggcttagctaagcagcttcatctcgaaagcagctcctcggcgggatacaactgctgtgtttgctcagcggcaaaagttttcccattaaactgtcgcccgagatatgaaacaatgaggagcgcaaacaaaagtccgctctaagccgcgcctcaaataccctggactctatccgtgccgcgaatcctttggctacttttgcctgaaaggacggcattaaagcggggattggcactaacgatgccgtaattatgacagtgccttctgtcggagctcctatatagtacaatacaacttcctgacaacttctcaactgggcagcgggaaaaaagcaaactgtctgagagtggattcctagttcaattgacatgacactttgtgtcgagttgaggaagctgttccgcatgccagaagtccggagtccgtgagtccgtgagtccaggagctcaggccaagtttgcagcacgtacaattttcaagttgcaaacttggcccgggcacctaattggaatattaaggggaatcgagtacctacgattgcggaattgaaaactctcgaggattaacatggcgcaaggacatccagcaacacattagggacacaacgctcaacactgatta

SEQ ID NO: 32486 - DNA, 627 bp, DROSOPHILA
atgcccatggcgcacctgcaacccatgacggtgacctcgctggccaccaatggtggacccacgctcatcggcaacggatcggtggcagcggtggccggcggttcaggcaccttgcggcgtgggattcttcgcggagtggtaggcgtgccccagcctgatgtcacccaccacacgtcgacggtgggcggtagtccgatgcagatgctgcacgacctgcatccggtgaacctcagcgcttcgacgctcaccaccagcaccacactgaatggcagtctgccgacggccaccgccacgctgccacgccagccacacggcatcctgaaggatcccaatcgcaacaaacagcagcaacagcagcagcagcagcagcagcagcagcagcagcttcagcatcagcagcagctgctgaacgccagcctggtgggcgtgggagtgccggtgtcggcgcccctgggcagcctgcagatcctcaacctgccgccggcgagcggtggactgggcaacaacttgctaatgactaccaacgccttcgacccgacgacggtgggcttgagcagcttcggcgctgtaagccaggccggcggcataccggtggcctacacagatgcggacggacacctcgtatag

SEQ ID NO: 32487 - protein, 208 aa, DROSOPHILA
MPMAHLQPMTVTSLATNGGPTLIGNGSVAAVAGGSGTLRRGILRGVVGVPQPDVTHHTSTVGGSPMQMLHDLHPVNLSASTLTTSTTLNGSLPTATATLPRQPHGILKDPNRNKQQQQQQQQQQQQQQLQHQQQLLNASLVGVGVPVSAPLGSLQILNLPPASGGLGNNLLMTTNAFDPTTVGLSSFGAVSQAGGIPVAYTDADGHLV

SEQ ID NO: 32488 - DNA, 7171 bp, DROSOPHILA
taataataataataaataataataataacctttcttgcggcgctgatgcacaaagaaccaggcaaccagcgacgcgttgaccaggaggaagccgaatgccgccagagagatgccaattatgaccaaattcggtgtattgctggagtcctcggttaactcggctggcatcagttcaagtccttgacaaaacgaaccatgcaaaaaaacaaaagaaaatatggttgcgaaaataaaacaataaataaatgcgaaatgaaatgaaaaattgtaataaaaaggaataatatcgtggtgaggaataaaaatataaaatggcgcagagcatagcaatgaacgcgctgccccagtttcacttgcgtccgcctcggattcggatttggactctgaatcgggtactcggccatgggctccggacaaaggacggtctggggtcgggacggccaggggtcaggggtcgaattcggttggcatggcgggcacacgcagcgaaatcaaataaagagaccgactagcgaccagcgagtgacgcaaatcacgtagagcctgcgaagcggagccggaacatgtgatggcaaatgaaattagcgacgccatcgccattccacagcgattcccatcgcgatgtccaattccattgccatccccatccctataccgatacccatacccatttcccttcccgatcccgatcccaatcccattcccttgcgcaatttgctgaccaccgggcacgtgcgctgacaacgcccacaaattaaaagaaaataacggaggcgactgcgagtcgagccgggggaattaggaattcaaatgtccatggactcgagctccgcggttccgcagctccgacaacagcttcccatttaaccctgtcttggtcaatggggcaataatggcagcacactcagattataactattgctcttatgcgcacaaatatttcaagaataaataagaaggcaaactacttacgatcatagtttaaattaatcagacttttttataacgctcttatatctatactgctggtttgagaactataaccctttttcactaagatataagaaagatatggattcttggacatttctccctgtgtggcagcagcagcagcaaccgccggattcacggattcatggatcccctcacctcgcttgaggcgcttctcgttccgtttgtgcaggcagcagccgatgacaaacacgttgagcaggacaacgacgatgccggcgcccacgcccaccaggagcatgcccgatgtgccgcccagcggcgtctggctggtggtcggcggtccgcctcccagcgacgaggccggatgcgaggggggcggggcttctggaggacggaatgcgatgcgcgaatggtggatagtggccatttgcggtggttgcgtcgttcgttttgttgacgttggtgatggtcgtaatgcaattccaattaacagcagcaagggtcggaggagatcattgagtgagacagcaaatcggattgaggtggctccatatgagtccatggtaacgtctggctgtaagccatttcttacgcttcataaactacagtcgtgtccatttgaatagcccagctggtggtggtgcaggcccagttgaaatgggttcccaaacgtccctgtaaaccttttaacctctaccagaactatgctgtgtttaatttaagtaaacattgatgccttagctaataactgctagtatccccatctttatggttactattcattggcttgtgtgggtgtctatggctgcacctggtttgtctatctatttgtaaacatcttgctggttaattactttcatcactaatttcgtttgtggaacatgcatgcccaactgatttgaattctctgatttatttggatccgtgcctgcacggtctgtatttctgcggaaacaacaaaatccagtatatggtttaattttacttcatcaattatttcggatgactcattccatgcgtgctcctaattagcctgatagctgcttatcatactggctacctaattaattccacaaatctgccgaatagctgcctgacaactggcccggcaccatcaccaccaccattaccacccccacgtggtagttaccgatgctccgattcttctgcagaatcgaacccctgctccggtgggcagtggccataaaagccaaatggtggactcgcataaatcaatgtcagcattgctggtcgagtgcggcactcgcggctaatttgaatgcctcgcactgaggggcggacttacctttggtctccgcccgcgccaaatccggcaggtaggagctctggcccagctcgttccaggacatcaccgagaacaggtagagtgtattcatgcgcagcccgccgatggtcagcttgtggctgttgggcaggccatcgatgtatttgtactgctcgcggtcggccatcctgcaaatgagaaggcagagtgcaatttcattattgccaggacccgtgataattgcaaactgtgagaatgtggaaaacggacccttttgaatcttcaagagtagcgctattttaatgaatccgatttttttgttaaaaaaaaaatctgtcatattgtgaactcttataacttagaaaattggctctacagaagctttaaaaatttttacccgtgcatgttttgaatgcatgtccgaatgtcactcacctataacgcactcggtaggaggccttaaggccaccatcgaatcccggagtccaagccaaagtgactgtgtcgtgggtgacgttcaggatattcaggctgaggggtgggtcaggctgcgaggtgatctctaggcgcacggtctccaccgcttcccccaattcgtttctggccacgcactcataagctccgtagtccgcgggcgccactttgtccacgatgagggtggactcgtaggtcagcgaatcaatcttgcgctcctccacctcgtatttgtacgtgcggttgatgggcaggtccttcttgtcctgccgccagatgaactgcggcttgggcgaaccctgtgcccgacaaggcagacgaccacgttcccccgtcccactggcagcccgcaagagcgtgggagtcttggcgatttcaggtgcaactggaggaggggaagatgtggattgggataaaggaagtgaagcatagtaagacgactactttcttttactttatgaaccacttacacttgacaatcagaaggatatcgcggttagttggattgtccacacgattgtcggccacgcaccggaagttgcctacatcctcccgcttcgcgtccttgatgtgcaggtaagaggtgccgttcgcgaaggtcgtcgatgttttcacggtcatgtcgtaaccaactcgctcccactttacgtgctcctcggtcagtggtttgccctccacggtgcaggagagcattgcatcctcgccaggattgacgacgatgttctcagacaccgacttaatggtggttccgtctgcatggcgatggccgaaattagcctaataaagggaatcacacagcgcaaagtacttacattccacaacgacagtgatgttaagggtggctcctccctgcgagtttgaggcgctgcaggagtagattcccgcatcatcccgatgcagccgtgtgaagttcaggctgccgccatccgcaaagatgcgatgatcgccgtcctgcggtattgtggtgccatccttggtccacttgtaggtcactggagtgggattggcccgagtttggagcgacacctgcagcgattcgccctccacgcccaccgccgtcgacgagggcggcggcacgaacttgggtcgatctggggaataaggatataccaaatgtgttccagtaaatctttggttaaccgggctattccgatatctcttggtaagccttatctcattgtatgaaacatttaaccattttacaattgttctaagtggtggttcatactatggtagttcagccaaaggatacaaagatacattattggcttagggatatcggacacaagttcaactgtcgctcttttgtgcaatttcttaaggaatcggcaagcgattggatatcccgtctaattgagcaattaggcgggacgtacttacacaggacatccaggctgactgcctcgtgggcgctccgctgaagagcctcgttggcgctctggcaggtgtagacctggccgttcatttcctgtgtgacgttcaccctgaactctagcgtcgagaccgtgccgccccagagacccggcttggacgtgttattaatgcctgtgggttggggcatgtcgggagttccggtgggcggacagggacacaggatccggatagggcagggcaaggggatgaggtaggaatgggtacggagaaaaaatgggcgtaattttagtgactggcaagcgaaccggatgttgtcgtggaaacgcctcgcaccagcaaagtgcactggtggcgccggcaagtccatggcgaattgcgatgggcaagcttccaattgccaaatcgcttggccaggcccaaagaggcaagcaggccaagcagcaatgcccttgcataccgtacgtaccttcgatgggtatgccgtccttccaccaggacagcttcgccggcggattgctggagctcgagtcacagatgatagttgcctccatgccaggtcgcagttcttccggttcaatgcgtattttgaccgtctccggggcaactgaaagagcgagcacacacccaaatgggtaataagaaaggatgcagtagtctccccgttcccaaattcaaagcgcagctgctgcactcaacaaaacaagttcaccattcagctacattataagttgcaactattacatataacttctgttgtatttattttaaatcgaattctggtctttatgattcagagatacttgaaaacaccttggaaattaacttggaattataacccttctaaataaaagccttttttttaataaaatttcttacatttactagatcaagaaaattttcttcatgtaaggaaaactttttaagccaatggtgaattttctatttcagagtttgttattattgggtttgactgatatattttacaagcgattttaagtgattagtagaaataagtagtcttatttatttacttatttgtgttgcttattattagctattttcttaggttaaagtgttattaacctctgatatatactcacagtggacgctgagcgtggtggactgaaagagcgggatctcggtggcgctgttggaggcctcgcaccggtactgggcctggttgtccgacacgttggccagaatggtgatttcggccgacaccgatttgtccgccgcccgtatgaccgagtttatctgcaaaggaatggagtacttatatattttttttctggctggaaagcatctccgcagagcgcatctggcggatgcattttaatttcgctgataaaacgtcgtctaatctgggcgagcaagcgggcgagctagcgagctggagagcaaacacggcacacagatgagtcccccgaggggcagagatgaaaactatgacaccacaacaaatgggaaacgctaaaacaggaagccgcacctgaaactgcaggtgcacctgccacctaccacccagcaaccaacattccgtcgtttaagtgtgtgggctgatgagctgcggttgtgggtgacttgttttatttttccatcgtatttaccgccttttgttcaaagttctaacgatagttgtgctccctcgattattggtggtgggcggaaggtgtgaaaaccgaaatcgctctggcatcaggagcgcatagaacaagagcgctgcaatggctgcagtggctcattagcactttaagtccataaagcggaagcggaaatggtcaacaaaagcgccattattgttttgcggatgtttgctgcctgccgttgatagtgctctctctccctgccgctcgctctttgttcagtgtgtgtatgtgtgtgactgtttatgcaagtgtgtgtgtgttcgagtgtgtgtttgagttttctgcggaaaatgcaaacaaaggccgggaaaaaaaggaaatttgtgcactcacccttttgtcgtttttgtaccatgttagcgtcgccagcggattgccgcctgatgaaacgcagagcagtttttgcaccgagccagctgggataatttgtccctccatatagccagaaattaatggtggcgcaggcggatctgtggaggcagttggagaacatggcgcgggataagaaaaacgttcccaaaaaaaagagacaaacaaaggagcgccaagcagggaaaatggtccagcgaattgtgggcccaaaaacttagccacgagccagcaaattatggcctacaacaataacagcaaaggactcgagggcagcgccaggactaggacccaccgctgtgtccttcgtgagagctgccaagagcggccgaacaataaaaattaaaattatttaatttgccgcgcataaagtaaaaatatccgcagggcgtccgcatcctcaaggcatgaccatgcacataccatcgtatcgtccttcgtccttgattgggcgctgggcgggggattgggagtgggcgtgggcgtggacgctcaggaggaccgctcattaccttaggggtccgttagtcattttcagtgctcatggtatgggtaataaatgtaaatctcttgccgccccccccccccccgctgctttttccctgtgatgttggtcagaaaaattaattagcgctgcaggagagcgcttacaaaggacatccaccgcagggtcagagaagcggtggggcgaaggcggagccatgaggtctctggatggataaaccgaaactagaatcgcaattattaataagccccggcatcggcttaactactgccccaaaccgaaccaacgccattcaacctgttatcgagtgactttgcctgtcagtcctttcatcttccccagaaatccgcaatcccagcatcccggtgtcctccttcgccgacatctattttttcctgcgtgttttttgtcactgccttcgcttataattgagtcaaatgaagagtgacatcgaacatcggataatggagtttgagacacttgcagttgtcgcgtggcggagaagtgtcactctgcggcagcaaaagggggtggtgtcaaagtccgggatgcgtacatccagtt

SEQ ID NO: 32489 - DNA, 2190 bp, DROSOPHILA
atggagggacaaattatcccagctggctcggtgcaaaaactgctctgcgtttcatcaggcggcaatccgctggcgacgctaacatggtacaaaaacgacaaaaggataaactcggtcatacgggcggcggacaaatcggtgtcggccgaaatcaccattctggccaacgtgtcggacaaccaggcccagtaccggtgcgaggcctccaacagcgccaccgagatcccgctctttcagtccaccacgctcagcgtccactttgccccggagacggtcaaaatacgcattgaaccggaagaactgcgacctggcatggaggcaactatcatctgtgactcgagctccagcaatccgccggcgaagctgtcctggtggaaggacggcatacccatcgaagcgatttggcaattggaagcttgcccatcgcaattcgccatggacttgccggcgccaccagtgcactttgctggtgcgaggcgtttccacgacaacatccggttcgcttgccagtcactaaaattacgcccattttttctccgtacccattcctacctcatccccttgccctgccctatccggatcctgtgtccctgtccgcccaccggaactcccgacatgccccaacccacaggcattaataacacgtccaagccgggtctctggggcggcacggtctcgacgctagagttcagggtgaacgtcacacaggaaatgaacggccaggtctacacctgccagagcgccaacgaggctcttcagcggagcgcccacgaggcagtcagcctggatgtcctgtatcgacccaagttcgtgccgccgccctcgtcgacggcggtgggcgtggagggcgaatcgctgcaggtgtcgctccaaactcgggccaatcccactccagtgacctacaagtggaccaaggatggcaccacaataccgcaggacggcgatcatcgcatctttgcggatggcggcagcctgaacttcacacggctgcatcgggatgatgcgggaatctactcctgcagcgcctcaaactcgcagggaggagccacccttaacatcactgtcgttgtggaatacggaaccaccattaagtcggtgtctgagaacatcgtcgtcaatcctggcgaggatgcaatgctctcctgcaccgtggagggcaaaccactgaccgaggagcacgtaaagtgggagcgagttggttacgacatgaccgtgaaaacatcgacgaccttcgcgaacggcacctcttacctgcacatcaaggacgcgaagcgggaggatgtaggcaacttccggtgcgtggccgacaatcgtgtggacaatccaactaaccgcgatatccttctgattgtcaagtttgcacctgaaatcgccaagactcccacgctcttgcgggctgccagtgggacgggggaacgtggtcgtctgccttgtcgggcacagggttcgcccaagccgcagttcatctggcggcaggacaagaaggacctgcccatcaaccgcacgtacaaatacgaggtggaggagcgcaagattgattcgctgacctacgagtccaccctcatcgtggacaaagtggcgcccgcggactacggagcttatgagtgcgtggccagaaacgaattgggggaagcggtggagaccgtgcgcctagagatcacctcgcagcctgacccacccctcagcctgaatatcctgaacgtcacccacgacacagtcactttggcttggactccgggattcgatggtggccttaaggcctcctaccgagtgcgttataggatggccgaccgcgagcagtacaaatacatcgatggcctgcccaacagccacaagctgaccatcggcgggctgcgcatgaatacactctacctgttctcggtgatgtcctggaacgagctgggccagagctcctacctgccggatttggcgcgggcggagaccaaagaagccccgcccccctcgcatccggcctcgtcgctgggaggcggaccgccgaccaccagccagacgccgctgggcggcacatcgggcatgctcctggtgggcgtgggcgccggcatcgtcgttgtcctgctcaacgtgtttgtcatcggctgctgcctgcacaaacggaacgagaagcgcctcaagcgagtgaaaaagggttatagttctcaaaccagcagtatagatataagagcgttataa

SEQ ID NO: 32490 - protein, 729 aa, DROSOPHILA
MEGQIIPAGSVQKLLCVSSGGNPLATLTWYKNDKRINSVIRAADKSVSAEITILANVSDNQAQYRCEASNSATEIPLFQSTTLSVHFAPETVKIRIEPEELRPGMEATIICDSSSSNPPAKLSWWKDGIPIEAIWQLEACPSQFAMDLPAPPVHFAGARRFHDNIRFACQSLKLRPFFLRTHSYLIPLPCPIRILCPCPPTGTPDMPQPTGINNTSKPGLWGGTVSTLEFRVNVTQEMNGQVYTCQSANEALQRSAHEAVSLDVLYRPKFVPPPSSTAVGVEGESLQVSLQTRANPTPVTYKWTKDGTTIPQDGDHRIFADGGSLNFTRLHRDDAGIYSCSASNSQGGATLNITVVVEYGTTIKSVSENIVVNPGEDAMLSCTVEGKPLTEEHVKWERVGYDMTVKTSTTFANGTSYLHIKDAKREDVGNFRCVADNRVDNPTNRDILLIVKFAPEIAKTPTLLRAASGTGERGRLPCRAQGSPKPQFIWRQDKKDLPINRTYKYEVEERKIDSLTYESTLIVDKVAPADYGAYECVARNELGEAVETVRLEITSQPDPPLSLNILNVTHDTVTLAWTPGFDGGLKASYRVRYRMADREQYKYIDGLPNSHKLTIGGLRMNTLYLFSVMSWNELGQSSYLPDLARAETKEAPPPSHPASSLGGGPPTTSQTPLGGTSGMLLVGVGAGIVVVLLNVFVIGCCLHKRNEKRLKRVKKGYSSQTSSIDIRAL

SEQ ID NO: 32491 - DNA, 2555 bp, DROSOPHILA
aaggcggctaagcgccaccacccacccactcccgctcccgcttcatccgcctagcccatttaccatttacccattgacatttgcatttttccatattttccagcagctctgttttccaatttgccgactgcccagcagcggctgaatgacaaggcacaaacacggggtccaggatgaaggacgaaggacgcaggacttgggattctggacaggacaggacaggatagcgaaccgcagagcagataagggccgaacatcgacagtcggcgctttgttggagtataaaattattatttaagcaccgtcatcaggccgaaagtcgacgtccatttccctgtgccagccctccttttccccacatcctgcgcatccccgctccatcatatcacatgtgcgatggccaaacggttgacaggcgtcactttgcccatctccatctgcaccaccgccaccttcacgggcccggcttatcctcatcctcatccacacccacttccacttccacacccgcatccgaatccgcatccgcacttatcccggctaaaaagggcctggccaaaacccatttacactttttttgttctgcataatgctttcgaagagaaaatgtatattgttatgttcgagcaacccatgttgttttagtcagtctaatatagctcggatatctggagacagtcttagcacgcggtatgcgaaattttgtgaaatttgcgtattaaatattattcttgccttttattacactcatttattttattcctgaggattaatcaatagtttactttatactagaagtttctttgagcacagctatgtggtaatgtggcttatccacgtatccatttgtttagacagcttaaatgaaatttcattattaagcttaagcttccgtgcatatccctccctagatgtcctttgtgacaggtgcgtgatggcaaccatcttggcacgcttgatggcacatggttgggcattaagtgtaatgacttagtggctactaacctggtttgtactcgacgttaccgcgataccagacgatttgagccgccggcttagcattggccacgatgcacttgagctgcaggtcctggttctcgcgcacctccaccttggaattgtggctgtaacctttgatctcgatcgaggctggcggagctggaagagaggagcagtgggaacgattaggggggtcgggccacaaaggaagttcgcgggacagcggatggaaggtggtgggtggtgggcggtgggcggtgtatggtggttgcaggtcgaaacaaaagctaatggctgccagggaagctttgctcattatggaccacaatggcattacgggacattttgtgggcgtggcactgcctaatgcattgtgtgtatgcgacgacagacgacattgttgatgaaggcccaggttgaatggccgccgatgcagaaacagaaacagcagttggaattgctgggtggctgggaggctggggcctggggactgggaaggaatgctccaagaatgcagcattccgtccttgttaaccacccacttgaaacggcccatctactgatgcactcaaagaatatggtcagcatggtaactttatattcgatttaaaactattcaagagtattccccaattttatgttaaatatgagcataaagcaatacgatgaaatttgacccaatgttgtgatttgaatgatttgatattggatatgtaaccatgtctgtcatggattagtatgcctaaggtgtctgaaatgaaaggcatcttgggctaagctttttctccgtgtaggcaggtccctcgttaatgtgctcaaatatgagtttcaatatttgcgaggagcctggcatgcctgagccggcatgccttggcaaactgttgaaatatacacgagccaccggcgaaacaatggctgagtgacgccgggtggtgccgagtgggtgggcggtgtacgatgggtggtgcatgagtgcagcaaatgcaagatgcagtggcaagccggcgggggcagggaaagtaggagcgagcagcgaaacaaacaacgaggaacgaggataaagttaagtgcacgtgtgcattattttaatgccacctgaaggagtttggctgccattgccattgcatcgcactaagcggcaaaaacagcaggagtaggatccttcctacactccgaaggagttggctcagggcgtcctgcatttgacatgcaacatatgttgccggctgctccgcgaactgctccagaagttgtagcatgcaaaatgaatgcttaatgtcgtacaataagtcccatggctccaaggggatggggttaagacggtggcttagattgcgggcaccggagaggagaggagtctgcatgtctgcgacatcactcggcgcagaggtaattgcttttgttgcggcacaaatgaaatcaacaccgtagtggcggtgcccccccccccctttgattaagcttagtttagcatagccgcaagctgcgaatattattacgcaacaaatcaaatgcaggaaagtaatttcgaaatcaggggcccaggtatttccttt

SEQ ID NO: 32492 - DNA, 555 bp, DROSOPHILA
atgggccgtttcaagtgggtggttaacaaggacggaatgctgcattcttggagcattccttcccagtccccaggccccagcctcccagccacccagcaattccaactgctgtttctgtttctgcatcggcggccattcaacctgggccttcatcaacaatgtcgtctgtcgtcgcatacacacaatgcattaggcagtgccacgcccacaaaatgtcccgtaatgccattgtggtccataatgagcaaagcttccctggcagccattagcttttgtttcgacctgcaaccaccatacaccgcccaccgcccaccacccaccaccttccatccgctgtcccgcgaacttcctttgtggcccgacccccctaatcgttcccactgctcctctcttccagctccgccagcctcgatcgagatcaaaggttacagccacaattccaaggtggaggtgcgcgagaaccaggacctgcagctcaagtgcatcgtggccaatgctaagccggcggctcaaatcgtctggtatcgcggtaacgtcgagtacaaaccaggttag

SEQ ID NO: 32493 - protein, 184 aa, DROSOPHILA
MGRFKWVVNKDGMLHSWSIPSQSPGPSLPATQQFQLLFLFLHRRPFNLGLHQQCRLSSHTHNALGSATPTKCPVMPLWSIMSKASLAAISFCFDLQPPYTAHRPPPTTFHPLSRELPLWPDPPNRSHCSSLPAPPASIEIKGYSHNSKVEVRENQDLQLKCIVANAKPAAQIVWYRGNVEYKPG

SEQ ID NO: 32494 - DNA, 2821 bp, DROSOPHILA
ttgagtgattacaattacacagcaaaggcagcacaacattcaaagtgattgctagccgacaatgcaacagtcgaaaacgaggactaaaacaaaaaggaattcatttcgcatcgcttgcctgcagtggagacacagcccacatagtccccattcccacccccagtgctggttttccgcccacttgggctccttggagcaataaactgcgctaaattcagctcagctccgtaatgctgtagctcctcgtggcgtttcagttgctgttgctgctgttgttttgcaaattgctgacaataaatgttggcagcgacagagacagaggcctgcgtggcaggtgtgcgagtgggaaaggtaggatctacgtactgaacggcagggacccgcatttaaatttcactagtggaattccgtaggtgcaatgagcaggaaacatcaggaatgtgtgccactgtttgtacatatgtgttcctctgtgtgtgtgtgtgtgtgtgtgtgtgtgtgtctgcccctggtgacaaattcatttgtatttattacttaaattaattgcagccctagaaaaaggcgagccccacaaaggggtgaattcaattgagagggtggttcaaacaccaggcactcgtacactcacacccgtactcgtgcaagtcattcgagtgggtatcgtactttgtctgcggatttctcctcctgggactctgaattcgagagcagtcggatattgctgcgagctgaatttggtattcttcggaattcgtcgaattttatgaaaaattcagatgatgatatatttccattgcaattttagaattttgtactcgaatggtccaaggacttcttattaactattaaactatatttcgatggctaaaattacatttacgcatataaaaaataaatcgcaaccaaactcttcacttagttgatcagaaaagttataagttaagcccaaaaaaaaaaaaatggatgagatgtctatgatcgtctatgattgtatgtattaactcaaagaagctgtgcatgatgtttaagataatttaacactacccattataagaaaattctttcgagtgtaagaagtgctatatagatagacagacttgcaattatgtgatatttgtatgcagcagtaatgaaataggttcgcattaaagatgcataaatgcaggaaaaacctgagatgaaattttaaaatatgacctgtgcgccgaccacttttcccatgacgttgcgtaatcacgactagctaatagggttcattatactcacatatgacggtcagcttggcgttggcccggatggcgctgttgagccgagccggtcccacctggcactggtagtcggcgtcgtcgttgatggaggcgttcgagatgcgcaggttgtagatgccctgcttccggtcgccgagcacggagtagcgcgggaagccgggaatgaccgccgagaagcccagcgcaaagccatccttcgtccattggacggcgccggccacgttggccacctcgcaacgcatcatggcctcggctccttccaggacctggaggtcgtgcggcgttgtccggaacttctgctgctgggcgtggctggggacgggggcgctggccaggacgatgacagctagaaaggaaggaggggggagagtgattcattagcgatgcacttaattaattgtccttgcggccatttgttgtctccggtctgtgcgtccgttgggtcctctattaaaaacgtgactttctatcgcccagcgccgtatgatgaattatgaaatatgtgtttactcaaagaccgcgatcccagtgcccagtgcccattgcccattgcccatggccgggagcccagtcaaagcgaatcccgaccgcaataaaacaggacattctgcaaagctcttgcctccgtagccccaggcttcacggccgaactttgaccgtttccagctgcctcaaaaaaaaaaaaaaagagctgggcaaaaacttggccagaaccgcttcgttccgttcttttttttaatgaaaaacaaacacatttcccgaacccgaaacgaaaaagcgcgtttgccgtgccacaaaagccaattgtgggtgtggtccgtatccgtgtccgttgtccgctgtccgttgtccgtagtccggcgtccgtagtccgtattccgcgggcccctgtccgtgtctgtttgccaagacacattgcagactgctgcagttgtggagttcatttcttgccgccgaaactattaaattgtgcgagttggcgggtgaaaaaggcaccgggtggtggaaggtagggagttgggggggtggcttttcccgaggcagtggcgcatctaaaatcaacaaaagcatttaacgcgacggtcgtcagtcgaggcagctccacttgtttttagtgtcctaaaatccaccgaaaaaagcattctgcccccaccacggtccacctcctgcgccctgtgaaacgagcattttattcgcgctttcataaattttccagcagagactttttcttgtgcactcaccccccccccccccccaaacactctgtttatttataagcaacgaaatgcagttttaaatctgggcaaaccactcccactgccgcctgccccgctggcacattctaacagaagggaaaatggaaataaaataaaacttagctctggcgctaccaactggcaatgattaatatggccagcaatttgcatacgcatcatgtctgaggggcatggcgatggttaaaatagaatagaataggatggggtggttgggttgggtggttttaagggatggggttgatgagtggtgggctgtggggcgatggggcagga

SEQ ID NO: 32495 - DNA, 402 bp, DROSOPHILA
atgggcaatgggcactgggcactgggatcgcggtctttgactgtcatcgtcctggccagcgcccccgtccccagccacgcccagcagcagaagttccggacaacgccgcacgacctccaggtcctggaaggagccgaggccatgatgcgttgcgaggtggccaacgtggccggcgccgtccaatggacgaaggatggctttgcgctgggcttctcggcggtcattcccggcttcccgcgctactccgtgctcggcgaccggaagcagggcatctacaacctgcgcatctcgaacgcctccatcaacgacgacgccgactaccagtgccaggtgggaccggctcggctcaacagcgccatccgggccaacgccaagctgaccgtcatatcttctttgagttaa

SEQ ID NO: 32496 - protein, 133 aa, DROSOPHILA
MGNGHWALGSRSLTVIVLASAPVPSHAQQQKFRTTPHDLQVLEGAEAMMRCEVANVAGAVQWTKDGFALGFSAVIPGFPRYSVLGDRKQGIYNLRISNASINDDADYQCQVGPARLNSAIRANAKLTVISSLS

SEQ ID NO: 32497 - DNA, 2184 bp, DROSOPHILA
tgtctgtttgttgacatattatgatccttgattattttgtgctgacaaatacatgcttttcctttttccacactgccgtactctctctatacacatgccacacagcctacatctagatagacttccgattttgattctgattttgattcggattcgtgtttggttttgctgctctttctggtattgctgcctcgactcccagggggcgtggctcgacactggccaggtgcttctcaactaattggtctgaatgtgctatccccagtttattaggcttttaatgatgggcggactctgtaaatccgcttccattcggactccaatccccgcacacgcccacaaatgtcatgcgaagagatggcatgagaaacaacaaaaaacaacaaacctgctccccaagcaaaccaaatgaaaacaaaaaaaaaaaaaaatatgaaaaaatctacaaccgaactgtgggcgtcgacacaatattttgtaaattatattcgattgtttggttgtctattttccgttttttaatggggcggggaataaagctgctctgggattgaggggcggaagccacgataagaactcaagtacatggcacacaagtaccggttgccagctcccagctccaagtttccaactccacacccatttgcttgaaactccgcaacctgttctacgataatgcgtttgattgcagcggaagtggagcgctgttgtggtacgtgtgtccggtgcttctggccttgcataatgtgtaattaataattagtttaccattctggacggcccaagctcccctttccagccgcccgagtcatcagaggctttgccacgcccacaaatggcttttcccccgacaaatgcctagaaacggagcgagtccctgcggtatccctctcggccagaccgcaatgtccattaaaaggacccaaacacaacctgcaacatgcaatgcctgctaatgaaccgcagctgttcgactgtcaatgcccctcgtccgccttggtcaagtggtccactcacccaggaggcgcaggagctgaagatgtttaatccaatgctgacggcagcgtcgtcgctttgttgcatgttgctgccactttatgtgctgctgctgctgttgctgctgctgttgctgctgatgctgctggtgttgctgatgtcgctgatgctgctgctgcaaagccattgttgtggccgttatgctcgctctgttggcttttagcggactgttctgggagctgagaaaaaacgcgaggttgcactataaagagcagcagttaccgttgctgccactccagctgttggtgcgacacatttgtttggggtcaccacttcagagcactttttgtctgacttttgatttttggcacacccgcgaaatcgcgatttgaacccggattgagaatggaaatgggatcgggttagcgccgcatggtggcggctgttcacatgaccgccgaagggcaggggcgactaaaaccggtggcagggggttcttggcctggtctaggactgccagttggccactttaagattcgcacttgccatccgctggatgttggcgcagactcgataatttggcgttgtaatcgcggcacgagtgcttcccgtacgactgagtgtgtgtgtgtgtgcttgcgcttgcagaagtgtgggtgaacggtaggccccgtgcgaggtccccgaatcaaataacggaacggaacgcggagcggttcctctggcgagcgtcctcacggaatcagagctaaaaccgaactaaaacctcgcagctcgcaacgcgccgaccgccaaagaacgagtatctgtgaaatacatctccccatcgcatcggcatcgtgcagcaggaggccactgagagccgcacacagagagtgcgttgtgttcagaaatccagatatagacgcacagatgtataagagagtatccataagatactccaagcaaaagcagagtatctgtaaacacttcgctcgagcacgttgtttgttgttgctgccgtgcaagtccgagtcccagccggttgtgcccatcaacttatacgggccactccatattaaccgggggtggaagtcgtataagtatgcctataagtatatgtataagtaagtataagtataggtataagaacactcagtctgctattttcagtttgttttgataccacttatactgcgtgcaaagagt

SEQ ID NO: 32498 - DNA, 184 bp, DROSOPHILA
aatggctttgcagcagcagcatcagcgacatcagcaacaccagcagcatcagcagcaacagcagcagcaacagcagcagcagcacataaagtggcagcaacatgcaacaaagcgacgacgctgccgtcagcattggattaaacatcttcagctcctgcgcctcctgggtgagtggaccacttga

SEQ ID NO: 32499 - protein, 60 aa, DROSOPHILA
MALQQQHQRHQQHQQHQQQQQQQQQQQHIKWQQHATKRRRCRQHWIKHLQLLRLLGEWTT

SEQ ID NO: 32500 - DNA, 3062 bp, DROSOPHILA
acagcggacgcagagtcctgagtcctcggaaacaaggagtggaccagctgttggctgcctctgacttcttcttttcttcttgattgtagatcccggggcgtgccattgtacctgtcaggcattcaattattcccagttcccaacctgcatcgccgttgtttgttttggtcgcctggaaaagcaaagcaaatcgcttggtcaagcaactgtgtaaatatatgttgtacgtatcggcaggtcaaaatgcaatcggcacgagctgggatattgcgtaggtgacgaaggtcaccgcagatgtttcgcattcatcagaaaactcgatgcgatgctatggcacaacaaaaatgatatttgttcgtatctcgaaaatagttcagaaaccaactataaacctaacatttaaagagtagattccaatggatacatgagaaaacatttctagactatgaagatagtctagtctttttcaaatatcaccattttgaaatcaatacaatcccatatccctatattgggcagtacgcatggaagtagccaaagttactcaaaaaagcgacattaatgatgataagctgatatataaagttttccccgtttcaaaagaaaagaaaagtgtactccattgtttttgatttaatgcttttattttgaaaaaataattatttgggtaacttaaagtagcaataaatattcatatttgtttaaaattaaataatgaaaaaaaaggtatattcgaaaactacataacagcagcaaaaaaaaaaatggttatattagtaattggaataaatagtgattaaggtggcctaagaaattatgtacagtaattgaaagatgattagtttacgacttaggaactagttaagcgtcatagttaagcgttttccccccgtttgtcagcgttgctcgctttctcgtctccatcttcatctccatctcgcatttagtttctcttctcatttttgtggctttccgaggatctgtttgaaattacctctgctcagacatatatagacgagggcagggccaatcccacctcgaagtaattgcgctcgtcgaccttgtagcgcttaatgggggactccttggcgacgatctccttgcgggtcctcttcagggccttgactggagtctccaggcagaaggtgttgtcgcagggggcagacttgggggccactggagtggccagttggacaagcaagttgtgaggaatcttggccaggggcgatgccggttccggagtgggcatcaggttgtgcatgggcaggggaaccaggccaaagctcagatccgaggccggatcgtctccaggtgcgtaggatggcgacagcacctcctgggggcagttcgactccatttgctgcttgaccaaggtgcgtctgcgcagattgaaggtggaccttctcggcttcttcttgctgctggcgttcgccttgcaggcggaatccaagatggcatcgattaggcgatccaaggtctgatcacccatctgcgtggaggcgggctgcggtgtgcttggacgcacttccaccttgggggtgggtggctctggcactgccgtctcctgcaactccggctccaaggtggccacaaagtcctcgtccagtctacgctgcttgagtttgttaactcctgcacccgagcctacaatatagcgcggctggcccagaaagggatccaacggagccaggcccctcagcgccaagtgctgaccactgggcagtccgttgggcgagtagtcctcggcaaaacgtggcaatgtggtggcgtatcgcacactctgtaccctttggggcgcctgactgcgcaccaccgcctccggggtgacattccggatatcgctcagcggcgccaggaccaggggactgttgcgcagccgggtaatgggcactggcgtggaggtgtagcccacggtgtcaggcacgttctccttgttggcaatggtggccctccgctgacggcgctgcctcctctgcagcctcctcctctgcggctggttggcatcctgatcgtgcacgggaatctcgttcaggcgctgcgccgatgccgtccacttcagcatgttgtgtgtggttctgtttctgctgctcctggtgcacaaaaaaaaaagatgtacttctagactctgctagtcttctgctctcgaccgctctcgctgacaaactgaagcggtacggggagcgggctgcgttttatacccgctcggcgctcaggggttaatggctaggggttacggggctaggggttgttgcgcaagaggcaccccggcgggcagaaggacactcgctctctccggcgttctctccttggatgaaaagactctctttggccaacggatgtgtgtggtagcaaattgtctttggatctcgaggaacttgagcaacaagctcgaggatatcagcagcttagcttagaatatgaaagtatgatctctatgccaacgagatctgatattttgatggaggtattggaggtattcgtcctttcccacagttcgcagtaccggccgagaatcacccactccaatccaggcactcatccacagcaccaccacacgaaaatgacatctagatgtctatcggccagcgcttggttattaaatttgctttcattcccctcaaggaagtctgcttcctttcgcccttgtctccccctcatttgaatggacatttagagcagcaacaggctggaaaatagtgaacggaaaagggagaagggaagtcaggttggccggctaattagccgatgccaagtccaacttcctggccgacagctcctcgtcattttagccacttgtcgtagcgcggtatcagtattaattgcggctctttagcggccgcaaatgcaatttatatactcggcggctttaattgaaaatgtttgccacttccggaaggaagcattagaaaaacgttacaaactctgggaaaagtcctgtgcaaagcgtcagttgctcacccaacaggggaaaagtttgtacacagtatgcattatcaaattatcaactttttaataagtgttctttctacaaatagatgggcctcatgcaatgcaaattcaca

SEQ ID NO: 32501 - DNA, 1062 bp, DROSOPHILA
atgctgaagtggacggcatcggcgcagcgcctgaacgagattcccgtgcacgatcaggatgccaaccagccgcagaggaggaggctgcagaggaggcagcgccgtcagcggagggccaccattgccaacaaggagaacgtgcctgacaccgtgggctacacctccacgccagtgcccattacccggctgcgcaacagtcccctggtcctggcgccgctgagcgatatccggaatgtcaccccggaggcggtggtgcgcagtcaggcgccccaaagggtacagagtgtgcgatacgccaccacattgccacgttttgccgaggactactcgcccaacggactgcccagtggtcagcacttggcgctgaggggcctggctccgttggatccctttctgggccagccgcgctatattgtaggctcgggtgcaggagttaacaaactcaagcagcgtagactggacgaggactttgtggccaccttggagccggagttgcaggagacggcagtgccagagccacccacccccaaggtggaagtgcgtccaagcacaccgcagcccgcctccacgcagatgggtgatcagaccttggatcgcctaatcgatgccatcttggattccgcctgcaaggcgaacgccagcagcaagaagaagccgagaaggtccaccttcaatctgcgcagacgcaccttggtcaagcagcaaatggagtcgaactgcccccaggaggtgctgtcgccatcctacgcacctggagacgatccggcctcggatctgagctttggcctggttcccctgcccatgcacaacctgatgcccactccggaaccggcatcgcccctggccaagattcctcacaacttgcttgtccaactggccactccagtggcccccaagtctgccccctgcgacaacaccttctgcctggagactccagtcaaggccctgaagaggacccgcaaggagatcgtcgccaaggagtcccccattaagcgctacaaggtcgacgagcgcaattacttcgaggtgggattggccctgccctcgtctatatatgtctga

SEQ ID NO: 32502 - protein, 353 aa, DROSOPHILA
MLKWTASAQRLNEIPVHDQDANQPQRRRLQRRQRRQRRATIANKENVPDTVGYTSTPVPITRLRNSPLVLAPLSDIRNVTPEAVVRSQAPQRVQSVRYATTLPRFAEDYSPNGLPSGQHLALRGLAPLDPFLGQPRYIVGSGAGVNKLKQRRLDEDFVATLEPELQETAVPEPPTPKVEVRPSTPQPASTQMGDQTLDRLIDAILDSACKANASSKKKPRRSTFNLRRRTLVKQQMESNCPQEVLSPSYAPGDDPASDLSFGLVPLPMHNLMPTPEPASPLAKIPHNLLVQLATPVAPKSAPCDNTFCLETPVKALKRTRKEIVAKESPIKRYKVDERNYFEVGLALPSSIYV

SEQ ID NO: 32503 - DNA, 4746 bp, DROSOPHILA
tggtggcgcttgctcggaagctatttagtcggccttttgtgttataaaagcgctaaaatatttaataatctaattccaattcaattctaatgtgacaatcagctgttgctgtcctagagctggcacaggtgtcgatagtcacgcatggcagtcacgtatggtaggtgcactcgctaaaacatggtgggtgcatccgccagtgagagttgccagatgaaggcgggatttttaaaaatggtatttaagaatatgaaaatcccagtattttgaatgacagcacttaaatttcccatcattaaaacaaaaatacgttaaaaaatatgtttaaagattcactttttaatttcaggactcgcatattcgtttaaaactgccgcctatgagcttaaatcgagtttaggatgcttctctcttgggttttgtgtattagtcacatctagaaatgtattaacttaatgctatatagttggtttgacttaaacgtacattaggttgcttgttaattgaactaatcaatttgagttgctgacgcctgacgtttacactgcaataaataaataacgctatgctacagggcttattcgagataaaatttggcccccgaaatagttctatcaataataaaaaaaaaaacttaacattagtaattctactgactatctggccggcagcaacgaaaaaagtcttacattaccaattccttatactaaagtttgtatattttcaaattcaatatttaactaaaacaaaacgaagcagcattaacgtttaacgacttagctgcttagctgtttttttcttttaattaaacgttctgctcgaaatacattttaatgagctcaaaatgaaaacaaaacttgattactagtgttttagcacaaagttactcgagcatttgaaacgacagaaacttctgttaatggcaaattccctagttctaagcttaatgattggccaaattaattggttttttggaaaactaaacagtaccgggtgccttaaagctaatattcgagggtttcgagctgctctgccgacctgtcctacgattatctcaataatacacatctagtttcggatccttaagtctacttgaaactgtctgtttttggggaaccactttcgcttgccgcttaggtatatttctcctcgttgtgctgctccgcccactagtccactagttagttgcctcctctgcgagccatcacacctcaatactgttcagactgcccgacgatatgttgtccgtgtggctgcccaggcgcgtcctcttgatcatcgccctgctcggcatcggcgatctctggaccctagggctccctggcacgatgggtatgcccaccaggccacccggatggccggggtggtggtgcagatgctggtggtgcggcggcaggttgttgttgttgttgttgtggtggctcaggccaatattgagattgctgtggctgttgtgcacctgctggttgcccgaggtgcgtcgctgtcgccgcagggatggtatcctggtcggcgtgggtgtgccctcctccatatgaaagcccccgggctgctggtgacccctgacactgcgctccatcatcggcgacggctggtgcgtgggtgcctgttggtaataggccgagtgcggaggcaccggcggcggctgctggtggtagtccagtcgcttgtgcatcagagtgggcgtgccaggcggatggtacggctgtgcgtggtgaaggccattctgatgcagtccagagttgttctgtggaacattaggagacataaattagcaggatagggcactaggcgaatcgttatttcatgagtgaatgaatgacaatgttgacaaaacaatatcggctgggggttggcttatcctgattgcggaggcggaaaagcaatagcacatgggagttgtatgcacagactgtcagcaagatgatgttgtcaaaattggtatacagtgtttgtttgtatcggttggtatgcgcccgtgtgctattgttttcgatctcaattgcaggcttacttggccagcgccgtttgctggtttcttgggcagcggaggtagcggcttgctgggcgcctccagcaccgcgttcggagcatccagctgctcctggtcgtgtttctgagggagattcagtttaattgcagcgtcgcaggcctccagcgtttcgcaggaggacgaggcaaccgccggtagccccttttcatcttcgtgtccgtcctcatcctgctgctcttccgcgttcgaccgctccagggctagatctctggccatgcagttgccatttccatttccattcgccagcggcggcaggaaacgcagctccatcacgttgcggttctggaacattggactctcaatttgcgggcgaatctcgacgagatttggcagagttaccaagcgaaagtgacagagacagcaagagagagggcaagcgagacagagataccacgttcgaaggggtgtttacaatttgaatttgaattttgaccaaccaaccagcgaaaagttttggatgaagctgtgtgaaaattgagctcgagtttagacccggaagttcatggtttaccttatcggatgccgtttcctgggccagcggattgggcgtaatattcatcctcggaatcactccgttgaggcgccttacatcgccacttttgtggtggccaccaactcccaggacggcggaggtaacaaagtccgcttgaatgtgttccaattgcggtttgttctcatctgtgtatgcagagatttaatttgataagcatgagaatattccactccattaagctggacttaccctccggctgagagttttcccgtctctttaggcaaaggcagaccaccaatgaggcgatgaggagtagtatgcctccgccagcggcacctgcgatcagtggatataaggagttctggtgctgttccactgccttattggctggcactggcgtggccgaagatgaagccggttgctcgtgcgtttctaagaaggaacacaagttaaaacatattttaaggccatcatagcccaacctgagctgcactcacttctggtcctcgcttgccgaatagcactgaattcagaggctgcgtcggagttgaacgattgcaatttgaactcataaggggttcctggacgaaggaggtctatcttgaagctcctgctcattccgccatccaccgtggccttcaaatactccgctgctgagtccgctggcctatagtaggcatagtacccgtctatatcctcattttgagtcgaggataccagggaccaatggagcaccacggccgactcggaaagcgtctccacctcgcgtagttccggcactggcagattcgacttggacgttccattctgcaggaagaacttgagggaggtgttgccctccttgttgtcgttattggagtacaccgccacgatccggaagcggtagtacttgccggcggtcagtcccgtaacggaggaggtgaagttcttgggcggattgcccatttcatactccctgtcccggttccgcgcccgccagtgactgttcccctggccaggcccggatccgtgcgcgtttccgtacgggatattgtcgctggtcgtctgccagttcttcctccgattttttccgtcgcccaacatgcgatactgcaccttgaaaaaggtgatctggagtccagagttttgtggcacactccagcgcagcatcacggactcgtccgacagacgggtgacattgggtcgtgacggaggcaccatgctcgctgtaacaagcgtttttattaggtttattttaattaattgtcttgatgttattatttacaattctgaacatttgaatatctggcgttgccagaccagatcatcgatgtacattttcatataaaatcgatgataaggaataagatcggataattgctattcagaaagctcatgaacactaagcaactgacggaacaataaatttatagatacaaaaatgtaaattgttaaaaatgctgcagaagttaacttgttaaaattaaacgtgtaaaagaccaacattatcgatagattagtgatgcagaatttagagtacacatgatatcgattggtatcgacactacggcatcgataccaactctcgcatatcgtaagtgtttaccagctctgatattcgagtgaaaatgtgtgcgtgtaagcgatttatttattgagcggcgactctcgggcgtccaaaaacttttttatttctttatgtaaaccaacgcgagccaagtcaagtgcaatatagaattggtggctgcatgtcgggtgcaaggggtaccaagacggtgactgacgcacactaacacacgggcgcgcgcgctgctgcgtctgtgtgtgcgtgtgtgtgtgccagccactactgtgtgtgtataagtgtatacagcgaagaagaagcaaggactcaaactcaagtgaaaaactcaaaacaaactcaaatgtcggcgcagggtgaagggggcggtgctggcggaagcggcggcggtggtgctggttcggatggaggcggcaatgctggccaaagctccacggggagtggcacagtggcggtcaccaacggaggcaactcgtccgccaaaaaccagctgccgctcaccccgcgcttcaccgccgaggaaaaggaggtcctgtacaccctgttccatttgcacgaggaggtcatcgatatcaagcatcgcaagaagcagcgcaacaagtactccgtccgagaaacatgggacaagatcgtcaagga

SEQ ID NO: 32504 - DNA, 2121 bp, DROSOPHILA
atggtgcctccgtcacgacccaatgtcacccgtctgtcggacgagtccgtgatgctgcgctggagtgtgccacaaaactctggactccagatcacctttttcaaggtgcagtatcgcatgttgggcgacggaaaaaatcggaggaagaactggcagacgaccagcgacaatatcccgtacggaaacgcgcacggatccgggcctggccaggggaacagtcactggcgggcgcggaaccgggacagggagtatgaaatgggcaatccgcccaagaacttcacctcctccgttacgggactgaccgccggcaagtactaccgcttccggatcgtggcggtgtactccaataacgacaacaaggagggcaacacctccctcaagttcttcctgcagaatggaacgtccaagtcgaatctgccagtgccggaactacgcgaggtggagacgctttccgagtcggccgtggtgctccattggtccctggtatcctcgactcaaaatgaggatatagacgggtactatgcctactataggccagcggactcagcagcggagtatttgaaggccacggtggatggcggaatgagcaggagcttcaagatagacctccttcgtccaggaaccccttatgagttcaaattgcaatcgttcaactccgacgcagcctctgaattcagtgctattcggcaagcgaggaccagaaaaacgcacgagcaaccggcttcatcttcggccacgccagtgccagccaataaggcagtggaacagcaccagaactccttatatccactgatcgcaggtgccgctggcggaggcatactactcctcatcgcctcattggtggtctgcctttgcctaaagagacgggaaaactctcagccggaggatgagaacaaaccgcaattggaacacattcaagcggactttgttacctccgccgtcctgggagttggtggccaccacaaaagtggcgatgtaaggcgcctcaacggagtgattccgaggatgaatattacgcccaatccgctggcccaggaaacggcatccgataagaaccgcaacgtgatggagctgcgtttcctgccgccgctggcgaatggaaatggaaatggcaactgcatggccagagatctagccctggagcggtcgaacgcggaagagcagcaggatgaggacggacacgaagatgaaaaggggctaccggcggttgcctcgtcctcctgcgaaacgctggaggcctgcgacgctgcaattaaactgaatctccctcagaaacacgaccaggagcagctggatgctccgaacgcggtgctggaggcgcccagcaagccgctacctccgctgcccaagaaaccagcaaacggcgctggccaaaacaactctggactgcatcagaatggccttcaccacgcacagccgtaccatccgcctggcacgcccactctgatgcacaagcgactggactaccaccagcagccgccgccggtgcctccgcactcggcctattaccaacaggcacccacgcaccagccgtcgccgatgatggagcgcagtgtcaggggtcaccagcagcccgggggctttcatatggaggagggcacacccacgccgaccaggataccatccctgcggcgacagcgacgcacctcgggcaaccagcaggtgcacaacagccacagcaatctcaatattggcctgagccaccacaacaacaacaacaacaacctgccgccgcaccaccagcatctgcaccaccaccccggccatccgggtggcctggtgggcatacccatcgtgccagggagccctagggtccagagatcgccgatgccgagcagggcgatgatcaagaggacgcgcctgggcagccacacggacaacatatcgtcgggcagtctgaacagtattgaggtgtgatggctcgcagaggaggcaactaactagtggactagtgggcggagcagcacaacgaggagaaatatacctaagcggcaagcgaaagtggttccccaaaaacagacagtttcaagtagacttaaggatccgaaactagatgtgtattattgagataatcgtaggacaggtcggcagagcagctcgaaaccctcgaatattagcttt

SEQ ID NO: 32505 - protein, 638 aa, DROSOPHILA
MVPPSRPNVTRLSDESVMLRWSVPQNSGLQITFFKVQYRMLGDGKNRRKNWQTTSDNIPYGNAHGSGPGQGNSHWRARNRDREYEMGNPPKNFTSSVTGLTAGKYYRFRIVAVYSNNDNKEGNTSLKFFLQNGTSKSNLPVPELREVETLSESAVVLHWSLVSSTQNEDIDGYYAYYRPADSAAEYLKATVDGGMSRSFKIDLLRPGTPYEFKLQSFNSDAASEFSAIRQARTRKTHEQPASSSATPVPANKAVEQHQNSLYPLIAGAAGGGILLLIASLVVCLCLKRRENSQPEDENKPQLEHIQADFVTSAVLGVGGHHKSGDVRRLNGVIPRMNITPNPLAQETASDKNRNVMELRFLPPLANGNGNGNCMARDLALERSNAEEQQDEDGHEDEKGLPAVASSSCETLEACDAAIKLNLPQKHDQEQLDAPNAVLEAPSKPLPPLPKKPANGAGQNNSGLHQNGLHHAQPYHPPGTPTLMHKRLDYHQQPPPVPPHSAYYQQAPTHQPSPMMERSVRGHQQPGGFHMEEGTPTPTRIPSLRRQRRTSGNQQVHNSHSNLNIGLSHHNNNNNNLPPHHQHLHHHPGHPGGLVGIPIVPGSPRVQRSPMPSRAMIKRTRLGSHTDNISSGSLNSIEV

SEQ ID NO: 32506 - DNA, 2258 bp, DROSOPHILA
tgtgctccaatgattagtctgtgctaatgaacaggcggcggctacctagcaaaaaaaaaaaaaaaaaaaaaaatacaacacaaaatgatgaagagagggcgaaggggaagttatccatgaagtccaagaccaacaaaaacaaatcccaaagacacaaaaacgccgaaaaaagagcgagtaaaagcgaggcaaagctgcaagaaagcggcaaacaaacagaaatcaaatccaatttatgttttcagcattaatcataatttcttgggggcccattttggtgtggcgtgaaataatttttatgcgccgtttttacggaacccaattcgaaatcgaaatcccaaggggaataggtgtcaatgtctaattttgtggcaaatgcactcggagcattctgttttcctcattatgactatgactatgaatgtgggctggatggaaactggatcagtggatcagtgctaatggggtgtgagaatcgatcgcggacgttttggccatgaaattcgagcgcacagaatgggaaatagtggccgagatcaattggaaatgcgtacagctatgagttaagctcttcatttgcggaatgaattcactcctctaactctaaatcgcatgcctgggtgggctgtacgattgatgcaattaagatgcttgcaagatcgagaccctttactgtcccatccaattatcccgttttatgctaagccatttcccattgattcattgcagcccgaatgattcaacagtgaaaaggacctggctagagccatgtttcagatcggtagctagccagactgactctagtctgctggagtggaccccacatcgaatagggccctgggtttcggggcgggggtttcgtttgctgggccacttgaaaagcaattttttgaaatttattttccatttatcgctttatttattttctaccttctttcagtgtggccctgtcgctttgctcccctcgtccacagttcacctggtctatctgcttatgcgattagagttgcagcaaaggagaccaggaagatgacgacgtggatggtacaagattgggattgggactgcgactgggaatgggaatgggaatgagaacgatgacgatgacggcgatgatggtgatgatgctgctcggtgtgtttatttttgtttggaccgagagacctttttgtttgtctgcattttcgacgacgaacaagacggagctaaggaactgtgtctcaatgggccacaatcgaaagtaataatgaaatcccatcaacaacgagacaaaggctctctgaccattccgattcccattcccctttggccttccatcccttttttggcctgcagaatgagacgacgacacttggcttgatttttattgttgggcttttcccccggccctttgatttattgttagcgggaacgggctggaaaatgggaatgctctccggtttcaggtttggcattggtattggttttagttttggttttggccaagtgtccggttccctgaatgcatctatgtatctctatctctcttctcccagatgatcttgttctgcgaccagctgcctgttgcattccgctcgctcacctcttgccaatggcaacagaaatgtgcgtgcttaagctacaggtggacttggcaaacgacggactgtggagactgtagaaactggtggttatgttccgcgcatacaacaacaaaaaaaaaacaaaaaaaaactcttgagaaaagttaagttctgcaaagaattataataattgtttcacatattggtctaaggatctccacattacggagggcccactgtagttgtgcaacctctcccgatcccccatcccattcccaacttggggttctattctggtgcacggcacatagacagttcattaatgttatcaacgagcaaaaaggggaatgaaggatggtcttgggacccctgccacctcggatgacaggtttggttgtgcacttttctggtttatgtacgcgctggatttgatgtgcaacacttgttgttattttgtgattttgttgggggcccgctgacacataagagtaacggcaattggcaattggccattggccatcgcctgttggccaaaaaaggacatggccacatgaccatcgcgaaaaacttgtcaactggaatcgatcgatatggcagtggtaattccggggaagggggtttctctgatttaccgacatttacggactgcactgaccagatgaactactttcgagacactggccactggccattggc

SEQ ID NO: 32507 - DNA, 258 bp, DROSOPHILA
atgggatttcattattactttcgattgtggcccattgagacacagttccttagctccgtcttgttcgtcgtcgaaaatgcagacaaacaaaaaggtctctcggtccaaacaaaaataaacacaccgagcagcatcatcaccatcatcgccgtcatcgtcatcgttctcattcccattcccattcccagtcgcagtcccaatcccaatcttgtaccatccacgtcgtcatcttcctggtctcctttgctgcaactctaa

SEQ ID NO: 32508 - protein, 85 aa, DROSOPHILA
MGFHYYFRLWPIETQFLSSVLFVVENADKQKGLSVQTKINTPSSIITIIAVIVIVLIPIPIPSRSPNPNLVPSTSSSSWSPLLQL

SEQ ID NO: 32509 - DNA, 4850 bp, DROSOPHILA
gtattaactaacgtgggaagaagagctgagcaaaagaaaagttttttctggggcaaggaaaagcatcgaacatcgatttcgtggccagatatgatctttcttgaggggatcaggggcgtgggtacgtcgaaatggggcggtggcctggctaaaagaggcggggctgtattgtgtgcgtgtggcacatgttgaacatgcggggcaagtgctttttatcagcacaggcaacaataaatatgacgtagcacgcgtttttcctgacacttccactcaacagaagaataggtgggtaggtgggggaagtaagacataataagagtttgggaaaatagagccagaaccgattaccgaaaagaaagagaagaggaattgacacttgaaatcaatgctcaattaaaaagtcgaccgaaatagatcggaagtgggtgaaaaccaggaagggggggtttgtacttagttgttttagaaaaggctttgtaaaaacaacagctctaagtcttaaacttgataatactttcgctgacttgttgagatctaagtgctaagaacaaaagttttgattttttaagatcaaaaaacttcgataaaataattactaaagataaaataacatttttcaagcccacatggatgtttggactaacagtactgttatattttgtaactgtggtgaaaccttagccgagacacaattgctctcaaaccttagcagtcacttacattgcttagcatggacaacaacccaaagacaaagtttctttgcaacatctagaaaataattaagaaaagctgcaccaaaacggcagtgggaagggaaaatgaaggaaactgtgcagctttaataagaaataagtgcacggtattaatagggtataatatttaaatgtttgatttaattgaatttgttgtacatatatccactcacggctattgaactaatatgattcaatcgtatctgccattttagcaaatctcaaatcttggcgatgaccaagattttatgctggcagatgatgagtcgctgcagggcatcaacgattccgagtggcagctcatgggtgatgacattgacgacggcctactggacgatgtcgatgagacactgaagcccatggagaccaagtccgaggaggaagacttgcccactggcaactggttcagccagagtgtccatcgcgttcgccgttccataaaccgtttatttggttccgacgacaatcaggaacggggacgacgacaacagcgtgagcggtcgcaaaggaatcgcgatgcgattaatcggcaaaaagaactgcgccgcagacaaaaggaggaccacaaccgctggaagcaaatgcgaatggagcgacaactggagaaacagcgcttggtcaaacggaccaatcatgttgtcttcaaccgcgccaccgatcctcgcaagcgggcatcggacctttacgacgagaacgaggcatccggctatcacgaggaggatacaactctctgtaagcgtaatctatatgatatttgatcatatttgataatgaaaactgtgtttattctctttcgattagatcgtacctacttcgtcgttaacgaaccttatgacaacgaatacagagatcgagaaagcgtacagttccagaacctgcaaaaacttctggacgatgatctgcgcaacttcttccacagcaactacgaaggtaacgatgacgaggagcaggaaattcgcagcacactggagcgcgttgagtgagtgcaagcacatgtcctcgaagctcgttcgatattgcttatgctaatcaaatcgattatctttcagacccactaatgataacttcaaaattcgcgtgcaactcagaatagagctgcccacttcggtcaacgactttggaagtaagttgcagcagcaactgaatgtctataatcgtatcgaaaacttgagcgccgctaccgatggcgtattttccttcactgaatctagtggtaagttcctataaatccatagctatattcttcagcgactttctacgacgtagctttggtgtagcttgtagcagcttgtagcaaccttaactttcaaattcccggagtagcggatgcaaattggtgaagcccactttaggtgcaacaagaattatctggcagatacattgtacgtttcgatatatatattttgattgtttcgggcttcaaacgtactgcttagcataattcttctatccgtttgcatcccactccgtcaatacaaatcacgatacccaaattctttctctactcgaaaacccttgaaaatcaatcaatgttcaaacccaaaagtgacagaagaatcagttcgacatttggatgtgggctttgtggaaccgcatattactctcttccatgagcaaaatacaggatacgatgattttgacagaaaaccaaccaccgaaacccaaggtttgtccacacaccgatggataacgataaaccgaaaattacgagattgccccatgtgtgattaacccggcaaagctcgcagcgcgaaaataatttttaatatttgctaacacgagtgtgggtctgctctggtttttttgttcaaagtatttcctagaattaggcatgtagccttgtgaagaacacaaattttggttctcctctgcggttatatgttgagaaaaattgcaaaaatttcaataatttcgttaatatgagttgagtttaaagtgacatccggagtggacctctacgtaattgtgctttgaatggtgacctgtttgtgtatgtgtgacctctatgtgatctcttgacctccgtgaacgtccctcatcatcaatagttgtgccgcttcatgccatccgctccattcgctctatttccatttctgtgatctctgtccgaaatcctgtatttatgtcttgggaaaaaaaaaacggagaaaccagaacttcaatgtccaatagctaatccactttgtgacctcacagatatcgaggaagaggcaatcgatgttacattgccccaggaagaggttgagggctctggtagcgatgactccagctgtcgtggagacgccaccttcacctgtccccggagcggaaaaaccatttgcgatgaaatgcgctgcgatagagagatccaatgtcccgatggcgaggacgaagagtactgcaactatccaaatggtaaatgtcgcgggagtttaataacagatcataacgaaaggtctttcaactcatcatcgatcgtttggcattgttcgatccgcacatctccatactaaaaaaaaaccattccaaagggggctcatcaaatagcttaatgtttcttctaattcttaacgtctttacgtcaatggagctgcaaaacagtggatacatatacaatagaaaactctttatttagagattttctgatatgattttctgtatattttcgaggatctgcaaaataaatatatgtagattcaagtcgttcccgttttgcagctctatgcatgacaacttttcactctagaacttagttttcgttcacttacatttgatttggctttttatattgttttcattcaattttgattttatttcgcatctcattttaatttttttgtcgcgcctcagtttgcactgaagatcagttcaagtgcgacgataagtgtctggagctcaaaaaacgctgcgatggaagtatcgattgtctggatcagaccgacgaggctggctgcattaatgcgccagaaccagaaccagagcctgaaccagagccagagcctgaaccggaatctgaaccagaggccgaacccgaacccgaacctgagcctgagcctgagtctgaaccagaacaagaacctgaaccccaagtcccggaagccaatggtaagttctattgattattttgcgtcattttgtttgattgattcttgattttcttgtatgtgatattattttgtacctttgggttcgggctgatacaacatatagttgttgttgatttttgatagtttgctgcatgggaactcttttgggatttgggatctctgttcgttcgcattcgcctaatttgggtgatctcatgatctcgacgctcgttcagtagttcgcaaccagaactatgctctttgtaatgggccaaataaattccgcatattaattggcccgataatcaaatatttccaccgagtgccactcatgccggccagttcatttcgttctttgtaatatcttttgtattttatttatggacttttgctcattgctgtattctttcaacttgaataaagttcctttttcgcgggcaggcaattgggttaaatatttgattttctaatggatttcgaatgcatcggaattttttttttggtatccattaggcggcgtctttgggcacgtaatcgaatacgctccaatccggttaatgtacattttgggcatttgggccaaatgagtaaagaggcagtaaatttcgataatttagtataatgcaaaactgtttctgcaattcactggatctttttctgagtttcgagttttgcatgagttattcatcgcagcgataagttaagcaagttaagttagcacttttagaaacctactgctgctacttgaaattttgaccctgaacactttgtatccgcttaccaacttcattccgcttccttggccatccaagcaacctcatgctgtgcacattgcagcgcaaatcaaaaaacataaatgtaaatagcagcggagacaaaaaggcgaaacaagcgttttaccaaaaagtgaaattacaaaccaacttctcacccccaacgcaacgcaaccagccagcacgaaccgcaattgtagcaagccaaaaaaccagattacaatatccatgaaatatgccacaaaagtcgggagaaaaaa

SEQ ID NO: 32510 - DNA, 1254 bp, DROSOPHILA
atgctggcagatgatgagtcgctgcagggcatcaacgattccgagtggcagctcatgggtgatgacattgacgacggcctactggacgatgtcgatgagacactgaagcccatggagaccaagtccgaggaggaagacttgcccactggcaactggttcagccagagtgtccatcgcgttcgccgttccataaaccgtttatttggttccgacgacaatcaggaacggggacgacgacaacagcgtgagcggtcgcaaaggaatcgcgatgcgattaatcggcaaaaagaactgcgccgcagacaaaaggaggaccacaaccgctggaagcaaatgcgaatggagcgacaactggagaaacagcgcttggtcaaacggaccaatcatgttgtcttcaaccgcgccaccgatcctcgcaagcgggcatcggacctttacgacgagaacgaggcatccggctatcacgaggaggatacaactctctatcgtacctacttcgtcgttaacgaaccttatgacaacgaatacagagatcgagaaagcgtacagttccagaacctgcaaaaacttctggacgatgatctgcgcaacttcttccacagcaactacgaaggtaacgatgacgaggagcaggaaattcgcagcacactggagcgcgttgaaatagagctgcccacttcggtcaacgactttggaagtaagttgcagcagcaactgaatgtctataatcgtatcgaaaacttgagcgccgctaccgatggcgtattttccttcactgaatctagtgatatcgaggaagaggcaatcgatgttacattgccccaggaagaggttgagggctctggtagcgatgactccagctgtcgtggagacgccaccttcacctgtccccggagcggaaaaaccatttgcgatgaaatgcgctgcgatagagagatccaatgtcccgatggcgaggacgaagagtactgcaactatccaaatgtttgcactgaagatcagttcaagtgcgacgataagtgtctggagctcaaaaaacgctgcgatggaagtatcgattgtctggatcagaccgacgaggctggctgcattaatgcgccagaaccagaaccagagcctgaaccagagccagagcctgaaccggaatctgaaccagaggccgaacccgaacccgaacctgagcctgagcctgagtctgaaccagaacaagaacctgaaccccaagtcccggaagccaatggtaagttctattga

SEQ ID NO: 32511 - protein, 417 aa, DROSOPHILA
MLADDESLQGINDSEWQLMGDDIDDGLLDDVDETLKPMETKSEEEDLPTGNWFSQSVHRVRRSINRLFGSDDNQERGRRQQRERSQRNRDAINRQKELRRRQKEDHNRWKQMRMERQLEKQRLVKRTNHVVFNRATDPRKRASDLYDENEASGYHEEDTTLYRTYFVVNEPYDNEYRDRESVQFQNLQKLLDDDLRNFFHSNYEGNDDEEQEIRSTLERVEIELPTSVNDFGSKLQQQLNVYNRIENLSAATDGVFSFTESSDIEEEAIDVTLPQEEVEGSGSDDSSCRGDATFTCPRSGKTICDEMRCDREIQCPDGEDEEYCNYPNVCTEDQFKCDDKCLELKKRCDGSIDCLDQTDEAGCINAPEPEPEPEPEPEPEPESEPEAEPEPEPEPEPESEPEQEPEPQVPEANGKFY

SEQ ID NO: 32512 - DNA, 5453 bp, DROSOPHILA
gataaaagcattacattttcgagtctgcacgatcgtatcatcagttgtttgcaggaccttgagttcttcatacaaagttttagctgctcatttttaatctgttccttgtgcagagattacacttctccgaaaagagccgacacgtaaattggaaaagggttagtgcaactgttgttgcaattacaattcatcacatagcccgtagttcctcttcctgctgcacagaaagaaattggtatgtggcgatcgttgcaatgccatgcaattcaatgcccaattcaaaaatatttgaaatgtgtaaacaactcacttgttttcttttctgcgtgcatgtggtgctcctggccatttgccatttcgccaggcataatcccgacaatcggtgcgatgtgggtgatacgagtgcgaatgcgaatgcgaatgccaatgatatgtgtattgtatgtatgtgcatacatatggcgtcgtagcgtgtgggcgtgatgtttgcactccggtgcagcgggactataaataagccgggtatttattaggggcaatcataaactgcgttaacgacgggcactctgccaacgagaataagatccggtaaacaaaggcaccggtcgacgtacgtctcattgtgcgataagctttcaattaaatctgacccggataacggggcgcatgggtgcgggaaatcggaaatcggaaacgaaaacgaaaacggaagcggaaatcgaaatcgaaatggaaagagatcaattttcaattgcagccaatgcatgcatgtccatgggtccaatgctaatatcgaaagacaaagctccgtgttctggaggtcgtgttcgccatgcagactcattggttggttgggtttaactcgtacaaagtttgatgggtttgggattgttttttttttttttttagaacgatataactcgatataatgctggtgcgtaaataacaacgatgttcattgttcgctttgcagcacatttactatgcggtcgatggcaaaatgaccctcctgtcgaacattctcgactgcggaggctgtatttccgcccagcgcttcacccgcctgctgcgccagtccggctcatcaggaccatccccatctgcaccgacggccggaacatttgaatcaaaatccatgctggagccaacatcctcgcacagcctggcgaccggacgcgtgccactactgcacgatttcgatgcctcgacaacggaatcgccgggaacgtatgtcctcgacggtgtcgccagggtggcccaattggccctggagcccaccgtcatggacgcactgcccgattcggacacggaacaggttctcggtaatctcaacagcagcgcgccctggaatctaacgcttgcgtcggcagcggccaccaatttcgagaactgctcggcgctttttgtcaattacaccctaccacaaacaggtacctaaagcctaataacttttaaatcatattgcagtatttttttttttttttttgttgccgggataggactctactgcaattggacctgggacacattgctctgctggccacccactccggctggagtccttgcacggatgaattgtcctggcggctttcatggcgtagatacgcgcagtaagtaactgaaatacactctaaaaaaaaagcagccgaaaaagaacatgctgagtacaattagcataattaatcgttgaagctgtttagctgtttagcagccacaagaagctttatgacttctgccggcttattaggagtcaaaagacatgtcctacggtgtttatcccatccacacggcatatctggcggtcacaatcatacggatcattagctgggaaacggttcaagtggtgcacggcaaacaattacttgattccgtattcatcgaaaggatgtcaatatttacatgcatgactgggggcgtccaatcaaccgcactcccagtcggggccgcccctccttggcttccatcgccgggggctgtccaggtgtttcatgtgcaccctcgagctccgccagttgaacagggtttaaaacaccagccaatcgattgcttaattacgatcctaaatgcttgctctacccctccgataaattaaacgttctgcaatggggaattgctatttaataaccatgggcgatatacactgagcgaaaagattctaagtagctgacttaccacccaatattttacaaacttaaaatgctcttccattatcactagtgaatgtattatctgcgcttgtggtgcaaaatctaggcatatcgaactatatctgttaagaaataattattcgagtgcattgttgagctacggcctcatttctccgggccgtgtctagatttttagccccaatattttcaactggacgaggtcggtcgcccattcgattggcataattgcacttgtcagtcagtgtgtcaaagctcgattactgtcattaatccaacccaacctccctctttttcggttcgcagaattcgccatccgaaagtgtgagctggatggtcgatggggcagcaggccaaatgccacggaggtgaatccgccgggatggacggactacgggccgtgttacaagccggagattatccgtctcatgcagcagatgggcagcaaggacttcgatgtgagttgaattctttccacactacatcataatacctgtttcagttatagttaagagcattgcttaaatgccaaccaaaatcccaaatcaagggtatggttttgaaattacctaatagggttccaagttttttagacaccctaaaaagtgatttcaaaggcctgattacatttgttgatagtggtttatagtagtagttttaattccatttcttccaactggtttgcgatatcccttaggcctacatagacattgccaggaggactcgaaccctggagatcgtgggcctctgcctctccctgttcgcccttatagtttccctgctgatcttctgcacatttcgctcgctgcgaaacaatcgcaccaagatccacaagaatcttttcgtcgccatggtgctgcaggtgatcattcgcctgaccttgtatctcgaccaattccggcggggaaacaaggaggcggccaccaacacgagtctctctgtcattgagaacacggtaggcttaatattcccgcataaggataaggtataaggcttatgttcgatattatatgttatgttctacagccctatttgtgcgaagcatcctatgtacttctggagtacgctcgtaccgccatgttcatgtggatgttcatcgagggcctttacctgcacaacatggtcaccgtggccgttttccagggcagctttcccctcaagttcttctcgcgactcggctggtgtgtgcccattctgatgaccaccgtgtgggcgagatgcacggtcatgtatatggacacctcgctgggcgaatgcttgtggaactataatctcacgccctactactggatcctcgaggggccacgactagcggtcatactggtgggtaatatcaactgttgatcgctttaatcacctattcacccaactgaaaacatccgcatgcagctaaacttctgtttcctggtgaacattatccgagtgctggtaatgaagctgcgtcaatcgcaggccagcgatatagaacagactcgcaaggcagttagagcggctatagtcctactaccacttttgggtataaccaatctcctgcaccagctggctcctctgaaaacggccacgaacttcgcggtctggtcgtatggcacccactttctcacctcgtttcagggattttttatagcgctaatttactgctttctaaatggcgaggtaagacatcaagtcactcagttgtccatttgcctaaaaccctcactatttccaaccaaaatatatattttttaggttcgtgccgtgctactaaagagtctggccacccagctgtcggtgcgaggtcatccggaatgggcgccgaaaagggcatctatgtactcgggtgcttataacacggcgccggatacggatgcagtgcagcctgcaggagatccatcggccactggaaagcggtaagcatccgctttgtgcacaccccaccttgaaactccttacatcaatttaaaactcccagaatatcaccgccgaataaaaggctgaatggaagaaagccgagcagtgccagcattgtgatgattcacgagcctcaacagcgccagcgactgatgccccggctgcaaaacaaggcgcgggaaaagggcaaggaccgggtggagaagacggatgcggaagcggagccggatccgaccatctcccacattcacagcaaggaggcgggcagcgcgagatcgcgaactcgcggctccaagtggataatgggcatctgcttccggggtcaaaaggtactaagagtaccgtcagcgtcatccgtgccacccgagtcagttgtatttgagttgtcagagcagtagaccaaaacctagcctaactaatagatgtagccatagccgtagccaaatagccgtagaagtagccaacgccatgtagcccaccaccacagtagccagcacccacacaatcggaccggaaatgatcccaaagataacccagaacccgactattcctgcatctcccatcgacccaccaagcaagccagctggaaacagcacatatgtaaaataccccaacaaaatatcgcagttcttatacccaagatcattttgaacagaaagtaagctcattgttttgtaattcaaattaaaccaatagacatttaatttaaatagttattttcgcttgccttcggttcttgctccactgtacttatgtaaatacatacatacctttatttgtgtaagccatatccaaaccctttccaaaatctagaaatctcctatcctttcgaaatcggctaatcctacgaaaattcaaatttccctacaagttttacaaaatatttttgatgacaataaatttccaatagcgtcaccttctgttctggacacgcaaatacattcaaaaacactcgcacacggttcttactcgatgaatttttcagcaaaacttcagcggcatgttcttttacttctactattcatatttaaatattagattgaaatatttaagtgaattaacacaaacttgcggtaactgcgcagtgtggccaggctttgtgagccattagaacttattacataacataattgaaaagtgacattgtttaaaggaactcacctttaatcaactgttgaacttgctgttcatcggattccgttattaagttttaagatttgggtttacttgtatttacattttctttaccactttgattagcttacactttccgttcctgagctggtcacactgccagctacaatcgatcacgttcactgcaactgccttgaattttgctagctgcgctttgttgtgcaacaaaaactttgccacaatcgatatttaactaatggggtc

SEQ ID NO: 32513 - DNA, 1902 bp, DROSOPHILA
atgaccctcctgtcgaacattctcgactgcggaggctgtatttccgcccagcgcttcacccgcctgctgcgccagtccggctcatcaggaccatccccatctgcaccgacggccggaacatttgaatcaaaatccatgctggagccaacatcctcgcacagcctggcgaccggacgcgtgccactactgcacgatttcgatgcctcgacaacggaatcgccgggaacgtatgtcctcgacggtgtcgccagggtggcccaattggccctggagcccaccgtcatggacgcactgcccgattcggacacggaacaggttctcggactctactgcaattggacctgggacacattgctctgctggccacccactccggctggagtccttgcacggatgaattgtcctggcggctttcatggcgtagatacgcgcaaattcgccatccgaaagtgtgagctggatggtcgatggggcagcaggccaaatgccacggaggtgaatccgccgggatggacggactacgggccgtgttacaagccggagattatccgtctcatgcagcagatgggcagcaaggacttcgatgcctacatagacattgccaggaggactcgaaccctggagatcgtgggcctctgcctctccctgttcgcccttatagtttccctgctgatcttctgcacatttcgctcgctgcgaaacaatcgcaccaagatccacaagaatcttttcgtcgccatggtgctgcaggtgatcattcgcctgaccttgtatctcgaccaattccggcggggaaacaaggaggcggccaccaacacgagtctctctgtcattgagaacacgccctatttgtgcgaagcatcctatgtacttctggagtacgctcgtaccgccatgttcatgtggatgttcatcgagggcctttacctgcacaacatggtcaccgtggccgttttccagggcagctttcccctcaagttcttctcgcgactcggctggtgtgtgcccattctgatgaccaccgtgtgggcgagatgcacggtcatgtatatggacacctcgctgggcgaatgcttgtggaactataatctcacgccctactactggatcctcgaggggccacgactagcggtcatactgctaaacttctgtttcctggtgaacattatccgagtgctggtaatgaagctgcgtcaatcgcaggccagcgatatagaacagactcgcaaggcagttagagcggctatagtcctactaccacttttgggtataaccaatctcctgcaccagctggctcctctgaaaacggccacgaacttcgcggtctggtcgtatggcacccactttctcacctcgtttcagggattttttatagcgctaatttactgctttctaaatggcgaggttcgtgccgtgctactaaagagtctggccacccagctgtcggtgcgaggtcatccggaatgggcgccgaaaagggcatctatgtactcgggtgcttataacacggcgccggatacggatgcagtgcagcctgcaggagatccatcggccactggaaagcgaatatcaccgccgaataaaaggctgaatggaagaaagccgagcagtgccagcattgtgatgattcacgagcctcaacagcgccagcgactgatgccccggctgcaaaacaaggcgcgggaaaagggcaaggaccgggtggagaagacggatgcggaagcggagccggatccgaccatctcccacattcacagcaaggaggcgggcagcgcgagatcgcgaactcgcggctccaagtggataatgggcatctgcttccggggtcaaaaggtactaagagtaccgtcagcgtcatccgtgccacccgagtcagttgtatttgagttgtcagagcagtag

SEQ ID NO: 32514 - protein, 633 aa, DROSOPHILA
MTLLSNILDCGGCISAQRFTRLLRQSGSSGPSPSAPTAGTFESKSMLEPTSSHSLATGRVPLLHDFDASTTESPGTYVLDGVARVAQLALEPTVMDALPDSDTEQVLGLYCNWTWDTLLCWPPTPAGVLARMNCPGGFHGVDTRKFAIRKCELDGRWGSRPNATEVNPPGWTDYGPCYKPEIIRLMQQMGSKDFDAYIDIARRTRTLEIVGLCLSLFALIVSLLIFCTFRSLRNNRTKIHKNLFVAMVLQVIIRLTLYLDQFRRGNKEAATNTSLSVIENTPYLCEASYVLLEYARTAMFMWMFIEGLYLHNMVTVAVFQGSFPLKFFSRLGWCVPILMTTVWARCTVMYMDTSLGECLWNYNLTPYYWILEGPRLAVILLNFCFLVNIIRVLVMKLRQSQASDIEQTRKAVRAAIVLLPLLGITNLLHQLAPLKTATNFAVWSYGTHFLTSFQGFFIALIYCFLNGEVRAVLLKSLATQLSVRGHPEWAPKRASMYSGAYNTAPDTDAVQPAGDPSATGKRISPPNKRLNGRKPSSASIVMIHEPQQRQRLMPRLQNKAREKGKDRVEKTDAEAEPDPTISHIHSKEAGSARSRTRGSKWIMGICFRGQKVLRVPSASSVPPESVVFELSEQ

SEQ ID NO: 32515 - DNA, 2687 bp, DROSOPHILA
acaagtcacgagcaggcggcaatcgctcccattgctccagtgtgcgtatgttgcgtatacgcatggctgtcactcgaaggatacgagctccccgctccctgtccatactttaatttcaacccatcccagaggatagcatttttctcatgcttcggcaatgaggcaaacacgagggcgtacacgcagcgaaaatttgaagtcaattggagtggtttgacctacaaataacgtgtgaaatactattgaaacccaaaggtttttagagctacacttacgtggaatgcgaagtaatttcaattttcattggtttgcagttagaagtctaacttggtctgagtattttctcgatgtgtattaacgggatgctgtcgctggcgcttcgcttggtcggctgctccagctgctccagtcgcatttcgcatctgaaagcgcccgcaagtaggttacacattttttcgtcgagcaaaacaaacagcgcacctctgcccgccgtccagctcatccgatcccgatcccattggccacagacgaactgagtaagtggaactaactaacaaaatccagcaccgaaatcggttggccacggatgacaccgctttggtcgcggtgcctgggattaggtgggctattctcgcagggggggtggcattcgttgggggtgtgtcattggggcaacacaaagaatagtgaaagtgcagtgggagcgagcgagaggcaagaggtcgagagttgaaaggacaggcagagagttgcgactaattgagttataggaaaagagtacccacatgtatgtacctagacttttgcaaacgaaaattaaaattaaaaaaattaatagtgcttaaatgtacggttgtaatgtaatgcgtacttaccattcgaatttagtttatattttaaatcatcgagatctattagtaataatattattaataagctcctcccatagatcttctttaccatccgcagacaattcggcgattgcagcggctgtgacaccatggagtacaagatgattgcaccggagcacagtgaacaggtgatggagcatctgcggcgcaacttctttgccgacgagccgctaaacaaggccgccggcttgtgccagaacggcagcagttgccccgccctggaggcgcactgtgccgaggccatacagcaccggatgagcgtgatggctgtggacgcaaaggagaaggataccttgaaaatagtcggcgtcgtcctcaatggcatcctgaagccgggcgacacggccaaggcgctgagcaagctggactgcaacgacgatgcagatttccgcaagattttcgacttgctgcacaggcacaatctcaagcacaatctcttcgagcacttcgacgtggactgcatgttcgatgtgcgcatcctatcggtggactcgtgctaccgtggccaggggattgcgaatgagctggtcaagcggtccgtggcggtggccaaaaagaatggctttcgcctgctgaaggccgatgccaccggcatcttctcgcagaagatctttcgttcccatggctttgaggtcttctcggagcaaccctacagcaagtatacggatgagaatggcaaggtgatcttgcccgtggaggcgccccacatcaaattgcagcagctctacaaggcgatctgcgcggatgaccaggatgagaagaagcagtcgctttaaggagtcacccggctggctcacatttggaacaataatctcatttattttctacatatacatacattgcataatcgttattggaatgttttcgtactacaaatatggaaattagttggggggcgtttaacggaaagttaaagctagggaacaattactattgttctgtgtttaaacataactatgaaataacattggattttcggactttccgtcgacggtttttggagcgtcaatggaacgcctctataatgtacgagtagacgctgcctggcacgtttacataaatataattttgtaattgtttttttttgtatggggaccaactgctaacaatacctaaataaagtacactgttgtgccaaagttaaccagacagctttttctcttacctcccactcgaagtccccccctacaaggtctcctcctaaagtcctaatatcacaagcgcagattccaatcatccgttctcatcacctggcaacctggcgacggcaggtacttctgttcatctgttcatcaattcatctgttcatttgttcatctgttccgctggtttatccatctactactccctagtttccttcttctcgtatatgaaaatgatgtcctcgtccgtgccgtaggcgcgtcgggccgtgtccatggactcgatgaggcagcgacaaatgtctgtggaacgcagccaaaaacgaaaatcaatgaattttcaaggattgctaccaaatggaatactcacggccatcgtggacctcgggattgtggtagaagagcttctgggcggccatgtcatatccgcagagcaccacatagtgtccggcataccttttgggtccatggaggcgtgtattttgagcaatgcagggtatatgaaaacagcttttcattcgagtgtggatttaaggtggttttttgtgaatcgccggtggcaagaggaactcacccgaacttctctaggacattgcgcttgcacacctcgcacgtgagcagcgaggcgttggtc

SEQ ID NO: 32516 - DNA, 618 bp, DROSOPHILA
atggagtacaagatgattgcaccggagcacagtgaacagaacggcagcagttgccccgccctggaggcgcactgtgccgaggccatacagcaccggatgagcgtgatggctgtggacgcaaaggagaaggataccttgaaaatagtcggcgtcgtcctcaatggcatcctgaagccgggcgacacggccaaggcgctgagcaagctggactgcaacgacgatgcagatttccgcaagattttcgacttgctgcacaggcacaatctcaagcacaatctcttcgagcacttcgacgtggactgcatgttcgatgtgcgcatcctatcggtggactcgtgctaccgtggccaggggattgcgaatgagctggtcaagcggtccgtggcggtggccaaaaagaatggctttcgcctgctgaaggccgatgccaccggcatcttctcgcagaagatctttcgttcccatggctttgaggtcttctcggagcaaccctacagcaagtatacggatgagaatggcaaggtgatcttgcccgtggaggcgccccacatcaaattgcagcagctctacaaggcgatctgcgcggatgaccaggatgagaagaagcagtcgctttaa

SEQ ID NO: 32517 - protein, 205 aa, DROSOPHILA
MEYKMIAPEHSEQNGSSCPALEAHCAEAIQHRMSVMAVDAKEKDTLKIVGVVLNGILKPGDTAKALSKLDCNDDADFRKIFDLLHRHNLKHNLFEHFDVDCMFDVRILSVDSCYRGQGIANELVKRSVAVAKKNGFRLLKADATGIFSQKIFRSHGFEVFSEQPYSKYTDENGKVILPVEAPHIKLQQLYKAICADDQDEKKQSL

SEQ ID NO: 32518 - DNA, 3856 bp, DROSOPHILA
gcatgcccacctggtagcgcatcagcagatagcacaggtcgatggtccaggtgctcgagccaaatccctcctcgccgcacacggcatcaaagttcccaagaagctgttccctttgctgcgccgacaggatcataatgatgcaggacagaccgcagtcccagttgtagcgctgctggtagtgcgtcaggttgtagtgcttgctcggcggcagtccgttcattctggccagcagctgggctcttcttggcttcttgtgctcctcgggtcctcgagtccttggctccgtgtgcttcgcgtgctcctgtgcccgcggctgcgctcctttgatcctggcgtccaattggaaactgaactgggaatgttttggtctaacagcttgggccagtgtggccaggtgcagctgtctgcggaatgccaactgtcggctatgtccagttgaaaaaaatgccaattgaatttttttagatatatattgtaaatattgtaattaaataatatttatacataaattgtgagtcgccaaaggagttagatgtattttcctacaaatcttggttgctgctaggaaatttttggtttgaaatcttaaaggcgcaaaaaatgttctaacactatgtaaatccttcttaagcccttcaaaattgacagttcagttagaattacctgcaattttaagactaaataactactggcaattggtataaatttaaatgcaactgtacgcgaaacttcaaacatgtatgaaacgatctggcaacgtcgagctaactgcatgcaatttggcatcgatgtgcccgatgcactccccctgatagtttcagcgggaaactaagagtcccattctagaatcatcccccaaggacgaaaacatcccaaatctccctaaaaaaaaaaacaaaaagcaaggaatcgagtaaacacgttccaccaccgctgtggcaatccgtggctggtgcgcaacggccacactgacgcgctgaccaatttttagttattagtgtgaccttaagcattattattttcacgtgtggcacgcaaacgagccaaaaaaccaagcgcctatttaaacaaacaaatcacacgcccagcagagagagcagccggtgaccaccggtaacgggagtagctgcagttaatccgacaggcccaacaaattcgcccgctaattggcggcgtttctctagtcggaacaacaagaagaagaagcacgtgtgcggcgtgccaaagaaaaaaggaaaataaacaaggaggccaggccaaggagcataagcagaatccgcatccggaggacatggtgcccatcggagccgtgcacggcggccatcccggcgtagtgcatccgccacagcaaccactgcccacggcgcccagcggcccaaactcgctgcagccgaactcggtgggccagccgggggccaccacctcctcgaacagcagcgcctccaacaagagctcgctatccgtcaagcccaactacacgctcaagttcacgctggccgggcacaccaaggcggtgtcggcggtcaagttcagtccgaatggcgagtggctggccagctcctgtaagtacatacatccctatccacgaatatctgggggggaattttatggtactgaactgctattggactgaacaggcagctttggcagctcagttaatgggaattgggatgaaataagatctcggaaaagagaagaagcatttatagaatacatattgtacattccatacatacagcacatgcctattaaacttccacttctaaccctcagccgctgataaactaatcaaaatctggggagcatacgatggcaagttcgagaagaccatttcgggccacaagctgggcatcagcgatgtggcctggagctcagactcgcgactcctcgtgagcggcagtgatgacaagacgctcaaggtctgggagctgagcaccgggaagagcttgaaaactctgaagggccacagcaactatgtgttctgctgcaactttaatccgcagtccaatctgatcgtctccggcagcttcgacgagagcgttcgcatatgggatgtgcgcaccggcaagtgtctgaagactctacccgcccattccgatcccgtttcggcggtacatttcaatcgcgacggatcgctgatcgtgagcagcagctacgacggcctctgtcgcatatgggacacggccagtggacagtgcttgaaaaccctgatcgacgacgacaatccgcccgtcagctttgtaaagttctcgcccaatggcaagtacattttggccgccacgctggataatacgctcaagttgtgggactactcgaagggcaagtgcctgaagacgtatacgggtcacaagaatgagaagtactgcatattcgccaacttctcggtgacgggaggaaaggtgagttcatatcttatgcacatttaggctttaactcacaagcgtccattgtagtggatcgtgagtggcagcgaggacaacatggtctacatttggaatctgcagagcaaggaggtggtgcaaaagctgcagggacacaccgataccgttctgtgcaccgcctgccatcccacggagaacatcattgcttccgcggcgctcgagaacgacaagaccatcaagctgtggaagtcggatacatagagtggctggtatccagctggaggacgttcgatcggaacacacacatacatttcttggataatattattttaaagcgaacagcctaatcgtaattgtaacacccccacacccccccaccacgagcccccttttttttttgtacgcataatttaaaaaagaaaaggaactctaaaattctacgtttaaatcacactttaaacctcacattctacggcaaaacggaaaaattacaaacaaacaaacaaaaacaaaaaaaaaaaacaacaaaaagtgaaaacaaaaaaaacgattaatgtataaatatttattagcctattgtattggcccaccatgcaagcgagaatattcccccaaaattgtttgtaacctttgacacagccacgcaaaccaacataacttataatgatctttcggtgacgagaaaactaaatttaagcgtaaaagatacaacaggtgctcggggcagaatcccagcgccagaaagaatatatataaaatacgaaatgtaaattttgaataaaagaaaacaccgtctcggcggcgcccaagtgtcctttcaacttgcgcgcttttcgaggcgagacacttaaatgtacaaattgcattttattcacataataagagaagttttaattctaaaaaaacatacagtttagcaaaattacgaaacaaacgaaccttcattacggtttaaaagcgataataagtacgtttaatatattacggtttttaaatgaatgaacacaggtataatacttaacgtagacgttttctttaagttatttatttttaaactctagcgcctattggagtgcgaccctgcgttgagttcggttgaagagggccacactgcccgttcagtttgaacgtttgccactggatttcgacaacggcgcgcgacggtcacttggcgaaacgaaaatcgaaaaaaccgacgaatcgaaactcggagatcacggattcgattcacttgattcagaaccttgccgaatccgaatgcccctgcgatgcgcgcgccaacccgctgaacaaaagtcgccaagtgaattttgcaattaatttgcaaatcaatatcgctccgccgccgtcgcgcacacacacacacacgcaagcacccgcaccgcgcacacatacacacacacacacacacatagggaccgcgacacgcatagtgagaaagaagtggcaatataagcaaaaaaaagaaaaaaaat

SEQ ID NO: 32519 - DNA, 1591 bp, DROSOPHILA
tgaccttaagcattattattttcacgtgtggcacgcaaacgagccaaaaaaccaagcgcctatttaaacaaacaaatcacacgcccagcagagagagcagccggtgaccaccggtaacgggagtagctgcagttaatccgacaggcccaacaaattcgcccgctaattggcggcgtttctctagtcggaacaacaagaagaagaagcacgtgtgcggcgtgccaaagaaaaaaggaaaataaacaaggaggccaggccaaggagcataagcagaatccgcatccggaggacatggtgcccatcggagccgtgcacggcggccatcccggcgtagtgcatccgccacagcaaccactgcccacggcgcccagcggcccaaactcgctgcagccgaactcggtgggccagccgggggccaccacctcctcgaacagcagcgcctccaacaagagctcgctatccgtcaagcccaactacacgctcaagttcacgctggccgggcacaccaaggcggtgtcggcggtcaagttcagtccgaatggcgagtggctggccagctcctccgctgataaactaatcaaaatctggggagcatacgatggcaagttcgagaagaccatttcgggccacaagctgggcatcagcgatgtggcctggagctcagactcgcgactcctcgtgagcggcagtgatgacaagacgctcaaggtctgggagctgagcaccgggaagagcttgaaaactctgaagggccacagcaactatgtgttctgctgcaactttaatccgcagtccaatctgatcgtctccggcagcttcgacgagagcgttcgcatatgggatgtgcgcaccggcaagtgtctgaagactctacccgcccattccgatcccgtttcggcggtacatttcaatcgcgacggatcgctgatcgtgagcagcagctacgacggcctctgtcgcatatgggacacggccagtggacagtgcttgaaaaccctgatcgacgacgacaatccgcccgtcagctttgtaaagttctcgcccaatggcaagtacattttggccgccacgctggataatacgctcaagttgtgggactactcgaagggcaagtgcctgaagacgtatacgggtcacaagaatgagaagtactgcatattcgccaacttctcggtgacgggaggaaagtggatcgtgagtggcagcgaggacaacatggtctacatttggaatctgcagagcaaggaggtggtgcaaaagctgcagggacacaccgataccgttctgtgcaccgcctgccatcccacggagaacatcattgcttccgcggcgctcgagaacgacaagaccatcaagctgtggaagtcggatacatagagtggctggtatccagctggaggacgttcgatcggaacacacacatacatttcttggataatattattttaaagcgaacagcctaatcgtaattgtaacacccccacacccccccaccacgagcccccttttttttttgtacgcataatttaaaaaagaaaaggaactctaaaattctacgtttaaatcacactttaaacctcacattctacgg

SEQ ID NO: 32520 - protein, 361 aa, DROSOPHILA [sequence omitted]

SEQ ID NO: 32521 - DNA, 3470 bp, DROSOPHILA
acggccaaggcgctgagcaagctggactgcaacgacgatgcagatttccgcaagattttcgacttgctgcacaggcacaatctcaagcacaatctcttcgagcacttcgacgtggactgcatgttcgatgtgcgcatcctatcggtggactcgtgctaccgtggccaggggattgcgaatgagctggtcaagcggtccgtggcggtggccaaaaagaatggctttcgcctgctgaaggccgatgccaccggcatcttctcgcagaagatctttcgttcccatggctttgaggtcttctcggagcaaccctacagcaagtatacggatgagaatggcaaggtgatcttgcccgtggaggcgccccacatcaaattgcagcagctctacaaggcgatctgcgcggatgaccaggatgagaagaagcagtcgctttaaggagtcacccggctggctcacatttggaacaataatctcatttattttctacatatacatacattgcataatcgttattggaatgttttcgtactacaaatatggaaattagttggggggcgtttaacggaaagttaaagctagggaacaattactattgttctgtgtttaaacataactatgaaataacattggattttcggactttccgtcgacggtttttggagcgtcaatggaacgcctctataatgtacgagtagacgctgcctggcacgtttacataaatataattttgtaattgtttttttttgtatggggaccaactgctaacaatacctaaataaagtacactgttgtgccaaagttaaccagacagctttttctcttacctcccactcgaagtccccccctacaaggtctcctcctaaagtcctaatatcacaagcgcagattccaatcatccgttctcatcacctggcaacctggcgacggcaggtacttctgttcatctgttcatcaattcatctgttcatttgttcatctgttccgctggtttatccatctactactccctagtttccttcttctcgtatatgaaaatgatgtcctcgtccgtgccgtaggcgcgtcgggccgtgtccatggactcgatgaggcagcgacaaatgtctgtggaacgcagccaaaaacgaaaatcaatgaattttcaaggattgctaccaaatggaatactcacggccatcgtggacctcgggattgtggtagaagagcttctgggcggccatgtcatatccgcagagcaccacatagtgtccggcataccttttgggtccatggaggcgtgtattttgagcaatgcagggtatatgaaaacagcttttcattcgagtgtggatttaaggtggttttttgtgaatcgccggtggcaagaggaactcacccgaacttctctaggacattgcgcttgcacacctcgcacgtgagcagcgaggcgttggtcagcaggatgacgggtccgtggcgggccaaatgccgcagaatgacctccatgtccacggtgcgctgttcaacgcgcagtccatgggcccgggcgtccttgaacttgcgcgtcacgcgccgttcgtccttgtcgatgatcttggagtagtacgtgtgctgcgcgtagttgggatcgatcccgagcgtttgggtgaagtactcgtggcgcacctggccaagaagagagtgtcaaagaagtgagcgaatgcaaatgtgcatcacggcatgcccacctggtagcgcatcagcagatagcacaggtcgatggtccaggtgctcgagccaaatccctcctcgccgcacacggcatcaaagttcccaagaagctgttccctttgctgcgccgacaggatcataatgatgcaggacagaccgcagtcccagttgtagcgctgctggtagtgcgtcaggttgtagtgcttgctcggcggcagtccgttcattctggccagcagctgggctcttcttggcttcttgtgctcctcgggtcctcgagtccttggctccgtgtgcttcgcgtgctcctgtgcccgcggctgcgctcctttgatcctggcgtccaattggaaactgaactgggaatgttttggtctaacagcttgggccagtgtggccaggtgcagctgtctgcggaatgccaactgtcggctatgtccagttgaaaaaaatgccaattgaatttttttagatatatattgtaaatattgtaattaaataatatttatacataaattgtgagtcgccaaaggagttagatgtattttcctacaaatcttggttgctgctaggaaatttttggtttgaaatcttaaaggcgcaaaaaatgttctaacactatgtaaatccttcttaagcccttcaaaattgacagttcagttagaattacctgcaattttaagactaaataactactggcaattggtataaatttaaatgcaactgtacgcgaaacttcaaacatgtatgaaacgatctggcaacgtcgagctaactgcatgcaatttggcatcgatgtgcccgatgcactccccctgatagtttcagcgggaaactaagagtcccattctagaatcatcccccaaggacgaaaacatcccaaatctccctaaaaaaaaaaacaaaaagcaaggaatcgagtaaacacgttccaccaccgctgtggcaatccgtggctggtgcgcaacggccacactgacgcgctgaccaatttttagttattagtgtgaccttaagcattattattttcacgtgtggcacgcaaacgagccaaaaaaccaagcgcctatttaaacaaacaaatcacacgcccagcagagagagcagccggtgaccaccggtaacgggagtagctgcagttaatccgacaggcccaacaaattcgcccgctaattggcggcgtttctctagtcggaacaacaagaagaagaagcacgtgtgcggcgtgccaaagaaaaaaggaaaataaacaaggaggccaggccaaggagcataagcagaatccgcatccggaggacatggtgcccatcggagccgtgcacggcggccatcccggcgtagtgcatccgccacagcaaccactgcccacggcgcccagcggcccaaactcgctgcagccgaactcggtgggccagccgggggccaccacctcctcgaacagcagcgcctccaacaagagctcgctatccgtcaagcccaactacacgctcaagttcacgctggccgggcacaccaaggcggtgtcggcggtcaagttcagtccgaatggcgagtggctggccagctcctgtaagtacatacatccctatccacgaatatctgggggggaattttatggtactgaactgctattggactgaacaggcagctttggcagctcagttaatgggaattgggatgaaataagatctcggaaaagagaagaagcatttatagaatacatattgtacattccatacatacagcacatgcctattaaacttccacttctaaccctcagc

SEQ ID NO: 32522 - DNA, 912 bp, DROSOPHILA
atgcagttagctcgacgttgccagatcgtttcatacatccgacagttggcattccgcagacagctgcacctggccacactggcccaagctgttagaccaaaacattcccagttcagtttccaattggacgccaggatcaaaggagcgcagccgcgggcacaggagcacgcgaagcacacggagccaaggactcgaggacccgaggagcacaagaagccaagaagagcccagctgctggccagaatgaacggactgccgccgagcaagcactacaacctgacgcactaccagcagcgctacaactgggactgcggtctgtcctgcatcattatgatcctgtcggcgcagcaaagggaacagcttcttgggaactttgatgccgtgtgcggcgaggagggatttggctcgagcacctggaccatcgacctgtgctatctgctgatgcgctaccaggtgcgccacgagtacttcacccaaacgctcgggatcgatcccaactacgcgcagcacacgtactactccaagatcatcgacaaggacgaacggcgcgtgacgcgcaagttcaaggacgcccgggcccatggactgcgcgttgaacagcgcaccgtggacatggaggtcattctgcggcatttggcccgccacggacccgtcatcctgctgaccaacgcctcgctgctcacgtgcgaggtgtgcaagcgcaatgtcctagagaagttcgggtatgccggacactatgtggtgctctgcggatatgacatggccgcccagaagctcttctaccacaatcccgaggtccacgatggccacatttgtcgctgcctcatcgagtccatggacacggcccgacgcgcctacggcacggacgaggacatcattttcatatacgagaagaaggaaactagggagtag

SEQ ID NO: 32523 - protein, 303 aa, DROSOPHILA
MQLARRCQIVSYIRQLAFRRQLHLATLAQAVRPKHSQFSFQLDARIKGAQPRAQEHAKHTEPRTRGPEEHKKPRRAQLLARMNGLPPSKHYNLTHYQQRYNWDCGLSCIIMILSAQQREQLLGNFDAVCGEEGFGSSTWTIDLCYLLMRYQVRHEYFTQTLGIDPNYAQHTYYSKIIDKDERRVTRKFKDARAHGLRVEQRTVDMEVILRHLARHGPVILLTNASLLTCEVCKRNVLEKFGYAGHYVVLCGYDMAAQKLFYHNPEVHDGHICRCLIESMDTARRAYGTDEDIIFIYEKKETRE

SEQ ID NO: 32524 - DNA, 3796 bp, DROSOPHILA
gcaggccgtcctgttccacaacaattgtatgttcttcacacactgggtagcgcagcatgcgaacaagggcatcgaaagcttggcggcgctggccaagacactgcaggccaccggtcagcagcatttccgcgtgcaggtcgactaccaatcctccatcctgatgggcatcatgcaggagttcgagttcgagagcacgcacacgctgggctctggtccactgaagctggtgcgtcagtgccttcgccagctggagctgctgaagaacgtgtgggccaatgtgctcccggagaccgtgtacaatgcaaccttctgcgagctaatcaacacatttgtcgccgagctaatccgtcgagtgttcacgctgcgcgacatttccgcacagatggcctgtgagctgagcgatctcattgacgtggtgctccagcgggcgcccacgcttttccgcgaaccaaacgaggtggtccaggtgctctcttggcttaagctgcagcaactgaaggccatgctgaacgcgtcgctcatggagatcacagagctgtggggcgacggcgtcggcccgctgaccgccagctacaagtcggatgagataaagcacctaatcagggcgttgttccaggatacggattggcgggccaaggccattacgcagattgtatagggcgcgtgcgccttttttgcgagcgaggaatgttgaacggcggatagacatcacatttgaggtggtaaacggagtctaaatttgatgatcaccatcaatgtgtccttactttaattccttgaattgtttaccacaaatgccaaaagtaatagaatttgataatctttaattctccgaatggtttctgttgtacatagaaaagtaattatccacaaaaatccattccattcttcccgcaacgcaacacaatatttaacttaagacttatttaaatgaataaaaacaactaaatcccattagtgcgcctcttgtcgcgcttgtagaacgagcatgtatagctgctcagtaagcagtctgtgatctcggccgtgggtgacggttaggatgcgttgggcctcctccagatggtgcagtgcctccttggaatggccctcgtagagctgaatcttgcccagcttcatgtgaagcaggcccaatagcggattccagggtccgtggtattttcgaaagcctggcagcaaacgttgcccgtaatccagggcgtcgctccacttgcccacttcgatggctgcttcgaaggccgcatcgagcgtcttgacgtaccacacattcaggggatggaacacgccagtctgcttgtccagacacaccttgcacacatcgagatctgtgatcgagagagtgaaaatgtgcttattatggagctaattccatttcgtcgcatctactcacaggccacgtccttcatgttctccagattgtgccgggtcagagtcatcgcctcgttgaaggcatttctcaacttgggactgatgccggcatcgcatcgcgggcaattattgcggtccacactgattcccgcaccgcagttgcgattgggacacagggcagccagcatctccttcgattccttggcatccgtgcacttgctgcacacgcataggaagtagtagtgctccttgaggtccagacgcctctgctccggcgtattgagcaggtcgatgtagctgatgaagattttcgaccagtccaggcattccatgtcctcgatcgcgtggacgtgcagctcgttgccctcgaaggtggcgaccgcatttggctggcagctatggtccgtaatcgagacgcccagatatatggccgtggcaattgagttcatctcggcgtccaagatattgaagccattggtgatcagctgcaaagagcagagaagaaagagcatgagctcccgcgtaactgtgcgccggggaatgtgaaccgaagcccttcctagataatcaattgactggcagagcgccaggcatacatcattgattgctatctaatttgggcgaccaggagcggctgcatacgcaagcgtcttggtttctcgattcagtaccagtgcgatgaatcgcccaatccgctcctgctcgctcgcacaggtgcctgcacacttacgcgaccatagatgctcatcagttccgtcttgtttggcaccgtgctgggactctcggccatcatatcggtgaggacggcatgcagcgagtccaagtgctccagtcgcatgggatcgttcttgatttcggcgtaatctgtgcacgttaacgtggattagctaggaatgaccatgcaaagcggttcgccctttggtttactcacgggacatgagatcgcgaaacttgcgggagccgtgctcggtgtaatagccgcggatcaggtctccgccgtgctccaggcgcaggatcagtcggcagagcattcgggcagcatcgggcacaactcgaggatgcaccttcttgaggaaaggacactcgtgcttgtgctggccccaagcttgcatctggcatgagcggtggcagtaggacacatacctgcagttggagcacttcagcaccttggtcctgcaacgacgaacccaaattagatagctcacaaaggcagccacatggcgaaacttacgcctccaggcagttatcgcaccgctccaggcggtactgtgatttcaagacgaaggcgaatggtttctccgtgaggatccgctgtcccctttttatttgcggcgccggattctttaggttcttggatttggatgagcatgcggatgcggttgcggatgtggttgcggatctggatgaaccaacggtggcggtggccatttcgctcgaacggagcaacaacaaagactttcgcctgggggcccgtctcactgacgactgaaaatgagcgcacacctgaagatcaaaaatattgtttcgaatgctttttgaatattttgcggcatctgatttctatttttggccacaaaaacaaacacaatttacgcaaatcgctggcaaacacaaaaacaacaacaccatggtgtttattcgcatgcaaacgatggcgttgccagatcggctggaatcatgctttctacagtgggcaccgcgtaaggttaacttgttaaccatatgtgggtagctgcatgtcgttaaaaaatacacttaacaaatcatattcaagttttttaagtaacaaataaaaaatatttcttttatatgttgttcccagtgtctacgatttggtggccttgcgtcctttaaaacgagggagaaagctatattagagcaaaagtcgaaagcatttgtgttggttggtccgcaaaactaaagaagagcgattaagttatatcaaatatgaaaaatatacgattctagatgccattgtatccttgcagagcatagtcatctggttttcggtgcccatgggggctgttttaagatttatttgtagcaaacttagcatagcatagggacaaattgtgtgatcgactcgaacggactcctatgagcagtaaacgcgggtagtgggaacgggactaactaattgttctggggtttcgaccattcgacgctgaggatcaagtggtcgtagccgtgtccattgaggatctcgatggcggcggccgcatccttgcgctgcttgaagtgcacgtaggcgaatcccttgcagagtccggtgttcttgtcgcgggcgagatacatcttgctctgcggtccaatcttcttcaccagctcctcgagatccgcctcggtcatcgactccgacagattcgatatcctaatggcggccgtgtcgtcgcgtccgcgcattcccagcgcgcccttttggctgtcc

SEQ ID NO: 32525 - DNA, 1293 bp, DROSOPHILA
atggccaccgccaccgttggttcatccagatccgcaaccacatccgcaaccgcatccgcatgctcatccaaatccaagaacctaaagaatccggcgccgcaaataaaaaggggacagcggatcctcacggagaaaccattcgccttcgtcttgaaatcacagtaccgcctggagcggtgcgataactgcctggaggcgaccaaggtgctgaagtgctccaactgcaggtatgtgtcctactgccaccgctcatgccagatgcaagcttggggccagcacaagcacgagtgtcctttcctcaagaaggtgcatcctcgagttgtgcccgatgctgcccgaatgctctgccgactgatcctgcgcctggagcacggcggagacctgatccgcggctattacaccgagcacggctcccgcaagtttcgcgatctcatgtcccattacgccgaaatcaagaacgatcccatgcgactggagcacttggactcgctgcatgccgtcctcaccgatatgatggccgagagtcccagcacggtgccaaacaagacggaactgatgagcatctatggtcgcctgatcaccaatggcttcaatatcttggacgccgagatgaactcaattgccacggccatatatctgggcgtctcgattacggaccatagctgccagccaaatgcggtcgccaccttcgagggcaacgagctgcacgtccacgcgatcgaggacatggaatgcctggactggtcgaaaatcttcatcagctacatcgacctgctcaatacgccggagcagaggcgtctggacctcaaggagcactactacttcctatgcgtgtgcagcaagtgcacggatgccaaggaatcgaaggagatgctggctgccctgtgtcccaatcgcaactgcggtgcgggaatcagtgtggaccgcaataattgcccgcgatgcgatgccggcatcagtcccaagttgagaaatgccttcaacgaggcgatgactctgacccggcacaatctggagaacatgaaggacgtggcctatctcgatgtgtgcaaggtgtgtctggacaagcagactggcgtgttccatcccctgaatgtgtggtacgtcaagacgctcgatgcggccttcgaagcagccatcgaagtgggcaagtggagcgacgccctggattacgggcaacctgggcaagattcagctctacgagggccattccaaggaggcactgcaccatctggaggaggcccaacgcatcctaaccgtcacccacggccgagatcacagactgcttactga

SEQ ID NO: 32526 - protein, 430 aa, DROSOPHILA
MATATVGSSRSATTSATASACSSKSKNLKNPAPQIKRGQRILTEKPFAFVLKSQYRLERCDNCLEATKVLKCSNCRYVSYCHRSCQMQAWGQHKHECPFLKKVHPRVVPDAARMLCRLILRLEHGGDLIRGYYTEHGSRKFRDLMSHYAEIKNDPMRLEHLDSLHAVLTDMMAESPSTVPNKTELMSIYGRLITNGFNILDAEMNSIATAIYLGVSITDHSCQPNAVATFEGNELHVHAIEDMECLDWSKIFISYIDLLNTPEQRRLDLKEHYYFLCVCSKCTDAKESKEMLAALCPNRNCGAGISVDRNNCPRCDAGISPKLRNAFNEAMTLTRHNLENMKDVAYLDVCKVCLDKQTGVFHPLNVWYVKTLDAAFEAAIEVGKWSDALDYGQPGQDSALRGPFQGGTAPSGGGPTHPNRHPRPRSQTAY

SEQ ID NO: 32527 - DNA, 4306 bp, DROSOPHILA
gtctacgtggagatacagtcgcagaagatccagttctacacggtcaccctgcacatagttgccgattttaccggtctgcggtacatcatgttcaactggcccgtattgtcggccatagtgggtatgttggcgcatatacctccccatagcaaccttcgctaatcctatttctatttttcctttccagccattagcaccaatctgttctttatactggtcgtctttctgctcagctggtaccactggtccgacgccaagtggctgcatagcgtgcaaatcaagtacgcccggctcacgaagtcgctcgagcccggcgtaatacactccaaagcgagcagcctgcgcgacgacgacgacgacctggttgcctacagtgataagtccgatattgcggacgtgggcggcgacacgctgagcgacgtcgatgccgacgacttggtgctggtcaagaaatcccgcagtggcaagcgcgaatcgcccgatgcgctgcgtaagcgtcccacaaagaagaccaccgcggaccattgaaaagtggatggaggcggagatgatatgagatgatatggaacgaaagagggaccaccattaaccaccgaaggctagaccaacgcccgtgcgacgcttgagccaaagactaaatagatttaggactaagttagtgaacacagccagctgaagtattccggcggattagcttcaagcttcaactggttcttacttaagtggtggacaaaagtgtatcatagtataggtattaattattgatccagttagagattgccttgtagattgctgaactttgcattttcgatgcagttgctcattcgttgttatctatgcccagttgggaaccttcccattgcaagccaattagcttaagaaaaaagcattccatttgtacatgaaattttagcaacaaacaaagtcgaatccaatgaatttgtaaacgaacataaattaaaatgtttctcttgagatttgacaaggagcacgcgcatctttaggcttcagcctcgtcctgtctcttatcctgcggcggcgatccgtctggccccaaattgggatctggatcttgcgcttccggctgtttctgctgctcctgcggccattcaacatattcgtcgaagagaaacattcggatcaaggtgagctggatgttgagaatatagtgcacgttgaccatcttgtcgccgcgatccttgtactccagcagggcatcctcggccgatactggtctactcacgtgatggcggccctgccgcaaccttcgccgcatcaaacgctgcctgtccatggagtccagtttccggctcacgttttccgccaccgtacgcccattgcggacgtagttcctccgccagcagggcagcttgcggaagcgtcctaagacgcccgagaactcgacgaccagaaattcgaagaaagtgatccgattctcccgttccgagtccctgatcgtcttcgccacggtaaagtagtcgttgatcagggacacaaagacattgatcagcagcacaatgatgacgaaggccaagacgccgtagcagagaatgcccagccacttgccgccgtgaaagagctccgatggcttcacctgggcactaaagccgaaggagtagcacatgcacatcaccatgctcttgactaacttgttaaagttgctgctgtagttgccatttatggtgaccacggcgaagcagaagccgataaggaatatgacaatggcgatcgcagtgctggccaccgccgaccaggccaagtacagtgtcctggtgaacagcttgaagacgctggcgaactgcagcactcgccacagtcgcagcgtggttatgcaaatcagaaagccgatcgtgatcgtggtcaattggtgcatgcgcgacggccgccgaaagtcgatgaactccatcttgctggcaccctccaccttcttcatcatgctggccaccagggactcgcgcagcaccaccagcaccaccaccagcacgttgaccataaagatgaacagatccagcttgttccaaacgctcttcagcagatgcggctcgtaccacaacttgaccgccagcgtctgggcgaactgtatgaagaccagcacgtagatgagcagtgccaacagtcccgtgtatggcatctgatcgacgttctccagcagcttggcgctgtccacctgcacgtcgggcactatgccgccgaatggtgtcttctccacgcgcagcgtacaaatgctaaacagattcacgtccacgttgtacagcgtaaagtcgatgaacaccgccgacgtgttcagcgttagccagtggttctccgagaggtagtcaatcacctggatggaagtgcaaggtatgcggagtatgtggagtattaaagagattttattagttattatgcacgcccatcacccaccttcatgctattagccgcgctcctggccaacaggctgacgtagcccgccaactctggatagctattgagcgagcccacatggtcgaagttcatgagcagggcgtcgaggaactcaaagcccatcttgatgggtatccacggctcgtagatgcgccagtacttgtcggagtagtggagtttgcggtacggcagctgccagtcgggcatgtagtatgtatcggagaacttcggtggaccgaggccgacttgcggattggacacgcgcagctggcgcagtcgcatcacgcccagtagcaccgattgctcggcgtgtgcccagccgggtgaaccgctttcggtggaattcgagttgaaggcgagcaccagagtggactcgatgaagtcgaacagctggttgaggaagtacacctcctgcaggcccgtgtagtccgtgtggttgtacataaacagatccgtgatgatgcgagtgttgtggtagagggtttgatccctcgtcaccagcaccaggcacatcaggcagagaaagtacgggccgtagatgaagagatcgtgggcgatcatcttgtactgatcgttgagcttatagttcctgtagcgcgaggtcagcatcaggttggcgcgcttgttaatcaggcgctgcttgaggaagtccctgcgttcctccttctcatccatctcatccttgtcacatcgcggcggtatatagatccgcggtggccacagggcccggtcgatggacaggataacgaacttgatcgggtcaccgatgaggaactggaagatcagcactatcacaatgctcaccagcatcgtcttgaacttgacgtcctcgtgctggaaaccggcgaacacagcgatgcatatcatgcagcctattataatgcccaccgtgatcgcgaacatggcccaatgcgtttttttcactttcatttcgagctgtttttttcgcgtattttagatattttcgatattttccgctttttagccgattcactgcctttcaaatgctctcccagcaattcgagttcagaactacgagtggcgtgagctaaaaggccagctagacgcgaaacaaaattagaataacttttggaatgtaacatttttcaaatgtgtaacgtattttggtctgcataagggttaattcgaatttttcgagacacgacattcggttaggcggctcattctcgcgcacttcgcagccagcgccacatttgctagccaatgcgcgctggtcacactggcgaaagtaaaataaaaaaaaattagttttatttaatttcttgcgaacgagccacgaaaatgacgaacgcctagcgcgattgcccaaaacgacccactgaatcaaccgcaccgcaccgcagcgaaccgcatcgaaacgaacgaacggaggaggagcaggtggccgccagttagagcagccatgacgatgaccgcctcggataaatacacgtaccagcggaccgttctctgcctggcccgcgttctggcgggcatccagcccactccctgggataaggtacatgtccacctggccacccactccaccagccacagcgccagcccccctggcaatcgacttttcgcactgaccttgagcggcggccataaaacagacatgcgtgggcgctcagggggcggcggtaaggcagtgaggcggtggggcaggagccccacaccaaaccaactcagtttgcaaaagtgccattggaatgtcaacagtgcagcgaatcttcagctgttgctcactgaagcgctcacacgaaagctgctgatgattcaggcacaacagaggtgctgtaggatatagttgtcttcacatccgctgaggtcaccagcagtagaagctattagttaggcgtatatcatgagtagagttgtataggtcaaggaataggaatag

SEQ ID NO: 32528 - DNA, 2226 bp, DROSOPHILA
atgttcgcgatcacggtgggcattataataggctgcatgatatgcatcgctgtgttcgccggtttccagcacgaggacgtcaagttcaagacgatgctggtgagcattgtgatagtgctgatcttccagttcctcatcggtgacccgatcaagttcgttatcctgtccatcgaccgggccctgtggccaccgcggatctatataccgccgcgatgtgacaaggatgagatggatgagaaggaggaacgcagggacttcctcaagcagcgcctgattaacaagcgcgccaacctgatgctgacctcgcgctacaggaactataagctcaacgatcagtacaagatgatcgcccacgatctcttcatctacggcccgtactttctctgcctgatgtgcctggtgctggtgacgagggatcaaaccctctaccacaacactcgcatcatcacggatctgtttatgtacaaccacacggactacacgggcctgcaggaggtgtacttcctcaaccagctgttcgacttcatcgagtccactctggtgctcgccttcaactcgaattccaccgaaagcggttcacccggctgggcacacgccgagcaatcggtgctactgggcgtgatgcgactgcgccagctgcgcgtgtccaatccgcaagtcggcctcggtccaccgaagttctccgatacatactacatgcccgactggcagctgccgtaccgcaaactccactactccgacaagtactggcgcatctacgagccgtggatacccatcaagatgggctttgagttcctcgacgccctgctcatgaacttcgaccatgtgggctcgctcaatagctatccagagttggcgggctacgtcagcctgttggccaggagcgcggctaatagcatgaaggtgattgactacctctcggagaaccactggctaacgctgaacacgtcggcggtgttcatcgactttacgctgtacaacgtggacgtgaatctgtttagcatttgtacgctgcgcgtggagaagacaccattcggcggcatagtgcccgacgtgcaggtggacagcgccaagctgctggagaacgtcgatcagatgccatacacgggactgttggcactgctcatctacgtgctggtcttcatacagttcgcccagacgctggcggtcaagttgtggtacgagccgcatctgctgaagagcgtttggaacaagctggatctgttcatctttatggtcaacgtgctggtggtggtgctggtggtgctgcgcgagtccctggtggccagcatgatgaagaaggtggagggtgccagcaagatggagttcatcgactttcggcggccgtcgcgcatgcaccaattgaccacgatcacgatcggctttctgatttgcataaccacgctgcgactgtggcgagtgctgcagttcgccagcgtcttcaagctgttcaccaggacactgtacttggcctggtcggcggtggccagcactgcgatcgccattgtcatattccttatcggcttctgcttcgccgtggtcaccataaatggcaactacagcagcaactttaacaagttagtcaagagcatggtgatgtgcatgtgctactccttcggctttagtgcccaggtgaagccatcggagctctttcacggcggcaagtggctgggcattctctgctacggcgtcttggccttcgtcatcattgtgctgctgatcaatgtctttgtgtccctgatcaacgactactttaccgtggcgaagacgatcagggactcggaacgggagaatcggatcactttcttcgaatttctggtcgtcgagttctcgggcgtcttaggacgcttccgcaagctgccctgctggcggaggaactacgtccgcaatgggcgtacggtggcggaaaacgtgagccggaaactggactccatggacaggcagcgtttgatgcggcgaaggttgcggcagggccgccatcacgtgagtagaccagtatcggccgaggatgccctgctggagtacaaggatcgcggcgacaagatggtcaacgtgcactatattctcaacatccagctcaccttgatccgaatgtttctcttcgacgaatatgttgaatggccgcaggagcagcagaaacagccggaagcgcaagatccagatcccaatttggggccagacggatcgccgccgcaggataagagacaggacgaggctgaagcctaa

SEQ ID NO: 32529 - protein, 741 aa, DROSOPHILA
MFAITVGIIIGCMICIAVFAGFQHEDVKFKTMLVSIVIVLIFQFLIGDPIKFVILSIDRALWPPRIYIPPRCDKDEMDEKEERRDFLKQRLINKRANLMLTSRYRNYKLNDQYKMIAHDLFIYGPYFLCLMCLVLVTRDQTLYHNTRIITDLFMYNHTDYTGLQEVYFLNQLFDFIESTLVLAFNSNSTESGSPGWAHAEQSVLLGVMRLRQLRVSNPQVGLGPPKFSDTYYMPDWQLPYRKLHYSDKYWRIYEPWIPIKMGFEFLDALLMNFDHVGSLNSYPELAGYVSLLARSAANSMKVIDYLSENHWLTLNTSAVFIDFTLYNVDVNLFSICTLRVEKTPFGGIVPDVQVDSAKLLENVDQMPYTGLLALLIYVLVFIQFAQTLAVKLWYEPHLLKSVWNKLDLFIFMVNVLVVVLVVLRESLVASMMKKVEGASKMEFIDFRRPSRMHQLTTITIGFLICITTLRLWRVLQFASVFKLFTRTLYLAWSAVASTAIAIVIFLIGFCFAVVTINGNYSSNFNKLVKSMVMCMCYSFGFSAQVKPSELFHGGKWLGILCYGVLAFVIIVLLINVFVSLINDYFTVAKTIRDSERENRITFFEFLVVEFSGVLGRFRKLPCWRRNYVRNGRTVAENVSRKLDSMDRQRLMRRRLRQGRHHVSRPVSAEDALLEYKDRGDKMVNVHYILNIQLTLIRMFLFDEYVEWPQEQQKQPEAQDPDPNLGPDGSPPQDKRQDEAEA

SEQ ID NO: 32530 - DNA, 2786 bp, DROSOPHILA
gccgatgatgacgatgatgatgatgatgatgatgatgatgatgactgagcttgcataaacgagtttgcccttaagtgtatgcgcatgctgaaggatggggcggcggatccaaaggaactggctgagggagactccaaaatgaggtgctgttgaaggtggtggttggcagggggtgtcaggagggggtcgcaaggacgacaagcagagcgaggagaatttgtgcgtgagcagcattttcgatgtgccacacatacaaccaagttatttatgcagactcacatacaaagcatgcaaagattttgcattacccttccatcaggcaaccaccgtccttccattaactcgccaccatacaccatacactacccactttccactaccgattacccactatatccagtagccagtagccaggcatccaccacccactgaatgggctctgtgccagcatcaaaagtagcatctgcccgggaggtccgcatacaattagctgcaactgtaattaaagcaattgtataataaatcttttgccaaatgggaaaagatccaacccactctcgctcctttcaaccccagcaggtatatataatcggcaaggggggaaaatgtgggcttaagcagcgggtgccaagtgaaatgctagccaaggaaaaactacgaaattaatataaatttaatagtttggcccctggcatttatggagggcataaaacgaaggcgggtcgttaaatgcattcaaatggatcagctagaaaaaaaaaaagaacgaaatgagtgccctgcaaaatattctacagctttacggtctatacttactcgagtttttgaaatgtggctaccattttcgagttgagcacaaatttattcgggtttgctgtcgcccccacggattcagttgtcacaatttggtttggtcaagtaacaagccgaaacccttaaaaaattgttcgaatgttgattgaggaaacctttttggcgaagctcacataagcccacttaaatgtctaaccagcgatcccgacacgttcgtcgtccggcagcggaaatagtccgcgaactgaggaatcttcgcgcctcgcctctgcggatcgacgacgagaacgagtcgtgggtgaatggctacgagaagccaccaactccggatctaccggtgaccagtcgcgatcagttggagctgctacgtctgagccgccatcgaatcggtctgcttctggttcgacccgccttcgagcaggccgtcactggatgctttgtccgcgtgaatgtcagtgggcagggagagttgcctgatcatcgaatcgccgaggtgctgggcatctgcgaactggactttggctacaaagtggagcagatacccacgaatgtggcgctgcgattgcgctacgatgacctggagatgcagcacgagattaacgatgtctctaacctgaacttcacccaggaggaattcgaactgtggcgcgataactgtgttaaccaggccataagtccacccaccacccacatactgacgcgcaagaaggtcgaactgtacaacgcactgcagttggaggccaagcctttaagcctgatccaaaggaccttctccttcgccctgaggccccagcagaaaatcggcatcatggagcggcatggcgttgtttatccctggcaattgaatcattcgctcccgttcgtttcgcaatcgccaactgaaaatccatcgaggggaaaagcggataccgtagacgaggaggaagatccgggggcagctgctccattattaccaaaaactgaaccaaattaataggcaattgttaatttttgaacatttatttagcaaagataatggcaattggtggaacttttaatggcttgttatcataaataattacagtcataattgttgtgcgaatttttggacttaaaatgtgttaaaatgtaatccatcgaactggttgaaatataatgaacaccagcggattttgtttatataaattaggaggatctatgagcgctcaagctttaataaaagtttatgcttggagtttaaaaatgatttaagttcaagggtgttgaatgcaatttggaacttacacttttacagcacctataaattctgcaaataaaatgtttttaaaacgatacaatgtgggagcgtggggagtggaaattgggggacacttaaatgccgtgcaattagcagtgaaacagtgaaagagcaaagagattgagatggccaaggtggccaagaaattcgacccctttgaacggcttttgtcgccggtgtggcgccacctagcggccagcccctttgcagatttgggagcaactttggcacgctaatgaacaacaaacttggagcaacgttacgaaatggcaacaaaatatcgtcaatagggcaaaagaaatgacggaaattaaatgaaatgcaattaaccagctaaatgagcgagagtccgcgaaaggggggcgttctgctgggggtggggggcgtggctaacaatcaagcgactgatgagcaattaggaaatgtaaaattagcaagtgaacttggccaaaacgaagcgaagacaacaaggcaattaattcatatttaattgattgcaaaaattccgaggcaaattcggtgggtaacattttccatttcttggctgtgtacaaacttgtgtgtgtgtccttctttttttttgtttgtttaattttccattgcctaattacgtttgtccagcaaatgtttttctcctgtttttgtcgttttattattacatttttctgctggtttgctttatgattatgcctgtgtt

SEQ ID NO: 32531 - DNA, 786 bp, DROSOPHILA
atgtctaaccagcgatcccgacacgttcgtcgtccggcagcggaaatagtccgcgaactgaggaatcttcgcgcctcgcctctgcggatcgacgacgagaacgagtcgtgggtgaatggctacgagaagccaccaactccggatctaccggtgaccagtcgcgatcagttggagctgctacgtctgagccgccatcgaatcggtctgcttctggttcgacccgccttcgagcaggccgtcactggatgctttgtccgcgtgaatgtcagtgggcagggagagttgcctgatcatcgaatcgccgaggtgctgggcatctgcgaactggactttggctacaaagtggagcagatacccacgaatgtggcgctgcgattgcgctacgatgacctggagatgcagcacgagattaacgatgtctctaacctgaacttcacccaggaggaattcgaactgtggcgcgataactgtgttaaccaggccataagtccacccaccacccacatactgacgcgcaagaaggtcgaactgtacaacgcactgcagttggaggccaagcctttaagcctgatccaaaggaccttctccttcgccctgaggccccagcagaaaatcggcatcatggagcggcatggcgttgtttatccctggcaattgaatcattcgctcccgttcgtttcgcaatcgccaactgaaaatccatcgaggggaaaagcggataccgtagacgaggaggaagatccgggggcagctgctccattattaccaaaaactgaaccaaattaa

SEQ ID NO: 32532 - protein, 261 aa, DROSOPHILA
MSNQRSRHVRRPAAEIVRELRNLRASPLRIDDENESWVNGYEKPPTPDLPVTSRDQLELLRLSRHRIGLLLVRPAFEQAVTGCFVRVNVSGQGELPDHRIAEVLGICELDFGYKVEQIPTNVALRLRYDDLEMQHEINDVSNLNFTQEEFELWRDNCVNQAISPPTTHILTRKKVELYNALQLEAKPLSLIQRTFSFALRPQQKIGIMERHGVVYPWQLNHSLPFVSQSPTENPSRGKADTVDEEEDPGAAAPLLPKTEPN

SEQ ID NO: 32533 - DNA, 3488 bp, DROSOPHILA
tctccaaacccttgccggatatcttgcgatccaccaggaagccgcgtaccttgccatcctcgcattttgcccatacgactatgacgtctgcgatgggcgcactagtaatccacgtcttagatccgttcaggatgtatgtcttgcttttgctatcgtacttggcacgggtctccatgccagcggggtcactaccgtggttgggttcagttaggccaaaggcacctgaataaatatgtaaagaaattgagattcgtttaaagagaacacatataaactacgggactttatataattcactcaatatttcattaaaatatgattttattcatttggcactcaccaatcagcttgccctccgccatgctgggcaaatagcgttgcttctgctcctcggatccaaagtcgtagatggcgcccatggccagcgagctctggacactgacagcagaccgataagcggagtccacgcgctccacctcgcgggtgagcaagccgtaggcaacgctagagactccggcgcagccgtatcccttaatggtgcagccgaggacacccagactgccgatctcctccataattttcttgtcgaacgtctccaggcgattggccatcttgacgcgcggctgcagctcggcctgacagtatccacggaacgcatcccgaatggccacctcttcctcggtcaattggctctccaaattcagcggatcctgccagttgaatttgggagctgcggctttggagctcgtgctggccaagcggcgggcacacggtcgcagtttgctgattacactttgcgcaatcataattccgattcggttctgtcttttctgttggaagtgatcagccggttctccacggaacagctgctcgattcgacgttcggcgagagactgaagaaagcttaaatctacagcgagagcttttggctgcccgctcttcgcgcgctctcttcgctcttcttcgccaactttgtttacctcgctttaatattgttgttatgcccgatcttaatctgcgggttctaaatttttcgcactatcgcgcttatatttcacttgacgatagaaaccaagagtgaagcgagtgtggaaggaaatatttttccattttaagcgttatcaccacttggcgggggtcgtctgcttatcagttgtgtttgaagactggaaggcacgcccccttgctctttgtgcttcgagttttgggtacagatgcatcttatgcgttcagaacaaatatgtaatataccaatctgaatccacatatgtagctacatcactacttttctctattttcctgcaggtgaagcgtctgcgtcagcgtgtggaggagctgaagcgggagttagctggtgctgaggacgaactggattcggccgttaaccaagtgcgccgcttgcagcgttccaacgatgagctggtgggtcagacggaaggattacaggtgcagattcagcacctccagaataggtaagatcagttcgaaagaaacatttagatttgcataccgctaagtctgtggactaactctaataaccactaacttttcaactggtgctggcttgactaataacctaactcctaacccacgcttaacccaacgaaaaagacgtgctcccagtccccagctgcggggcatgggcggggtgcaattgaggaataagattgccgtggagctgcccaacgactgtctgccgaatatcaatgatcttcgccagatctttgatgactcgcaggcaggtttgaggagctcccacaatggcagcgatgccgctatgcatcatgctgcttccgtaaagagatctagtcacacggaacgaacgctcctgcagcagcagcagagtagtgctgcggcatctgcagcggcggcggcagcggcagcagctgctttttttgatgccaagcccacgcatctggaggagaatatatttgagtcgaagtcacggaatctggagttcgagcgggccaagcagaaattcgataatcctcacggacagcaccatcatcatcaccagaggcagcgatccggaaacggacgttatggcagcgcaggcagcagtgccagtcgagcgaatctagcgctgcccctgaagggaaccacaaatggaggcagcagctccgtttccagtaaggatgagctaaaccgacagctgtacgagaaggagcagtctgcaggcgctggatatgcgagaaacagcattaatctagatggtctcaaggtgtccgacgatgaggtgagattagaggagcagaaacgattgttatcacttgagtaaactaatgctttgttagttattgtgttcatcacattattggtttgatttgttttagcatcactaatccttttactgcatgtattggttttactaatcaatgtataattctaggtaaatataataactatttgtgatttaaatttcagactccgtagctatggttcgacaagcttgctgctggacgacgagacggagggtaacagcgactaggataaccagacaaaagacatttgagagacattaatggtattaaccttaagtattaattcgcaagtactttaaagttggttggacaacagtcccaaatataatgcgcattcctagtttatatttgggccttttaccaaccggtgccccagttttttttataagcataactattgcagaacgattgttcatgaacaaatacttacttataaactaagatattcttaatttcgcgactaattccaatcatcagatcaccagttagccactttcataacttcaatattccaagtaatttaaggataacgtttgaaactcatctagctggccatattcttatgagcttaacccgcagctaagacggttgttaggaggatttctccttcacatccttgcatcctcatcggaaacccttgcctttactaaaaatgaacagacttaataacagatataccgacatatatacgtattgaagcataatacaggttcgatgtttgcggaatagcatttagtgccagaaatctaaagaaattgtatgagatttaggaaagcattgatagaaatgctgctatttattaatcgacattattggaaattatacaagtaattctcactacatatttcgatatttttgcagttgcctagtccgaaattcttttagtttttcaaaagtctatcgatattcagcggcatagttgatcttttacaaaaaaatatatatacacattaaacaaatcggaactcaaaatatttacgtattataacatagcaatattagtattttagttattgataaataacaatttattaactattaaaattatatataaaatacaaatgatatgccaataaaggtagcatgttacaagataaacccttcttgcaaatcctgtcctgctttttgatcgtcttcgtggaagcacagtaccttctgtcagatcttcaaacttcaatcgttcagacattatacaaaattggaagagtgggaaaattggaataaact

SEQ ID NO: 32534 - DNA, 915 bp, DROSOPHILA
atgcccgatcttaatctgcgggtgaagcgtctgcgtcagcgtgtggaggagctgaagcgggagttagctggtgctgaggacgaactggattcggccgttaaccaagtgcgccgcttgcagcgttccaacgatgagctggtgggtcagacggaaggattacaggtgcagattcagcacctccagaatagacgtgctcccagtccccagctgcggggcatgggcggggtgcaattgaggaataagattgccgtggagctgcccaacgactgtctgccgaatatcaatgatcttcgccagatctttgatgactcgcaggcaggtttgaggagctcccacaatggcagcgatgccgctatgcatcatgctgcttccgtaaagagatctagtcacacggaacgaacgctcctgcagcagcagcagagtagtgctgcggcatctgcagcggcggcggcagcggcagcagctgctttttttgatgccaagcccacgcatctggaggagaatatatttgagtcgaagtcacggaatctggagttcgagcgggccaagcagaaattcgataatcctcacggacagcaccatcatcatcaccagaggcagcgatccggaaacggacgttatggcagcgcaggcagcagtgccagtcgagcgaatctagcgctgcccctgaagggaaccacaaatggaggcagcagctccgtttccagtaaggatgagctaaaccgacagctgtacgagaaggagcagtctgcaggcgctggatatgcgagaaacagcattaatctagatggtctcaaggtgtccgacgatgaggtgagattagaggagcagaaacgattgttatcacttgaactccgtagctatggttcgacaagcttgctgctggacgacgagacggagggtaacagcgactag

SEQ ID NO: 32535 - protein, 304 aa, DROSOPHILA
MPDLNLRVKRLRQRVEELKRELAGAEDELDSAVNQVRRLQRSNDELVGQTEGLQVQIQHLQNRRAPSPQLRGMGGVQLRNKIAVELPNDCLPNINDLRQIFDDSQAGLRSSHNGSDAAMHHAASVKRSSHTERTLLQQQQSSAAASAAAAAAAAAAFFDAKPTHLEENIFESKSRNLEFERAKQKFDNPHGQHHHHHQRQRSGNGRYGSAGSSASRANLALPLKGTTNGGSSSVSSKDELNRQLYEKEQSAGAGYARNSINLDGLKVSDDEVRLEEQKRLLSLELRSYGSTSLLLDDETEGNSD

SEQ ID NO: 32536 - DNA, 3364 bp, DROSOPHILA
aaacgaaaagaaaacatctcaaattactcagccaaaacgaaagtgaaattcatgttggccttcaacagttttgtattgtgttttttttttattttgggcccaaacataagtgcacttcatcataaattattcaacttaaaacgttacaaaagatttggttagcgatctcggaaaatgaatattttataaaataaacattgaaattgattaggaacaagcatttgtacatgcaagtatttcagatttattgtgtatctgtgaatttatcaattcatatttaacttcaaagctttaactaattcggtacaagcactttatctttaaacaattgggttggtttttgcgccatttaaatgaattttgcatatatccccttcacgttccattgattttcctggttattttgaataaatttaatgttgtggaacttttacaatccgcatttttatcatacaatttccattgtctttttcggtttttggctttggaaaagttctcgttattgatatttttgcagctgttgcggttgccggcagccaagcacagtgaaccctttccgcagatggaggagatacagtaaagctctgcccaaacgaccaatatttgttattgtttttgctattattttatccagccctctcgaaaacttaacaacaacgtcagctgttggaaattcaatttaatttgttcgacagaaactggtacacaaaaatgttcgtaccgaaacatatatatacgacttatttatcgactagaactcaaatttcattttctgttttcaaacaattcaatgcgatttatgtggtatataactctggggattcttctctatttatcgcactttgtgctgacgacatttaaacctataaataggctgtatgcacatacatacatccatatatatgccacaatttgcatgcagttgcagcttttgatgtttacattgtctcagttcgccacaaactcattagcattgtggttaagtgggtgttgaagctccatggtgatgccccagcatgtggttatatctccgatgttgatgatgcgcttttatggcattaggtttttactacaaagaattgagagctaattaggccgcgaatgtttttagctggtttgcaatgggaaagatgtgcaaaattggcttccaattataaatttcttcaaaaaagagggaaaatggttttccattgcctgctgttagccgtgtatatcgatttgagtttccctttaatttcccaaacgccccctactgacaccgaaaacacagtttccgcttatgccattttatcaagtttttgttttttccgctttggcaaaacattttcgtaaaataaattagcattcgcaatgagtgttgagctgcgaggatgggagtggaaccgaaacagggctacatttaagtgtcgtaattaaaaacaattttcagttggtcgatggattgccatggagtttagaccgcaaccaactcgtgccgagctccatgaaaatgctaactataatgcttcattatagaagttttaaaccgatttaattgaaagccaattccaggctggttccctccctcccattgttgtgccaaaatgaacttcacggctcggcgctcaactattacgccagcaattacatatatcattcatcatatatatagacatgtatatagacacatgataatctcgttttgagtattctaacaagtttctcctcccacccgcagtctctccagcgtgcggatcgtgctgctggtgcgagatccacgaggtacgatgcagtcgaggcgacatcgagtgtggtgcggaggcaacgaggactgcgaggatccacgactggtgtgccaggatctgcgggatgactacaagacagcggaggtgctgttgctgaaatatccgtctcgttttaggtaagttatctcatttcatattcaaactgtggctgtgtgttgaacataacaatttctttgcctaccaggactgttcgttatgaggacctatccttgagtcccagtgagatgacccaggacatcttgcagttctatggcttgccatttgatcctgcagtggaggagtttttggacacgcacaccaaggtcaacattggaggtgtcagttccacatatcgagattccagatcagcgccattccattggatgcaggatctcaagccagaagaggtaatgtattcttcataagtttctttgtttagctaactaataatggtactatcccattttagatcaagcaaatccaggatgtctgcactgaagcgatggatttgtggggctatcgccgcatcgagaacttcaacaacttctccaccacccagcagaccttcgatccgatggttatgccgccaccgttcacgtgaagcgctcctagtgctggccgatcgtttacgagaaactgatatggataactaattcttctacttggtacattttgatgtgatatcgtcgtgttgagcgagcaaaaagaaatatgaaaagaacggaagaaggcagcgagatatagaccgattggatggagcaactgggtgcattgtgcattgtgaaaaactcattcatagcgggcacatttttgctacacacgcagacacacttaactgagcaatagttcataatatatgtaaactgaatatacaatatgaaatgcataattttagtaattggcgaatttttgtgtagagagtaaagcggtacgaaaaccagtcgaatatcagatttacatttaggcctagaacttaagcaaacaataactgaaaacttagtctaaatagggctgcgtatagtggaatgtttacttggctttttgatgtaaattatttaggcaaacaacttttgtaatttggcttaacaatgaaatccagtgatttagcatataacaaccaaaacgtatcacagagatattaataaaatacaacgtttgaaattaatcgagatgcaattatacaacaatgtttggcaaaccaaaaactgtgcaatattatcaaattggaaaaacaattaaattaccctagtatcaatttagacacaaattttctaaagaaaattcaaattataaaaatgtattaagaagagcaatgggcactcaattcctactcataagtttccttaggcataaattatttgtatggttatttagttgtaattgtaattaaattgtactatactttatgtccttattatataaatgagttatgttcgttttctttttccgaaacgaagcccagttcatcgatagatacgttaaagagtaaatggatgtttaataaacaaaagaatccagcaatatttgcataattacacttattaagcaagataccaactgaataaacaatgaattataaaaataataatttcgtgtttctc

SEQ ID NO: 32537 - DNA, 552 bp, DROSOPHILA
atggtgatgccccagcatgtggttatatctccgattctctccagcgtgcggatcgtgctgctggtgcgagatccacgaggtacgatgcagtcgaggcgacatcgagtgtggtgcggaggcaacgaggactgcgaggatccacgactggtgtgccaggatctgcgggatgactacaagacagcggaggtgctgttgctgaaatatccgtctcgttttaggactgttcgttatgaggacctatccttgagtcccagtgagatgacccaggacatcttgcagttctatggcttgccatttgatcctgcagtggaggagtttttggacacgcacaccaaggtcaacattggaggtgtcagttccacatatcgagattccagatcagcgccattccattggatgcaggatctcaagccagaagagatcaagcaaatccaggatgtctgcactgaagcgatggatttgtggggctatcgccgcatcgagaacttcaacaacttctccaccacccagcagaccttcgatccgatggttatgccgccaccgttcacgtga

SEQ ID NO: 32538 - protein, 183 aa, DROSOPHILA
MVMPQHVVISPILSSVRIVLLVRDPRGTMQSRRHRVWCGGNEDCEDPRLVCQDLRDDYKTAEVLLLKYPSRFRTVRYEDLSLSPSEMTQDILQFYGLPFDPAVEEFLDTHTKVNIGGVSSTYRDSRSAPFHWMQDLKPEEIKQIQDVCTEAMDLWGYRRIENFNNFSTTQQTFDPMVMPPPFT

SEQ ID NO: 32539 - DNA, 2948 bp, DROSOPHILA
agttccgggacctggccatttggtttcgtcttaaccaattaattatattcttttcatttaataaaggttttacttttcattttaataatatggtgtctaatatttcatagttagactgcacacacataaatttagttttgcgctcaattctagttctaggactaatcaatcattttaacacgttttatttaataaagtttttcaatttgtattttattacatcaacgaaataatacaaagatagtggtacaaattaaagcaacaatatacctcgcatccatgggaaaattgtgccgacaaaaagagcaaagggaacttgcagagtctgacaattgggtcctaattgatgtacatatatctatcaattaggagggggtctaacaagtcaatggaatatttggttcgttttatcacagcttcatccgattgaatgaaataacaaagtgggacaaatatgcacgaccaaagcatttaatcaatgcactcttttggtggccaccgaaaccgcccagctgaaattgtggacacccttgtaatgataaaaaacactgttaacagaaaacgtacaaataaaacgttctaataaaataataaatgtgcagataacggccttatacaaaactaatttaattaatttcaaattggcagaaaggttacaaaaactggatttaaacgttagtaataattactatattataatctccgaaatactttattttgcatctgtgccaaagtttaatgccatcttgcaaagaggcgtaaaccattccaaagccgatggaattgtttggacatggcgccgaaaaatatttggtaaacaaaaaaataaccaaataaacgaaccttatctgagaagacacataattaccgtgggagcagctagtagcagataaacatatcagttccacttgtcacttgggcgacgtctagtacctatttatgtatttacaagggcaaagttagggggaagagccgaggcagagccctgaccagctcaaggtcatttcttatctccgccctgcggatccgacaagaagtacacgatcttcagaagctcattgaactttggcgtatgcctgggatggcgtttctcaaggccagcaatctgctcgagggccacttccacatccactacattgcctaagatcgaatgcaggcgctggggatattttctcgcggctcgctccacacgtttgcgcgttttctccagcatactcagttgttcctggctgcttactttgtggtagctcaccaccagcgtgtttagttgaggcagactatcggccagtgggaagccgaagtcttctgcatcagataggccaagtcgctctagacgcttgcttccctccgactgcagaatggtcgcctccacgggataccgatttgaggttaggtccaggtgctttagtggcaattgatccagcaattctgagagatggggcagctccacggagcattcgggtgcgactagggtctttaaattggagagtccagtgaggtactttcccgtgatgtacgcacttgacacgctcaggctacgcagttggtgacagctcttggctatagtgctaatcatgctattgttcatgttctcatccgcgatgcagagctcctggagattgctgtaatcccgccgcagatagaaggccaattcgggtcgcatcagatggcgacccaagtacgagtcgaacgcctttttgtgcacgttccaaatgtacagctcctccattgcgggactggtcagttcgaagaaatatatgtagtcctccttactcagaggtttcagcatggaatcagatacggaaaccttccggtaccgcggctttcgccacacaattaggcagaggagctctttgaagcgcggcgctagcctggccatcttgatctgctccacgagcggcaggaactctagtatattgcatacacagtcatcgtttagcctctccattttaaataagttagagccagtataaataaataagtcaatattatgttcttgcttaaaacagtgggaccaggtagcgagcggcaaaatataccgagcaattctgaaatgaaaatactgaatgctacgaaactagttagtaactttcaaagtatgtatatactaaaatagtagagggtatctgttaacggtatctcaactaaagtcacttttcttgtttcaaaaaacttttaatagatgataattagcgaaataaaagtgcaaataaaagatgttatattataaatgattttcgtgcaaagtataatattatatataaaagtataataggtatatatattaatctcaattgtttttagttttcatttacatcttgcgttaaaagtttctgcaatcgccacaacagcaattggaaaaactttctacgtgcccggcggcccgcaaatcgcattgcatacgtatcaattaacattttgagtgggtttccatgttgaactgtcactttgatgcgcatgctgcggcattcggcgcccccaggatgaccccctccccatcccacacaacaaaatcgaaaggccccaaaccaaaggccaatatcccagtctgactgttgccgcgcttctttggctcgcatgatttgtgcgtgatcatgcgaaatgtaaattatttatgtattgtaggggcattatcctgcagcagtatggagttctgctttccctcagtccagagtccaaattcaagagtatgagtagtctgcgtctcgccttcacaatagcgcaaaaatagccaactgtcggaggaacccttgtcaggacatgggacgccaattgattggcattagtggcgggatggtggcaatagctgatgtgcccggaataacgaatcggagcaaaaaattaaagcaaacatttaaaatgtacactccatcgctatcgtagatgccataaattggaatggtggagaaattaggtcactgaacccacatcatgtttgctgtaagctg

SEQ ID NO: 32540 - DNA, 948 bp, DROSOPHILA
atggagaggctaaacgatgactgtgtatgcaatatactagagttcctgccgctcgtggagcagatcaagatggccaggctagcgccgcgcttcaaagagctcctctgcctaattgtgtggcgaaagccgcggtaccggaaggtttccgtatctgattccatgctgaaacctctgagtaaggaggactacatatatttcttcgaactgaccagtcccgcaatggaggagctgtacatttggaacgtgcacaaaaaggcgttcgactcgtacttgggtcgccatctgatgcgacccgaattggccttctatctgcggcgggattacagcaatctccaggagctctgcatcgcggatgagaacatgaacaatagcatgattagcactatagccaagagctgtcaccaactgcgtagcctgagcgtgtcaagtgcgtacatcacgggaaagtacctcactggactctccaatttaaagaccctagtcgcacccgaatgctccgtggagctgccccatctctcagaattgctggatcaattgccactaaagcacctggacctaacctcaaatcggtatcccgtggaggcgaccattctgcagtcggagggaagcaagcgtctagagcgacttggcctatctgatgcagaagacttcggcttcccactggccgatagtctgcctcaactaaacacgctggtggtgagctaccacaaagtaagcagccaggaacaactgagtatgctggagaaaacgcgcaaacgtgtggagcgagccgcgagaaaatatccccagcgcctgcattcgatcttaggcaatgtagtggatgtggaagtggccctcgagcagattgctggccttgagaaacgccatcccaggcatacgccaaagttcaatgagcttctgaagatcgtgtacttcttgtcggatccgcagggcggagataagaaatga

SEQ ID NO: 32541 - protein, 315 aa, DROSOPHILA
MERLNDDCVCNILEFLPLVEQIKMARLAPRFKELLCLIVWRKPRYRKVSVSDSMLKPLSKEDYIYFFELTSPAMEELYIWNVHKKAFDSYLGRHLMRPELAFYLRRDYSNLQELCIADENMNNSMISTIAKSCHQLRSLSVSSAYITGKYLTGLSNLKTLVAPECSVELPHLSELLDQLPLKHLDLTSNRYPVEATILQSEGSKRLERLGLSDAEDFGFPLADSLPQLNTLVVSYHKVSSQEQLSMLEKTRKRVERAARKYPQRLHSILGNVVDVEVALEQIAGLEKRHPRHTPKFNELLKIVYFLSDPQGGDKK

SEQ ID NO: 32542 - DNA, 2270 bp, DROSOPHILA
tgggaaaactggtgacgaagctaggccgtagccatgggcatcaaccagtaccagcaccggcttggttcagccggggatctggtgttgggtaaacagcgattaacattgttttgatttatgccgctgccctctcgctctccggatcacgcctcctccccgcctaatgccatattccatattcaagggactggggcgcccataaccaaatcctttggaaatcgctggcaaaactgggtccatttacactgccagtcgctctttcaaactattcaaagtgcggtgattttttgaggttaatgcatcctcgggctagagcatcatccgtaccccgactgctccaggcattattaatttttaattcgccttcattcacaggagctacggccgggctccaactccatgcccaactccttgggcgaactcttatctgttgcacacagtcctgctggccgagcctgagaatgcccaggatgctaatgaagcgatgcggatgtcctcatcgccttcgcattgcattgtcttggccaactcgagacttctcggatacacaggctcgctgaaagttttcttagcaaaagtttgtcttgtaatcaagaaaaatatggccatgttgattcaatatactccagatggcaaaggtggatcggtgtctgccgtgcaaataaatattattccaagctcttaagtcgcaggacaagttagccaagttaattattctagattaccaatgttgtttcaagactttaaaccatattgaaaaagtaaagaacatttctacataaattattcattgtcttaatcgctgtctttgttattatgatcatatccaaatgataattttatatgtatatatatttataatattaaaatttaaaaactatgttactccactgtgattacaatgattaagttaaccgcttaaccgagaagagatgtacacaaaattcaagaagcaaacgagcgtgggcgcaaaattcgcgcgacgaaccatttaatggaattaagtaagcaattcggaacgagaaaatatatcaccttggagagcaccgccccagcagagccagaaaagagcccatttggcggtgcagaagcgctgtagccacgccggattccagccgcaccatccaaatcgctggcactccgcatccgaatccggtccggagatggagctgcccacccgactggagcgggcactattgttgttgttcacattggagcacttgggtgccacggcgatgctcgagtccagctcaatggtagcctccgacatggtttctttcactttctggtgccgcacaacaagacgcgttacgaatgcctctgcgatccgcaccgaacgacggccggaaactgactgagctcagatattcaaacagcagctcagctcagcccgactttgctgttaaggactcgtcgctaacagcggtctgttgaaggaaatcaaaccaccctgctgtgcctgtaccgacacccactcggaacatctcggattcatgaatgaaacaccaacccgcccacccactcattcagcttcgctccactccactcacttattcgcacctatcaacagttgtcatggcgctgctttcgttagccgtattatctggggaattgtgaggcgacgatggagcaggcggggagcatggtgactcctctcttatgaaatataaattatattccccttttggcaaatatttatcaaacacaaagaattttaaaaagtgacccacttaaactcatttatagtttcattacaactttcatgtttattcaataaatttttcggtttagtagtttttttcttctaatttataaacttattttatgtaaaataggtactaaacttgccaatgttaaataaaatcatagctattgacaaaaaaaaacaaattttttaagcgaagaacaaattatttaattggtttgctggtgaattcagttggccaaaaaaaacggggatctagtttaaggcaaacttctagcgaccggtaagcaccagaaatatcaactatttgtaaattaagtacagtacattttttaagtaattccacttaactgatgaagatacgttgaaacattttggaaaatatttgaaaaatttgtttgcttttgactacttaaatacgtacataatatatagatatatacacatatccatattgttacacttaaagtattaaacaataaaatagtaaacaaaaacaaaaatcgttaacaaagagcaaaaaaaaaatatatatatcggagctcggtgtagcttcgtctagact

SEQ ID NO: 32543 - DNA, 270 bp, DROSOPHILA
atgtcggaggctaccattgagctggactcgagcatcgccgtggcacccaagtgctccaatgtgaacaacaacaatagtgcccgctccagtcgggtgggcagctccatctccggaccggattcggatgcggagtgccagcgatttggatggtgcggctggaatccggcgtggctacagcgcttctgcaccgccaaatgggctcttttctggctctgctggggcggtgctctccaaggtgatatattttctcgttccgaattgcttacttaa

SEQ ID NO: 32544 - protein, 89 aa, DROSOPHILA
MSEATIELDSSIAVAPKCSNVNNNNSARSSRVGSSISGPDSDAECQRFGWCGWNPAWLQRFCTAKWALFWLCWGGALQGDIFSRSELLT

SEQ ID NO: 32545 - DNA, 8372 bp, DROSOPHILA
cttggctggtgggctaattacattacaaacaaaataagtggcaattcgtaagctgattaagtacctaatttatgtaagcagttgttttgaaagttgttccaattcgtaatacttcagttgaaccgatttagtttgcactttagatttgagttgagaaagcgagaagaaattaaaataatgaattgcactatacataggtgttaagtaatcctatggcgggagaatttcccttaataaattgtaacaatagtgcttttcgcatagtaaatattaacttaagtaacaatgtgtttccggtggctgtattctgattatggttaatttttcagtaagtattcatttgaatcggtaagtacaaatttttcatccacacgatttttgttccctattccctatgcaactttctaagagtcagctattaatggcacactaagccaaatagtgtttcaataggtttttatgatttaaatatatgtgtgtacatttaaaatgttgtttttacattttacattcattaaagtatatccgctttttagggtcagtactcacttcagaaaaaaaggacacgaaaaataatgaaccacatgttcttaatttcggaagcaattttcttgaagtgaatattgagcatttgaattgcatttctatgccatataggtgtaattaaaatatatttatattttcttgtgttataaaacttaaaatgaatttaaccaaaaataaaacaaagttagtaataacttgtgtacttcatcatattttgttggggaagttgggacagacccaatctttcattatcattatcatccttgacttcctaaccatttttcaaggcgggtggggtacagtacgaaggagagccatgggaatgctgggtgggtgttagatttaatcgtttgagttgggtgttttcacatttcgcatcattatttgctttccatgtagttacgcatttcaatatatttacgcaccaaatatatctagttgatcctaggcccctttaaactacatttgaaactgtttcctcttggtcttgctgtttatcctctggcagaacgcagtcggcgacctcgctgtgcatcacaatttcaatgtcacccagttcggtgactgcctccgccttcagcgccacatcctctgccctcgatagcttctgcagcgtgtgcaacgtttcctcgttgatcgtgtgctccggcgaaatgttttcctttaactgacgcttcaggctcagcgggatgtacgctgcattgcactccggcggcgatggcgactctgtgctgctggaagcagacgttcccgtgctcaactcactttgcggaggtgcactgggcgtggcctgttcaccgctgttgttaaaggagatgttttggcgaaagacttgcttgctaaagtctctcagctgtctagaggctgtgtccagaaaggacgaacttcccgtctccgtgctggaggcagtattttggctggcgttggagatgttgctaccggtcagagaggcccacgatgcaggagcagttttccgcgcaaccgaaagaattggatttgaattggtgatggtactggagtcgcctcctacgacgcttgccgctgtagcgtctgtcaaagcacatattacaggaattattaataaaataaatttagtaatatgggtctttaaattcttaatccccttaataacacttatacaggaggtaagcagctttaaaataattcaatgcaaagtataccaaagttattattaaaatggaacatttatagagaattcttcaaatattatggttcctttatgactagaattatcccctttgtatatacatataaattacataaaaaacaactaactctgtgagctgtttgtgatcgtgttggcggcgggcacgtggcttatttgactagccttgggttccggcgaggagccaatgttgaatattgtaagcagcttgtctaccgccgacgggttggctatccacgatgttttccgggcacgcgtctgtggcgcattgctgacgggctcggcaggtggcagcgactctggttcacttttgagaacaggattcgtattgttcgctgcagcagctgcagagagagcaaccacgccggccgattccttggtcaacgtgatgtcattatcgccgaacacggccaggggacagatcctttgtggaacttctgggccagaagaggctacagagtctgtaacgtcggtggaagttgaggtgcttccattacaattactactgctcccgctgctgctgctaccgggcgaagttgagcttgagtgacttgaggtgggtgatatggtcaggtgcggagaaaccttttgcccggttacctctacggcttttgtacttatgtgtgcgtcgatgttatcgctggactctacaatgaccacactgcttactggaacggcagcagctgccgcctccactgcttcggacaacaggaccgcctttctcgccgatttcagcataggtgtgggtggtagatcaattggtggcgtatgtggcgtaatcggcggcatctgccggttggccatcggcacctggggatcctcgtagatgcgagacacgtggaagcgagacctcggcgataccgacagccgcttgatcgtctgcgtcgaggaggtaacagatgccatggcgggcagagaactggaggtcggcagggccccaacggcattaaggctgttctgactgccactgggcgatccaatggtgggtatggacatacagctgctggccgagcgtggcgtgtgcgggggcggatgctgggccagcggcgagatcagtggacttgccacttcagccacccgtgaaacgtgaaagcggctgcggttcggcgaggacgacggcgatatagtgggcggacttggtcccggagagcggagacgtggtccacgcttcacctccaacagagcagtcggtgtgggcagggcggttgctgcagcggtcgcggttgacgttgcagtcaccgtgccagtagccgcgtctacaatcggccgactgtggcaggtcaacgagatcttccgcgagcccaagtagtaaccgccgcgacaccgtatgcccggaaggctgcctcccacattgctgccgccgccgaccatgttcgccgtcttctccgccagctcctgggcttgccgcttctcatttcgcgagcacaaggagcgaacggtgcccagcacccttgtgtaatccaagtgcgcatcgctgccgatctgaaataagagtacagagggatagtaaccaatcagtatgggaattttcaattctattcgctagcggatcattttttatttgaagtcaagctgcttctgattgaagtagttagttgtggcattgctcagttaacacatgtataacgtcgaaaggagttcgggtttaaaactgagcaagtggacaactggtttttgttatcaaagcgaacgaatcttaaattaaactaaagtgaaaagttagctggggttcaggctacgccaactacttaaaccaggtggtcagagtgcgtttcagttgttagcaatgttatcagatgcaagccaagcgtggtcaaaggactgcagcagttgagcacagagggcagtaggcagagaattggaggagcaaattgagtgagggtttacttacgctctcctggggcaaaggcgatggcggtataacatttactatcggcactatgggcaactttaacggagatgagagaggcaacagcagtgaccacaaatgtaaacgatttgattaaaaattcaaaatcaaaactatcaacgcataaaacgtctataataacacagccatccaaaaccaagcacgatattgcattaagtcatggtaacaatatgtttatctacggccagccgcagcattgtttactcttggcaaaataattatttgtctagaaactttgggttttacattaaataataaacatatttctaatatcattaaaatttggttatcaagagtaaagagctacaaatgtggcaaaatgtcaaactcttttgttaagcaaatagatgccaacaaaatttatgattgatgttacttgcgaatttacgaactttcatttgcttaacaaaagatgtagtttgaatgaaatggaaactcaaattctaccatggtcacgcatggtactcttggatttaatggacaattccggggccagataacttaccgtcagtcgttttggctcatcgttaatgtcgatctgcgtgagcgtcttattggacttgagcacctcggcgattatattcagactttccacctctagtttattgtcgcggatgtcaatgcgctggagcttgctgttgccaccaaaggtaaggatggaggccagtgtctctatccccttggcatttagatgggcactctgtagccccaaagttgtcagagtggtgtttttcgtcaaactgtcctttatggttgaaacgaaatcattggagagacaattcttgccaatattaagcagttccagcgaaatggtcttctgcagtaattctgccactgcaggtgcgcagtccttgcttaaattattattccacagagtaagagccttcagtccgctaggcgatcggttggcctccagtgttgcctcggccagctgccggcgcgaaagtgtgtcattcttagttagtttttccgcaaacttgggatcagcggaagccgtagagctgacactgttgttgctggcaccgctactcatgccgtcgagcgatgtctcgctgcacaggctatcggagctctgcgatcggttgcgactggactgattgaggtacgcacaactggactcggtgcgtctcaagccaaggcttgctcctcccggcgacgtggacggtggtgggggcgtaggcgctggactgagagacggataggaactgggactaagttctttatccttcaggaggcactcctcggcaatggttacttttgggggcgggaatgcattttcaagtttttctagcgctgggacaactggcgtaggtgtgagcgtcgctgcctcctgggctgcgagaaggcactcggttgactccgtggcaatggtagccgtctctatgccgcacatctctttcgtcatatcatccagtcgcgtgctctccagtaacaccgaaaggcggcttaactcgtcgggcagatggcgacttatgtcgccttcagatgcgctctcgaacgccgagtccgtgctgtgcgtgtcctcgaagtcttctccagccttggcgtttttgtttacatcaagtggacgcgacccggcagcccccgccacagcactgccattgatacagtcgctttcctcggccgtgacttcaaaaatagccgctggcgaggaaccacttggaatgttttcgatatccagttgcggtggtacgactgaaaggattgctgatgctcctgcttccgatggcaattgaattgtattattattggtattgttgtgggaattgttagcattgttattattattgttgtttatgatgttgttctgtacacaggattcattgggttcaacggttttagcctctgttgagggagtaatatctgaaaaagagaactaatttagcgctgtttgatttaactgtttaaagattaagttattcaccacataagttgcgttcgttttgagaacattgctgttgttgatgcgcaggagacagcggctccatggttgcacttgcaacagctaccgattctgactccatcgggctggatgagatcatggccggagcgacttcgccttctgctgtaggctgcttgacggcattgggttcataaatctcgttgctgatttcgctgatgtcctcggagcagcaggctgccaaggtgtcggtggatatgtttgagggcgcctcttcgctgctgctttcgctattcatggagagcagcttgtccagcatcgactggccgcttccgttttggttgcagtttctgacagtgcgaacagtgtcctccgtgttttcgtcgtcgttatcattctccaaatccacaagaacacctaccgctggatcagtagatgtcgcctcctccgacgttgtctctaaaatggaggcttcgtgcgcaggtaactcaccatcgacgaagtctttcgcttgattggtggtcgagctagtggatgggggaatggcttccgggggctccgtttccataggtgacacgcactcgtccacctcaatggcacgggtgcgcttcaaggcacccattcgtcgctccagctcggtggactgaaggattagggcttgtaccaggtacatgacaccctcgttcctaatgttattattgctaatgtcgattagctccaagctatggttgtagcgcagcatgtctgctatgtgctgggcatctacacagtccaagtcgttgtaccccacccacagctccttgagccttttgttttgataaagaccacggcctgcaaacgacactaaaatataataaatacaatttcggaagtatttaaatattgattacatcttaggtttcgttgcatttgtctatcttatatcttcgtgttgatcttatcacaaatcgctattcccaaacgtaaccaaaccgactgacttacataaattgacgagtggcgctcccctgaggccgcagtgctccagctttaatgtgtgcaggttggatgaaccgagggcccgcccaagactgtcggcacccaactttgttatcggattgctctcggcgttgagcagctgcagctcttggctgcgctccaccatgtaagcacacagttcccagcagcgctttgtcatctccgccttgttgtaggaaatgtccagctcattggcagcttcatagtattcgatcatctggaagagggccattaaactgctctcgtccagcgtgcactcggacagatcgatgcatgtgtattgtatctgcaagttaatattggcgttttactaatcaaagtccgaagctggatgttccatcttacccgtttgaaaatctcctcgagcgcttcgcaatcgttggcggttaattctttcgctttaagaggaagtaaaggctgccgcgcttggttcagatccagggtcctcaggtgatccactacgctctctaatggctgggtgttgtgcttcttacacgactgctgatactgatcgacaatctcggagctgctcttcacgaggtatactgaaagggataaatcacttagttaatatacagatatcaacatattcatatcgataaaaaatcgacaagtattcgagtcagttcttctgttctggccactcaagtgtcgccacttcaaaaggcaacaaatatattatatttggtcaaatacgacagataactaaaacatgtggcgcgtgcgagtgcttgcttggctccctaccccgaacatcataacccacttccagcatccatggtgacatgatcatcgacaattgccggcgtcggcaatagacaaattgtccgtctacacaaagtaaaaaaaaaaaaaaattaaatagaattgcggcggcaatttccaaacgatttgcttttttttccagcggggctggttgacacaaaatcgtgaacttgtaatttgcaactcatttgcgttgcgcctctttcattggggcaaacaaaaattcagaatccgcatagtctgctctttgatgacagctcatggccaacaacaggaactcttataaacagcttttgatgtgataaatacataaatatacgggtcgatgatgagcggtgctcgtcagaaatttaataattaaatttagtacacattcatatagtctgttttcctgggaactgtaggttactactgcaagtttgctgcgaactaagcgcaagaacattgtgccaaatgccaagtccacctttcttataaatagttggcagcacacctccacccagacaagcgtaggttcttatgaaaaacgtaaacaatttaatctatcattgcattatcgcggcacatcggcaattaaacgattcgttttagatctgccacaaactcggatgccaacacactggcgggcaatgggaggagagatgcgagtttttgtcgcgaaatctgttcgccgattccgaaagattttcaatcttggcaggcattcaaaagtgcttcagttctatttcatctatataatagttccttccgtccacctccgccaaaccgaggctgccttgagacccaacatctgttaagtgattcattagcgttgagtagaataattcaaaatctgaattattaccaattctcttacgaccaagcagcagacaatgtgacgaccaagtgtatggtctcttttggatttgttgtgcatttttaactataaataagaatgattcaagccaatcacattagtattggacacttggctttatgggtcaacggtcagcggatgagatacgaggcattatataaacacaagaaat

SEQ ID NO: 32546 - DNA, 4599 bp, DROSOPHILA
atgatcatgtcaccatggatgctggaagtgggttatgatgttcgggtatacctcgtgaagagcagctccgagattgtcgatcagtatcagcagtcgtgtaagaagcacaacacccagccattagagagcgtagtggatcacctgaggaccctggatctgaaccaagcgcggcagcctttacttcctcttaaagcgaaagaattaaccgccaacgattgcgaagcgctcgaggagattttcaaacggatacaatacacatgcatcgatctgtccgagtgcacgctggacgagagcagtttaatggccctcttccagatgatcgaatactatgaagctgccaatgagctggacatttcctacaacaaggcggagatgacaaagcgctgctgggaactgtgtgcttacatggtggagcgcagccaagagctgcagctgctcaacgccgagagcaatccgataacaaagttgggtgccgacagtcttgggcgggccctcggttcatccaacctgcacacattaaagctggagcactgcggcctcaggggagcgccactcgtcaatttatgccgtggtctttatcaaaacaaaaggctcaaggagctgtgggtggggtacaacgacttggactgtgtagatgcccagcacatagcagacatgctgcgctacaaccatagcttggagctaatcgacattagcaataataacattaggaacgagggtgtcatgtacctggtacaagccctaatccttcagtccaccgagctggagcgacgaatgggtgccttgaagcgcacccgtgccattgaggtggacgagtgcgtgtcacctatggaaacggagcccccggaagccattcccccatccactagctcgaccaccaatcaagcgaaagacttcgtcgatggtgagttacctgcgcacgaagcctccattttagagacaacgtcggaggaggcgacatctactgatccagcggtaggtgttcttgtggatttggagaatgataacgacgacgaaaacacggaggacactgttcgcactgtcagaaactgcaaccaaaacggaagcggccagtcgatgctggacaagctgctctccatgaatagcgaaagcagcagcgaagaggcgccctcaaacatatccaccgacaccttggcagcctgctgctccgaggacatcagcgaaatcagcaacgagatttatgaacccaatgccgtcaagcagcctacagcagaaggcgaagtcgctccggccatgatctcatccagcccgatggagtcagaatcggtagctgttgcaagtgcaaccatggagccgctgtctcctgcgcatcaacaacagcaatgttctcaaaacgaacgcaacttatgtgatattactccctcaacagaggctaaaaccgttgaacccaatgaatcctgtgtacagaacaacatcataaacaacaataataataacaatgctaacaattcccacaacaataccaataataatacaattcaattgccatcggaagcaggagcatcagcaatcctttcagtcgtaccaccgcaactggatatcgaaaacattccaagtggttcctcgccagcggctatttttgaagtcacggccgaggaaagcgactgtatcaatggcagtgctgtggcgggggctgccgggtcgcgtccacttgatgtaaacaaaaacgccaaggctggagaagacttcgaggacacgcacagcacggactcggcgttcgagagcgcatctgaaggcgacataagtcgccatctgcccgacgagttaagccgcctttcggtgttactggagagcacgcgactggatgatatgacgaaagagatgtgcggcatagagacggctaccattgccacggagtcaaccgagtgccttctcgcagcccaggaggcagcgacgctcacacctacgccagttgtcccagcgctagaaaaacttgaaaatgcattcccgcccccaaaagtaaccattgccgaggagtgcctcctgaaggataaagaacttagtcccagttcctatccgtctctcagtccagcgcctacgcccccaccaccgtccacgtcgccgggaggagcaagccttggcttgagacgcaccgagtccagttgtgcgtacctcaatcagtccagtcgcaaccgatcgcagagctccgatagcctgtgcagcgagacatcgctcgacggcatgagtagcggtgccagcaacaacagtgtcagctctacggcttccgctgatcccaagtttgcggaaaaactaactaagaatgacacactttcgcgccggcagctggccgaggcaacactggaggccaaccgatcgcctagcggactgaaggctcttactctgtggaataataatttaagcaaggactgcgcacctgcagtggcagaattactgcagaagaccatttcgctggaactgcttaatattggcaagaattgtctctccaatgatttcgtttcaaccataaaggacagtttgacgaaaaacaccactctgacaactttggggctacagagtgcccatctaaatgccaaggggatagagacactggcctccatccttacctttggtggcaacagcaagctccagcgcattgacatccgcgacaataaactagaggtggaaagtctgaatataatcgccgaggtgctcaagtccaataagacgctcacgcagatcgacattaacgatgagccaaaacgactgacgttgcccatagtgccgatagtaaatgttataccgccatcgcctttgccccaggagagcatcggcagcgatgcgcacttggattacacaagggtgctgggcaccgttcgctccttgtgctcgcgaaatgagaagcggcaagcccaggagctggcggagaagacggcgaacatggtcggcggcggcagcaatgtgggaggcagccttccgggcatacggtgtcgcggcggttactacttgggctcgcggaagatctcgttgacctgccacagtcggccgattgtagacgcggctactggcacggtgactgcaacgtcaaccgcgaccgctgcagcaaccgccctgcccacaccgactgctctgttggaggtgaagcgtggaccacgtctccgctctccgggaccaagtccgcccactatatcgccgtcgtcctcgccgaaccgcagccgctttcacgtttcacgggtggctgaagtggcaagtccactgatctcgccgctggcccagcatccgcccccgcacacgccacgctcggccagcagctgtatgtccatacccaccattggatcgcccagtggcagtcagaacagccttaatgccgttggggccctgccgacctccagttctctgcccgccatggcatctgttacctcctcgacgcagacgatcaagcggctgtcggtatcgccgaggtctcgcttccacgtgtctcgcatctacgaggatccccaggtgccgatggccaaccggcagatgccgccgattacgccacatacgccaccaattgatctaccacccacacctatgctgaaatcggcgagaaaggcggtcctgttgtccgaagcagtggaggcggcagctgctgccgttccagtaagcagtgtggtcattgtagagtccagcgataacatcgacgcacacataagtacaaaagccgtagaggtaaccgggcaaaaggtttctccgcacctgaccatatcacccacctcaagtcactcaagctcaacttcgcccggtagcagcagcagcgggagcagtagtaattgtaatggaagcacctcaacttccaccgacgttacagactctgtagcctcttctggcccagaagttccacaaaggatctgtcccctggccgtgttcggcgataatgacatcacgttgaccaaggaatcggccggcgtggttgctctctctgcagctgctgcagcgaacaatacgaatcctgttctcaaaagtgaaccagagtcgctgccacctgccgagcccgtcagcaatgcgccacagacgcgtgcccggaaaacatcgtggatagccaacccgtcggcggtagacaagctgcttacaatattcaacattggctcctcgccggaacccaaggctagtcaaataagccacgtgcccgccgccaacacgatcacaaacagctcacagaacgctacagcggcaagcgtcgtaggaggcgactccagtaccatcaccaattcaaatccaattctttcggttgcgcggaaaactgctcctgcatccggtgaacaggccacgcccagtgcacctccgcaaagtgagttgagcacgggaacgtctgcttccagcagcacagagtcgccatcgccgccggagtgcaatgcagcgtacatcccgctgagcctgaagcgtcagttaaaggaaaacatttcgccggagcacacgatcaacgaggaaacgttgcacacgctgcagaagctatcgagggcagaggatgtggcgctgaaggcggaggcagtcaccgaactgggtgacattgaaattgtgatgcacagcgaggtcgccgactgcgttctgccagaggataaacagcaagaccaagaggaaacagtttcaaatgtagtttaa

SEQ ID NO: 32547 - protein, 1532 aa, DROSOPHILA
MIMSPWMLEVGYDVRVYLVKSSSEIVDQYQQSCKKHNTQPLESVVDHLRTLDLNQARQPLLPLKAKELTANDCEALEEIFKRIQYTCIDLSECTLDESSLMALFQMIEYYEAANELDISYNKAEMTKRCWELCAYMVERSQELQLLNAESNPITKLGADSLGRALGSSNLHTLKLEHCGLRGAPLVNLCRGLYQNKRLKELWVGYNDLDCVDAQHIADMLRYNHSLELIDISNNNIRNEGVMYLVQALILQSTELERRMGALKRTRAIEVDECVSPMETEPPEAIPPSTSSTTNQAKDFVDGELPAHEASILETTSEEATSTDPAVGVLVDLENDNDDENTEDTVRTVRNCNQNGSGQSMLDKLLSMNSESSSEEAPSNISTDTLAACCSEDISEISNEIYEPNAVKQPTAEGEVAPAMISSSPMESESVAVASATMEPLSPAHQQQQCSQNERNLCDITPSTEAKTVEPNESCVQNNIINNNNNNNANNSHNNTNNNTIQLPSEAGASAILSVVPPQLDIENIPSGSSPAAIFEVTAEESDCINGSAVAGAAGSRPLDVNKNAKAGEDFEDTHSTDSAFESASEGDISRHLPDELSRLSVLLESTRLDDMTKEMCGIETATIATESTECLLAAQEAATLTPTPVVPALEKLENAFPPPKVTIAEECLLKDKELSPSSYPSLSPAPTPPPPSTSPGGASLGLRRTESSCAYLNQSSRNRSQSSDSLCSETSLDGMSSGASNNSVSSTASADPKFAEKLTKNDTLSRRQLAEATLEANRSPSGLKALTLWNNNLSKDCAPAVAELLQKTISLELLNIGKNCLSNDFVSTIKDSLTKNTTLTTLGLQSAHLNAKGIETLASILTFGGNSKLQRIDIRDNKLEVESLNIIAEVLKSNKTLTQIDINDEPKRLTLPIVPIVNVIPPSPLPQESIGSDAHLDYTRVLGTVRSLCSRNEKRQAQELAEKTANMVGGGSNVGGSLPGIRCRGGYYLGSRKISLTCHSRPIVDAATGTVTATSTATAAATALPTPTALLEVKRGPRLRSPGPSPPTISPSSSPNRSRFHVSRVAEVASPLISPLAQHPPPHTPRSASSCMSIPTIGSPSGSQNSLNAVGALPTSSSLPAMASVTSSTQTIKRLSVSPRSRFHVSRIYEDPQVPMANRQMPPITPHTPPIDLPPTPMLKSARKAVLLSEAVEAAAAAVPVSSVVIVESSDNIDAHISTKAVEVTGQKVSPHLTISPTSSHSSSTSPGSSSSGSSSNCNGSTSTSTDVTDSVASSGPEVPQRICPLAVFGDNDITLTKESAGVVALSAAAAANNTNPVLKSEPESLPPAEPVSNAPQTRARKTSWIANPSAVDKLLTIFNIGSSPEPKASQISHVPAANTITNSSQNATAASVVGGDSSTITNSNPILSVARKTAPASGEQATPSAPPQSELSTGTSASSSTESPSPPECNAAYIPLSLKRQLKENISPEHTINEETLHTLQKLSRAEDVALKAEAVTELGDIEIVMHSEVADCVLPEDKQQDQEETVSNVV

SEQ ID NO: 32548 - DNA, 2849 bp, DROSOPHILA
ctcaaccgtatcttatcagtaatttctgttatcgctgacgtgaaaataacaaataacaaaatcaaaggaaactcaaaagcaggaatagcatacacaaaaattgttcatcgccgggaattgaaaacaaattaaaaacttttaaaaacaaagcaatttgcgatttagcaaaatcagcatttcacgccgctgaagaatgtttatacgtagtttattgtattggcataaactgagaatgcttgtcttttatcattcgtatagctatagctaatatatgtttgttataaataataagtaatggaagtatgcttctagatgtgaaaatagattaggcataggaaactcttacatcatattaaataagatgtgtatctatgtatctttgcaggcgagaaacctgttgcgctgtcacgttaattaatttgttttattaatctcttaatcagcaccccactgtttcatttcccaaatggaatatgcaatttccttgggcttagcaacagaacaatttcccttcgctcgagtagcaaatagtttgtagaacgcatctgtcggatgcagcgcttttctctgttcactttgcgcagctggtaaataaatgtttctgcgcatttcgccgacttggcaaccatttgaaattagctgacagatctctcggatccttttcacacccgcagcacaatgggaagcaaatctactgctgtttaattgaataaaattcacaggaagtgaagcgaatgtgtctcgaatcgagtcgaatttgacttccgtgtttgaccgagttttatcgcctacgataagatcgaaagcacggaatcccagtgggtctacagaatgacaaattgtcaactgaacagtgagcaaatactgcaagcccggaagaaatctaactgcaattacccggaaagcccattctaatgatgtagaggcgcaaccaggtgtttctatatttagaaacagataaattggaattttgttcctaccaacaatatggaactttagctcaatcgttcagcttcttagtaagcactttagcgagctaagaatttcgtcactctagtttaaatatgatccgcatgggtcatcaaaatgtgatatgccatatcactaccccaaaattaaattaaaaaaataaattgtcatgacaaaactcaccttgcttccaaggattggccggctccaggtagccggtgaccagctggttatccggaaacgagacgcgtcgcgcaatggacgaggtgagcgagctgtccgatgattttcgctgcaggaggctgggcgccgtcgacaggatgatgcccctggggggcaggcccagggctccagtgactcctccgccagcgacagtgccaccgacaccacctgcaacacctcctgatcccgaactgacgaaatccgggcagatggtcgagctgggattggaggccagcgaatcggtgcgccacacggccgtctgcttggcatcgtggtatatcttgatcttgtgtcgttgctgcgttcgcatctgagcatcgaatgcggtcgcttcagtagctgcagccgcagcagcagtcgcatcaacgatcggcgcagcagtcgcatcagctgtttgtgctaatttcgttcgctctgccacagctgctgttgttgttgttgctggtgtttgaccctcagctgttgcacttgtttcccctacgccagctgatgtctttgctgcagcagcagatgttgttgcaaggtgcgtggcaattgttggctccgttccattgccttctgttgttgctgctgctgcagttgttgttgtgattggggtagctgttgctgctgttgttgttgtgtttggctctgcaatgtcgcgattgttgtgcagcattgttgcaaagcgttttcagttgccgctgtcgttttcaagtttgtcgcttttcaagtttgcagaatatctcgaactcgtagttatttttctttttttttttgttttggttttgttttgttatgttttacatttaaatacactttatttacacacaccaacacgatttggtatcgtattttattcgtatttttttgttacttttgttgtttgtgcttcaaacgtgcgcttcccgtttacattttcgaatgctttaatgtattattcttttttatttcaacactacaaattgaatatcaaaagcaaattaatttcaaagcgatttgtatgccgctcgcctacaaagtaatgttcgaatttgtcaaacgcatcgagtaatcagcaggggccagttttacaaaacacaaaaaattttccgctcaaaaatttccgccgtttcgaacgcacagtgggcccagccacagttggtccaaaactgtacatcattctgtaatgtaatgaatgtaactgcttcacttttctcacttctcactttttttatttgatttacagttaagccgtgtttattttaacacagtgttatttattatctgtaatatcagtctttaacccttccgactaatttcttttcaccccactgtgcaatgttaacaaaagaaaatggaatattaagaaaagagacaaaaagcgcagagcaaacgcacactatcaaacacgaagcaagagagcaaaagagaatggtataaaaaacattacctaattgttattgtttttgtttgcgtttgcattgccagagaagcaaaagagagagccagagggagagggaaaatcgagaaaagccagtcgcagattgtttgcgattgttgtttgttatcgcttttcccctctgcacttttcgcatttttgtttacgtgcctctgcaagtgtgggtgtgtgtgcggctgtactgcgtgcaagtgtgagtgtgtatttttgtgggaataacacgcgccctgttgcatgc

SEQ ID NO: 32549 - DNA, 723 bp, DROSOPHILA
atgctgcacaacaatcgcgacattgcagagccaaacacaacaacaacagcagcaacagctaccccaatcacaacaacaactgcagcagcagcaacaacagaaggcaatggaacggagccaacaattgccacgcaccttgcaacaacatctgctgctgcagcaaagacatcagctggcgtaggggaaacaagtgcaacagctgagggtcaaacaccagcaacaacaacaacagcagctgtggcagagcgaacgaaattagcacaaacagctgatgcgactgctgcgccgatcgttgatgcgactgctgctgcggctgcagctactgaagcgaccgcattcgatgctcagatgcgaacgcagcaacgacacaagatcaagatataccacgatgccaagcagacggccgtgtggcgcaccgattcgctggcctccaatcccagctcgaccatctgcccggatttcgtcagttcgggatcaggaggtgttgcaggtggtgtcggtggcactgtcgctggcggaggagtcactggagccctgggcctgccccccaggggcatcatcctgtcgacggcgcccagcctcctgcagcgaaaatcatcggacagctcgctcacctcgtccattgcgcgacgcgtctcgtttccggataaccagctggtcaccggctacctggagccggccaatccttggaagcaagtgcttactaagaagctgaacgattga

SEQ ID NO: 32550 - protein, 240 aa, DROSOPHILA
MLHNNRDIAEPNTTTTAATATPITTTTAAAATTEGNGTEPTIATHLATTSAAAAKTSAGVGETSATAEGQTPATTTTAAVAERTKLAQTADATAAPIVDATAAAAAATEATAFDAQMRTQQRHKIKIYHDAKQTAVWRTDSLASNPSSTICPDFVSSGSGGVAGGVGGTVAGGGVTGALGLPPRGIILSTAPSLLQRKSSDSSLTSSIARRVSFPDNQLVTGYLEPANPWKQVLTKKLND

SEQ ID NO: 32551 - DNA, 4842 bp, DROSOPHILA
cactgctgaacatgccaaatccactgccattcctggcggcacccttctcaccgttcatgggtctgccgccgccattcctgcctccaactggagcgggaggggcacgtcctccgcccctgggacgcatgcgctctccgccgccctcgagtcgcggcgatcgggatcgagagcgttactcagactacagcgactacgatgactacgacgacgatgaggaggacgaccggggcatggaccgtcgtcgacggcacagcggcagctggggtcgccggcatcgcggctcctacagccactcgccgcgcacatatcgctcgctatcaccgtcggacagtcggtacaactacaatgacacggagactgacttcagtccgcccccaagtccgccgcccgttccgtcgggacgcagcgcgacatcgcgaccctacagcgaggtatgaggagcagggtgtgcccgtgcaaccaagtcctaccaagtatattagactcaaaactagttcaaatatatttattaatcaacgattatcgaacggtgggatcggggcgggtcgggacgacctctcaaaccgattccccaaaacagggatctcaggagagttcgtgaacaactaagaaaactcctgtctcagcggtgaatgatatccaagaaaattgaaacaaattaaacgcaatgacaaacacaaatccaatgtgagctgtttttactgtggaattgaaaaatattcattttctctgaacaaacatttttaaataatcagcatggcacatttttaatatgatattaatttctgagaggtaagattatgtattatacatcatttattgaaaactacaaataattgaatacacgaacttagaaccggtttatatttttatattatatttatatattattatcagcaatcattttaataaccagcttatcgacgaaagacttatcaattaaatagcacaattttggtccgtttagataatagttaactaagctagttaacttagtgaatcacgactcggggcgtttaaattccaattcaatacattcgtcaggtaattgtgaatagctgctactagtagcactgaaggaaacattaagtttgggatgtttaaagtgcttcgaaacctgcgaaagagtatgagttttaggatcagtactttataaatcagttatgtacgcaccaagtcatccttgccggttttataaaaatgcattttcaaaggcttcgttcgctgatttagagcgcggttcattgttgacttgctgaaggcaaagaactcgtcgtacaaaacatggttgatcatgctgaattccctgagacggggacaggcaagaagcacgtcccatataccatcggcgttgacccatatacgcgagttctccagatgcagttgctccaagagcggaaagcaataggtgatcgtggaaaagtcaatggcagcacatccttcatcatcgacgagagttaaacatcggagatttcgcagtttggccagcacctccgttggcctcatccagatattattactgaatgcggcagtcaacacatcttgaccccttatgcttccaatttcgcacagtagatcgtccacctggtagaagttgtgcaggcgcagctttatcagtttaggcaggctcaacagttggctgatgttgtccctgtttaggtaaactatgtccagctccagctcctccagttcatgcagcatacagatggatcgcacgtatgcattctgttcgatcttttgccactggatactgagtgtctgtagtcgcaggttttgacagatatcctcgaagccctgcgggctcaggtaccagcacagctgaaggtccagtcggcgaatgttccgccaacgactgatgtggttaccagtagtcttcccgctcagcctgatggcttccagctgcgggaagcagtccaccagaatggcgatgtcggcgtctccttctatttcactggtctcatcgcccaagtagatcaattgacgcatgttggggaaggtgtgacccttccaccgctccaggtgatccatggctaggtattggagtgtaagttccgtcaccgtgaagcgaatgcactgcaggaattcgttcagtagctcatagtcgtcattgaatgtataatagtcaatggtatattcccgattgcgctgccagatgtaggatatcagcgatctcagtcgcgatgcgggctcggaactcttccacagcttcagctgatcctccagatcgaggtaatctacaattttactattcaacgattatgccgatgcctatccatgaattccattcaacttcacttacagcacgcagtcatcattgaggttctcaatgagtgccatgttcacaatagcagcctaatcctcagaaatgaagggttttccagatcgacgagttgcctataaagttggattgttgcttattatgacgaaaacagctgtcagaaaaagcttttggcgatggagctttctgctgttgtcatctgtctcattccaaacattccacagttgggttccactaaagtatcacttaaaagaagattacaaaaaggaaaagctcccaaattcggtttattaaatacatacatttaattacctttcttgcatcatttactaatatagtaatgtaataaacaacatacaaaatggagtaccgaacaattgcaaactttaacaagagagatgtcgattatatgagttgatcgactattggataccctatacccgactaaaatgcacgttacatttttaatctacgttgctgatatcattaaatcttttagtctatttccagtttccgaaacgaccccacagcgccaaaggaggagcgatggttccctcgcttatggtctccaaactcgcgcaacttgtcattggcaccgaaattttggctttcgcgaaagtagggcccatagctggacaatttcgcttccatggtgtggcttatatcctgcagattaccaccagttcctccatattcttggggcaagtacttgcgacgcactagctcgtatatggccgccggatcggagctcaccgagatctaggcgaaatcataattttgcactcaaatatgcaggcataaaaaatggtaagcatatggtaaactcacccgactcttgattttggcagggaaaaaggagcgcagggaattgaatccagtttcaaaggccgcaggaacattgatgaagtgtatgcccttctggcgggtcggcatcgcctcatccgcgtatgtggagaacttactgagcaactgcggctggagggcaaagagatggctccccgtaacgccagccatgtccattatctccacatagccactgaccgtggcgttgtcgtcctcgaacatcatgatctcaccgaacatggaacccacgcgaatgatgtcctggaacttgtgtttgctcgtatcgtaggaaccggcgcgaattatggtcacccgcggtcccggatcgtctgcatccatgggaatttgaaggagtactctatgcgaaatttggattaaggaataggaaagatttacctaaaaatttcgcttcttaccccattcttacgatatccagcacctggggatcggtagctaagcgccgctcattgaatacctcgggaatggatcgttgcagcgtgtagaaccgatcgaacttctccttggcccgctccagactgaacttggtgccgcgcagaaaggcgagcaggaactggtcgtcggtgcaggcccgcagatgtggctgcttcagcacccaatcccgcagagcctcaatgtcctgggccatacgggcgggcaactcgttcaattccctgatgcaaatctcttgcagcgcggcattcagtggtcgtaccgagctcatttcgatacaggaaacggcctcaagacaatgagtccgcgttaattgaaatggtaaaaatcgttattttatgagggaaacctctcctcacttcacagcaaatcggattgcgtgcatatgcttactgcttgaagatacctcgtcgaatgatacacgagtaacatgtggattcaactgcctgatcataagccgatttaccaacgtacgaagacatttgtcgatatggcggatgtgagtggcggtggtcggtgggtggtggttggtggttggtgggtggtgctgggtggtaccaggccggcgcttggagtatttcagtcggtacccttggctgtgggtcgcttcgcgattgattggcttaattggctttggattggatttactttttgagtgcatgcggctgcggccgatatgagctgttaaatcccattgataaagaaggttaatcgggtgcaattacttaacgaaaggcagatagataacgtatgctagcttgataactcgccagctgaaaagtaaacaaggaaattaacacaaaagtgtgacaacataataagttcaagtaaaaataattagtaagttctagtagttacttcattttaccgcaattataattgcatagaaagtaacgcgcttctgttatttttttttcttttgctagctataaataataagaatacaaatattttttcatcttattgacttctaacatttttgaatgtcccgccaataggggtagtcatctggacatttggtatattttagtgagcttgcattgtgtactccaacggtcacactacttagaccttgtcagactttcaagttaaaatcatctgacaataaaaaccaattttccccgatgacaagcatcgaggagaatccgttcgcggctctgctgcaggagggcgccaactccgatggcgtgccgcacaaactggtcgaggaggtgctcctcttcacgctgaacaaggcgtcctcttccgcggtcctgtgcctggccgacgtg

SEQ ID NO: 32552 - DNA, 2151 bp, DROSOPHILA
atgagctcggtacgaccactgaatgccgcgctgcaagagatttgcatcagggaattgaacgagttgcccgcccgtatggcccaggacattgaggctctgcgggattgggtgctgaagcagccacatctgcgggcctgcaccgacgaccagttcctgctcgcctttctgcgcggcaccaagttcagtctggagcgggccaaggagaagttcgatcggttctacacgctgcaacgatccattcccgaggtattcaatgagcggcgcttagctaccgatccccaggtgctggatatcgtaagaatgggagtactccttcaaattcccatggatgcagacgatccgggaccgcgggtgaccataattcgcgccggttcctacgatacgagcaaacacaagttccaggacatcattcgcgtgggttccatgttcggtgagatcatgatgttcgaggacgacaacgccacggtcagtggctatgtggagataatggacatggctggcgttacggggagccatctctttgccctccagccgcagttgctcagtaagttctccacatacgcggatgaggcgatgccgacccgccagaagggcatacacttcatcaatgttcctgcggcctttgaaactggattcaattccctgcgctcctttttccctgccaaaatcaagagtcggatctcggtgagctccgatccggcggccatatacgagctagtgcgtcgcaagtacttgccccaagaatatggaggaactggtggtaatctgcaggatataagccacaccatggaagcgaaattgtccagctatgggccctactttcgcgaaagccaaaatttcggtgccaatgacaagttgcgcgagtttggagaccataagcgagggaaccatcgctcctcctttggcgctgctgctattgtgaacatggcactcattgagaacctcaatgatgactgcgtgcttaaaattgtagattacctcgatctggaggatcagctgaagctgtggaagagttccgagcccgcatcgcgactgagatcgctgatatcctacatctggcagcgcaatcgggaatataccattgactattatacattcaatgacgactatgagctactgaacgaattcctgcagtgcattcgcttcacggtgacggaacttacactccaatacctagccatggatcacctggagcggtggaagggtcacaccttccccaacatgcgtcaattgatctacttgggcgatgagaccagtgaaatagaaggagacgccgacatcgccattctggtggactgcttcccgcagctggaagccatcaggctgagcgggaagactactggtaaccacatcagtcgttggcggaacattcgccgactggaccttcagctgtgctggtacctgagcccgcagggcttcgaggatatctgtcaaaacctgcgactacagacactcagtatccagtggcaaaagatcgaacagaatgcatacgtgcgatccatctgtatgctgcatgaactggaggagctggagctggacatagtttacctaaacagggacaacatcagccaactgttgagcctgcctaaactgataaagctgcgcctgcacaacttctaccaggtggacgatctactgtgcgaaattggaagcataaggggtcaagatgtgttgactgccgcattcagtaataatatctggatgaggccaacggaggtgctggccaaactgcgaaatctccgatgtttaactctcgtcgatgatgaaggatgtgctgccattgacttttccacgatcacctattgctttccgctcttggagcaactgcatctggagaactcgcgtatatgggtcaacgccgatggtatatgggacgtgcttcttgcctgtccccgtctcagggaattcagcatgatcaaccatgttttgtacgacgagttctttgccttcagcaagtcaacaatgaaccgcgctctaaatcagcgaacgaagcctttgaaaatgcatttttataaaaccggcaaggatgacttggtttcgaagcactttaaacatcccaaacttaatgtttccttcagtgctactagtagcagctattcacaattacctgacgaatgtattgaattggaatttaaacgccccgagtcgtga

SEQ ID NO: 32553 - protein, 716 aa, DROSOPHILA
MSSVRPLNAALQEICIRELNELPARMAQDIEALRDWVLKQPHLRACTDDQFLLAFLRGTKFSLERAKEKFDRFYTLQRSIPEVFNERRLATDPQVLDIVRMGVLLQIPMDADDPGPRVTIIRAGSYDTSKHKFQDIIRVGSMFGEIMMFEDDNATVSGYVEIMDMAGVTGSHLFALQPQLLSKFSTYADEAMPTRQKGIHFINVPAAFETGFNSLRSFFPAKIKSRISVSSDPAAIYELVRRKYLPQEYGGTGGNLQDISHTMEAKLSSYGPYFRESQNFGANDKLREFGDHKRGNHRSSFGAAAIVNMALIENLNDDCVLKIVDYLDLEDQLKLWKSSEPASRLRSLISYIWQRNREYTIDYYTFNDDYELLNEFLQCIRFTVTELTLQYLAMDHLERWKGHTFPNMRQLIYLGDETSEIEGDADIAILVDCFPQLEAIRLSGKTTGNHISRWRNIRRLDLQLCWYLSPQGFEDICQNLRLQTLSIQWQKIEQNAYVRSICMLHELEELELDIVYLNRDNISQLLSLPKLIKLRLHNFYQVDDLLCEIGSIRGQDVLTAAFSNNIWMRPTEVLAKLRNLRCLTLVDDEGCAAIDFSTITYCFPLLEQLHLENSRIWVNADGIWDVLLACPRLREFSMINHVLYDEFFAFSKSTMNRALNQRTKPLKMHFYKTGKDDLVSKHFKHPKLNVSFSATSSSYSQLPDECIELEFKRPES

SEQ ID NO: 32554 - DNA, 3342 bp, DROSOPHILA
agcattttctgccacaacagcatggtcgatcgcatggcagccatgctgaattattttctgctgaatttggttggcccaaagaaggagcgcttcaaggtaaaggacaagaaggagttcgaattcgatccggctcagacggtgatcgagatctctcacatctacatcaacctaagctccgatgagagcttctgtttggccgtatcgcaggatggacgttcatacagcgaacagctcttcagctatgccgagaacatcctgatccgaatcggaggcggccaacttataggcgacatgtccgagtttgctgtgaaggtagcgcgtatgggtgctcaatacaaggaggagcaggagctgctggctgatgcgccggaagagtacctcgatccgattatctcaacgcttatgaccgaccctgtggtgctgcccagctccaaggtaacagtggatcgttccaccatcgcccgtcatcttctgagcgatcagaccgatccctttaaccgcgaaccgctcaccatggataaggtcaagtccaacgaggctctgaagcaggaaattgagagctggattcagggcaagcgggaggcggcccgctcgaacagttgaggtagcagcgaacccgcagctgctggctcagttgcccaaccaaagagttagctccacggggattcggttgttagggcaataatcaatgtttttttgttcataagaattccagtcatacatggtggtatgtgtatgtgcagttttataattagtggtttttaaaatgtattcttaatccattttttcctgtcaaccgaattaattaacaaacaatgtgtacgaataacatgcaaaggataaattattgtagtcatatttggttttgtgttcacaatatgtttacatatatgtttaaataaacggcgtttcgctgaaaaaatgtgtatattcaattaattcatcaaatgaaaatatctataatgcaaatcgacagcatatgttttattaaatccaatctctaattgtcttttttcgctccattggtttctacggcagatccattgtccatgtcgtgacttactgattcacggaatcgattgaagtagcgacgaccagttaggtaccacagcgcctcgtgatagcttctgggaaggatctccggaactgctttgctgcaggagtaggtcaggtgcagcacattgcacttaagctccgtaaagctattgccatcgattgcattcaccaccgtcagcagctgaatgtagttttcgtgggtgaaaaccacgtacgccttcagttttatatagctatggacgggaatggaatgggcgaacgtaacgtccgcaatgaagcggatcatgcaacgctggttggagtagagggaggctgtcatgtagctaatctcgatagccttgcggatgatgaaccctccgaaaatggtgttcgattcgtttcggttctccgggaacggatgcatcagggttctgcggcgccacgtggacatccagcgggaattcggtggtagagtagtcatatcactcggcgaaggtccgtcatcgcccttggttcgggtaaatagctcgtacatgagctgctgttcctccttggtgggctgctgcgactccaggcgatacaacgctttggcacgctcctggtgccgcttctgcgcttcctggtgtaaactttcttccagctcattggccggcaccagaggattgacaggagcagggccattattgatggcatcgcgagcctctaccacaaaaatgccctttgccagcaacattccgctttgtcgcacatatgccgtgacctccatgaagttattgtccgtatatgaaacgtgaccggagagggacacatctgcatccgcaataaacttgtcttgcaagaagtgggcgtggtccaccagcatggtgataaaagtgtatggcagcggcacaccctccggcagattgggcagatggatgtgaagatggcagatccacactgcaaggccactctcattaatcaggtatttggagtagttagttagtatactttacttacttacctgcaagaaggtcaagttcctcaattatcctgcccatgcgaagcaagcctcgcccgtaaacgaatcgttgcctcaacagagcatctgtttccaggagcacctgggcagtcgtttgtgagtccagcatggagcgattgggcagttcgtcttgcttcggctgaaacttgagcagtccatcccggctcttgggaatgatgtggtagcctccttccacgccgacgtgctcacggattttcttcgccactgtgcttggtattgggagttggataagtggacgataatgtggaggtttacccgcggttaccatctgccatcgtgcccgagcggtgccccgaatccagcagctccctcccggattccatgaacgagtgacgaattgcacccagttggtgccacgggtgtcgcacggcgatcacccttctgccaaagtgctggctcaaattcatttaaattttgggtttgtgtgctccgctatattcatatgtatagttgtcaaataataagatacagtacgttaaaatcgtttgcacttaattttttaaatttgtaacagaataacggcttttatgtaatcgaaatcttaagaatcacaagtactagtttccaaagttatcacgttccaggcttagctactttctgttgtcaaaagtaaatgtcgtagcgcattattaataaattcgctgttttgtttaggaatcaaagaattaactatttgaaagctgtataagtcgcagatcagtgtttgtcaacactggtcaatccatcctccatcttccaccattcgctttcggtattttttcctattcctgtcctgcttactcatcgtagcagcgccgaataacggatcctaagatcgaacgaacctgtgctaaacgtgatttcgttcaatttctcatacatttcaatatatttgacccgatcaaaagtactcgttttaagttttaaccaaaaaaaaaaccaacaattagtgagtatggaccctatgaaagaggaggcgatcgaattgaatggccatgctatgcaaatggccgaagctgagcaagaaaatggcgctggcgccctgaaaattgccaccaatgcgggtgcaaccgatcgtccagcgcatcagcagcttccgctgccagtcgaagatcagcaggatgaggtgctgacccccgctgagaagggcaagttcgagtacccgccccctccaccgccaccaactccagtccaggctccgctagccaccaaggccaccgctctgaatgccagtcaagagcatgacgacgacgaggccaactccgagaagtgggaggatccgtgcgctc

SEQ ID NO: 32555 - DNA, 1278 bp, DROSOPHILA
atggtaaccgcgggtaaacctccacattatcgtccacttatccaactcccaataccaagcacagtggcgaagaaaatccgtgagcacgtcggcgtggaaggaggctaccacatcattcccaagagccgggatggactgctcaagtttcagccgaagcaagacgaactgcccaatcgctccatgctggactcacaaacgactgcccaggtgctcctggaaacagatgctctgttgaggcaacgattcgtttacgggcgaggcttgcttcgcatgggcaggataattgaggaacttgaccttcttgcagtgtggatctgccatcttcacatccatctgcccaatctgccggagggtgtgccgctgccatacacttttatcaccatgctggtggaccacgcccacttcttgcaagacaagtttattgcggatgcagatgtgtccctctccggtcacgtttcatatacggacaataacttcatggaggtcacggcatatgtgcgacaaagcggaatgttgctggcaaagggcatttttgtggtagaggctcgcgatgccatcaataatggccctgctcctgtcaatcctctggtgccggccaatgagctggaagaaagtttacaccaggaagcgcagaagcggcaccaggagcgtgccaaagcgttgtatcgcctggagtcgcagcagcccaccaaggaggaacagcagctcatgtacgagctatttacccgaaccaagggcgatgacggaccttcgccgagtgatatgactactctaccaccgaattcccgctggatgtccacgtggcgccgcagaaccctgatgcatccgttcccggagaaccgaaacgaatcgaacaccattttcggagggttcatcatccgcaaggctatcgagattagctacatgacagcctccctctactccaaccagcgttgcatgatccgcttcattgcggacgttacgttcgcccattccattcccgtccatagctatataaaactgaaggcgtacgtggttttcacccacgaaaactacattcagctgctgacggtggtgaatgcaatcgatggcaatagctttacggagcttaagtgcaatgtgctgcacctgacctactcctgcagcaaagcagttccggagatccttcccagaagctatcacgaggcgctgtggtacctaactggtcgtcgctacttcaatcgattccgtgaatcagtaagtcacgacatggacaatggatctgccgtagaaaccaatggagcgaaaaaagacaattag

SEQ ID NO: 32556 - protein, 425 aa, DROSOPHILA
MVTAGKPPHYRPLIQLPIPSTVAKKIREHVGVEGGYHIIPKSRDGLLKFQPKQDELPNRSMLDSQTTAQVLLETDALLRQRFVYGRGLLRMGRIIEELDLLAVWICHLHIHLPNLPEGVPLPYTFITMLVDHAHFLQDKFIADADVSLSGHVSYTDNNFMEVTAYVRQSGMLLAKGIFVVEARDAINNGPAPVNPLVPANELEESLHQEAQKRHQERAKALYRLESQQPTKEEQQLMYELFTRTKGDDGPSPSDMTTLPPNSRWMSTWRRRTLMHPFPENRNESNTIFGGFIIRKAIEISYMTASLYSNQRCMIRFIADVTFAHSIPVHSYIKLKAYVVFTHENYIQLLTVVNAIDGNSFTELKCNVLHLTYSCSKAVPEILPRSYHEALWYLTGRRYFNRFRESVSHDMDNGSAVETNGAKKDN

SEQ ID NO: 32557 - DNA, 4916 bp, DROSOPHILA
catttgcccaccatcctgcaaaaatgggtgggccgcccacgcagtgaccttgccgcgtttgacgcaagccgatgttttcaggatcagctgactgtcagctgtatgtaaacaagttaaaatgccgggttcctctccttcggccactgcaaagcattcgggaagctttcccatgagcgcttgtgtagaaatcgcgcgccattttccggccgagcttttcccgagcaatattctattcgaagtggcatgtagatattatgtagattttcttgcaatcgataacagctgcgaacgtaaagcccttcgaatgttaacgaaacccctgagttttggccagcattttccggctgcattcgcgaaatgttcgctgcaggcaatggacgcgagtggaaaactcaaaggaaaatatttacggttagcctgccgccatcgtgttgcgtgtacaaaaggggcgtgtgcgtgcgctagtgtgtgtgagagagtgtgtagttgtgggccaggggaattgagaatttactagtagtatcccagttgggcgctcaagcagtacgtgcgaaaaattaagcgttaaaaaagtgcctttataatttaccgattatcctgacattactttgccctatactagtttagtagcccaaaaacctacgatcattcaatcaggtatatatttaaaacaaaagaagctgagtgtttgcttagcaaaaagttgcataaattggcaaaaataataatgaaaattaatcaaaaagggtgacgaatttaaggtacaagaatttaagcttgcaaagtacatgaagtgcgccaaaaaaactgcagtgcaatgttcaccttcacccagtgtgtatgacatgcaggcaaatgaaaaatcgataccagaagcatcagcagttgcaacgctctacgaccgctcccaattagccacaaggaactgcatcatcgcgcagcaggtcccttgagcccgaacatcgtacttccagtggacttggggcaggacactatctccatggtggatgccaagccgcagccacccactccgggcgcaatgcctggaacgggaacaccgccgggcggattcgccggcgagcgatcgaagatcaaactgttcatggaacggacgcccagcattggagccctcaagtccaagttcctcaccgtgctgggcaacagcaacgagctgctcaacggaatatcgaacaaggtatgactacaactagtgatgacagcgtgagcagcgtggtaaaagatacaaatactacaagggtcatggtagtactaattagggattagttactaaagattgttttaaacctggcactaagttacgttagctggttattactttgttaagatgctatgtaggattcattacataaaataccatagacatatttcatggactcacgagtgactgtgggtcacgcatacctctagggctcagttggggcagccttggtaatgaacgcgacaagaggtgcttgctggtggttgcggggggaaaggggattgtgtgtgggttctgtctatgctgcaaaagcagaagcaactgacactttgatgcttttgttgtgccgttgtgtttgttcttgctatttccgctttgctgctgcactcggttgaccttcagtggggaggcccgaatcccaatcccagtcagcgcttggggcatgtgccggctatggatggggctagaaatgcaaaaagggggggggggggtacattctctgctgctccgcttgtacttgactttctctcgcttcgggctcggcagccttgtccttgattgaaattaattatatttgcagcagccgagaagaaggaaggcgtgcagccttcgatatttctaaagctatgttttccttggattatcaatcattcagaactgtgtgttaagtaatcattgcagatttttaaattgcatttatcatgcttctaatgtatgatacgaaccacttgtaggagttccaaaacttagcggaatccttttatagcaggtagaaaccttttcaaaatacgtcaggcagttgtaaatcaaactgactcaattaggcctcagatatatacatattcgaaagtatattcagtacaccccacatatgatcgactttcttttgaaatgcgccttttactttgtttacgtacagctgaccctgagcagcagttccagcgactctgattactgcgatgacgatgaagatatacccaagtgtgagtactgcgaagtaccatagatacaaacgaatacagtttgggcatacaatatgattttacttcacagttgacgagagcattgattataccaagatcgacttcgaaggacgacgtgtgaaggcgcgacgagctcacgaggagatcatctcaggacgatatcgtcagcccaatttggcaccgagtaagtacaacacaactacaaaccaaatcatcggagtcctatatttcaactcatttttagggccacgtctggaaccatcacgtgggcgtcatgcggccagcaaactgggtgcaccccttcgctccagctccggctcctcgagcagctccagcagcagcgacgacagcagctctgtatccctgcccgagcatatggccaatcgttctcatgacgtgagcagcaccacacgctcggattccatagagtcgcgtcactccggcggatatgagagggccagggcaatcgcaggagcccgtcgcagcgagatggacatgcaaaaggatgtccagaggatcggcgaagtgggcgacactgtgccgccgcacatagatgttcagccgccgacggaggcgggagcgggatccggaggacggcagcagtgggcgggcggaagcaactcgatgcgccttccgtcgcgcagtcgcgcctcgaacagcagcactctgaccagcctgcgcgatgagccggatcagctattggccagccccagcatggagtccaccgactggcggcactttatccgatcggagtcgcagaactcggtgccctcatgggcttcctccatcagcctggattgccgagcgggcgaggaaccggtcaaggagtttatgaagcactttaccgctctgctatttggcggatctccgggagccgttgatcttgagctgaagtcggagtttggcgtattgctgcgtctggagatcggtcgactgtggttcacccgctttctcaccgagcagcgccacaagtccaagcgactggactcggtcacgttcggcagtctggcccaatactttgcactggccctgtttgagtgcagcgagtgcgaggattatggcccggctgcggtactgatgaacctctgtttccttttctaccacgaggtcgaggtgcccggctgcgatccttatcgcgagtacctgttctcctcgctgcgccagcaacccatctggcagcaggcgcggttctggaacgcaatcttccacgacggcatgcaggcggaacgggagcatcggggtcagagccagatgaggcgccaaaagcgtcgacagcagaagcagcagcaacggcaggcagctgccggagcaggatcaggagcgggaactgcagatggcccgcctaccaagtcgcagcgcaaacagggcggcgactcctcctccagctcctcgcatcaggcggcacagtcgggcactccggcggctcaagcctgcactggttccattccagccaaccggaggcccagcaagaccagtctcacccaggcgcattcgcttcgggaccaggaggacattgcatttcggcagcttgggtgagttcttcttgattctggaaatgtttcatttttccaaagtgtttattatggaatacacacttatccacagggcattgacgtgcaatatgcactcactggggacatcccaggaattgtgccttgactttctgaaaaagaacgtggtggcccataacctatccaagggtaaaagcatctaaagttttctaaattattggagtaactaatatagatttcaattcatccagataaagccaaactaatcagagacaatatatatcgaatgtaccatgagacgcaactttggggagctcgacacgcctgaggtgatttaacagctatcaattaattaattaattgctaacccttttttttcttaattcacagcagtaacaattgtaaaagtacctaacaaaatcgagtttcaatcttcgtctcaactaaagctaaacttttgtcttaagtcagccgacacctcgaaactaatcctaactaaagtagcagatcaatgaagttttatctgaaatctggtgtttttactcgcgttgtcgtaaccgtaaagatattaatacgatagtcattcttgtaactggatttgaaatataatgaatgtatggggaaatgcttgtatttattttaacatctataaagacgaatattatataatgttgttaataaattgggatttctaaagacgtcatcgttcaattttcaacgtagctaaacaaattggaatcgcatatcaaaattaagtttggaatcaaaaccagttacaagaacatccgtactgcgaatgataagagggcactttaaccaatactgtacgtgtatccataaattgtgataataatattttgtgattactttatatagacctaaatactatgaaattatgcagtgcatatagttaaaatatcgcagtttaaattgttacaaatcaagatcaataactatgctataactatgtttgtaatgaaagagataatatttcgcaattgtttaatacattcaaattaataaaagtctaacgaaattcaaaaaaatttaattaaaattattataaaatagtttttctttcaacacgtccgcctaaaagtaggtaattgatttttaagaaggaaagtcaacgaaaacacaatatggattcttatattctctgttctttattaaaatgatacaacgcaaaaacattattcgctt

SEQ ID NO: 32558 - DNA, 1770 bp, DROSOPHILA
atggtggatgccaagccgcagccacccactccgggcgcaatgcctggaacgggaacaccgccgggcggattcgccggcgagcgatcgaagatcaaactgttcatggaacggacgcccagcattggagccctcaagtccaagttcctcaccgtgctgggcaacagcaacgagctgctcaacggaatatcgaacaagctgaccctgagcagcagttccagcgactctgattactgcgatgacgatgaagatatacccaagtttgacgagagcattgattataccaagatcgacttcgaaggacgacgtgtgaaggcgcgacgagctcacgaggagatcatctcaggacgatatcgtcagcccaatttggcaccgaggccacgtctggaaccatcacgtgggcgtcatgcggccagcaaactgggtgcaccccttcgctccagctccggctcctcgagcagctccagcagcagcgacgacagcagctctgtatccctgcccgagcatatggccaatcgttctcatgacgtgagcagcaccacacgctcggattccatagagtcgcgtcactccggcggatatgagagggccagggcaatcgcaggagcccgtcgcagcgagatggacatgcaaaaggatgtccagaggatcggcgaagtgggcgacactgtgccgccgcacatagatgttcagccgccgacggaggcgggagcgggatccggaggacggcagcagtgggcgggcggaagcaactcgatgcgccttccgtcgcgcagtcgcgcctcgaacagcagcactctgaccagcctgcgcgatgagccggatcagctattggccagccccagcatggagtccaccgactggcggcactttatccgatcggagtcgcagaactcggtgccctcatgggcttcctccatcagcctggattgccgagcgggcgaggaaccggtcaaggagtttatgaagcactttaccgctctgctatttggcggatctccgggagccgttgatcttgagctgaagtcggagtttggcgtattgctgcgtctggagatcggtcgactgtggttcacccgctttctcaccgagcagcgccacaagtccaagcgactggactcggtcacgttcggcagtctggcccaatactttgcactggccctgtttgagtgcagcgagtgcgaggattatggcccggctgcggtactgatgaacctctgtttccttttctaccacgaggtcgaggtgcccggctgcgatccttatcgcgagtacctgttctcctcgctgcgccagcaacccatctggcagcaggcgcggttctggaacgcaatcttccacgacggcatgcaggcggaacgggagcatcggggtcagagccagatgaggcgccaaaagcgtcgacagcagaagcagcagcaacggcaggcagctgccggagcaggatcaggagcgggaactgcagatggcccgcctaccaagtcgcagcgcaaacagggcggcgactcctcctccagctcctcgcatcaggcggcacagtcgggcactccggcggctcaagcctgcactggttccattccagccaaccggaggcccagcaagaccagtctcacccaggcgcattcgcttcgggaccaggaggacattgcatttcggcagcttggggcattgacgtgcaatatgcactcactggggacatcccaggaattgtgccttgactttctgaaaaagaacgtggtggcccataacctatccaagggtaaaagcatctaa

SEQ ID NO: 32559 - protein, 589 aa, DROSOPHILA
MVDAKPQPPTPGAMPGTGTPPGGFAGERSKIKLFMERTPSIGALKSKFLTVLGNSNELLNGISNKLTLSSSSSDSDYCDDDEDIPKFDESIDYTKIDFEGRRVKARRAHEEIISGRYRQPNLAPRPRLEPSRGRHAASKLGAPLRSSSGSSSSSSSSDDSSSVSLPEHMANRSHDVSSTTRSDSIESRHSGGYERARAIAGARRSEMDMQKDVQRIGEVGDTVPPHIDVQPPTEAGAGSGGRQQWAGGSNSMRLPSRSRASNSSTLTSLRDEPDQLLASPSMESTDWRHFIRSESQNSVPSWASSISLDCRAGEEPVKEFMKHFTALLFGGSPGAVDLELKSEFGVLLRLEIGRLWFTRFLTEQRHKSKRLDSVTFGSLAQYFALALFECSECEDYGPAAVLMNLCFLFYHEVEVPGCDPYREYLFSSLRQQPIWQQARFWNAIFHDGMQAEREHRGQSQMRRQKRRQQKQQQRQAAAGAGSGAGTADGPPTKSQRKQGGDSSSSSSHQAAQSGTPAAQACTGSIPANRRPSKTSLTQAHSLRDQEDIAFRQLGALTCNMHSLGTSQELCLDFLKKNVVAHNLSKGKSI

SEQ ID NO: 32560 - DNA, 3905 bp, DROSOPHILA
ccgagttgtgcttttaatgtcgcaattaaatgcatgagtttttaaaaaaattagatgcctgtcaaaattgtctaatttatggttcacagaaagctttgttccaaagttgtccccccaaaattaagaagctattggggaaccaccagcttctgctttttttcagaattttctgttggaatttcaaactgaaaatattctaatttctgctaagaaatgcatctgctttaaacttaaagactatccctatattgtgtacttttgattcaacatttggtagatttggcttatatattcctttaaaaaggttggcacaattaaaaatgtattgttttaataatagttcccgaaggagatcatctaaatcttctctgttgttacttctagtcacgtatctgctgagtagtatgaaaaccaatttcccagcatagataatgaaattacacacttgaagccataactaaatggcaaacaataagaggtgaaaagccctttggctgaataaaatcaaacagccatgcgaagtggcaaccaactttggcccccaggaaatcacttagccaccgttcgccgaggcagaaagcatttgaagttaatggcgcaaaaaccaatcgcaagtgccaagtcagagctgccaaaggcaaaggcgattgggggatagtcaagtgcgaggaatgcgacattagtgtttgccgaggtgccacgaaccacttgaaattaaatggcgcggcgcacttcaaacgccagagacaacagcgattaccaaatcgatggcggtttgagctgatctacaaagaaaagaaaaagaagatagaaaatcgcagaaaatccagagagcccgcccccaaaagcagagcaggtattaccaaaccaaaggccagcaaacacgcgcccagcacacgcacaccacccaacacccatccacttcgctaaccaactcccaccatcacccacttgccaccattgttcggcggtggcattgatttgaacgaatcaaagcggtatgcgcactaaaaataccaacaacaagctaccaaaaatccagattaaccatggccagctggaaagggggcgtggccacgagaatggcaaatggtggttgctgttccgattccacttggacattattccgccgttccaattggaaccagccgtcgtctcgctcgcactcgcatcgccgcaacgcagtggtggtggtgatagcgtttccgctgagtggaaactcgattgccgctccgctcgtcagtcgcctgcagacgctcgctgacagcggtaaaatcggagcagcagcaatccgcatccgagcgggcattcacatcgaatcgtatatacaacgagagccgttctctcgctgacgtcgctgccagcgtcgacgtcgctgccaaatctaggcgaaaatcgcaacacttggcatacacagcatatggcacttggccgcactccgaatccctggctaaaagtcaagtgcaggagcagcagcagccgcagcagcagcagcagcgccagaagcagcagcagctgcggcgccagcagagttttccaagctcggcagcagagattcactctcggtcgggcgccggcgtcagcgttccacggatccgtgattaggtttttacggtgcttcagtccgctcgatgacgccgaagccagcagttatgcgcccagtagcagcagcatcagcagtcagagcagcagcagcagcattaaagccctaaatctgtgacacttccttccggtagccacgttgcgtatacgccaccgtaaccgcattcgcatgccgtcgcgtaaaaaccaaacagtttcagtgccaaatcaaaagaaccaaagccagctgataaaagcctaagctaatccaaagataaacatatagaaaaaaaaaacttattgaatcagtgataaaaccgttatggacgtggccaaaatgcaagccacttccggtcagcatctgctgcatccggccgcaccgcccgcccaccaacaccacctgcccctcgactacagcctgggcaactttaagccagccatcgcgtctgactttcccggacccttcctcaccagccagcaatcctcgtcggcctccaattccgcctcctcctccgccgccgccaccgttccgctgcaggtgcgcgatctcagcgcgctgacggccatggccacgataccctcgcccacccagctgcttcaccagcgcatacagatgtccgcggacgcggccttgggccaccaccagcagcagccggcacagaatcccaatcccaatccgaatcacccgcagccacagatgccgccggcctccacgtcgccgcacgagtacgcgcctatgtccgccttcaaagcggtgctgcccaagaagcgaaactccgacggtaagccggaatcactcactatatttgcatgctcaatcgtaaaagctttgaaaatccgtcagcaattgggattttagttcttgtcactaagtgaaattgagttctgtaaaattttgttaagtgcataaatcgtatcaagttcattgtctccaaataattcacttttgaatgtggttgattgctcatttttatatgtgatgatttatatttattgaaattcagtggcaaacctgtggcaatttatttatacaatcactataaattgtatcaataattaattacttcgtatttcaaaaaaagccttccacatataaatatagatgcatattccaattgcatattatttattccatttagaaagttatcattttgtatttctaaaaaattaagtagtctcgtaaatatttcaaaattttgctagaaaaattcatcaaatatagattttaatatttaaataaaataattccttaaaattaaatctgaccaagtttctcagagatttctgaagaatttactctatttaaatattagtaaatcaatagatcgttaaaaaaaaatgcagtgaatgatattcagcgcatttctgagtatcaacatttatcaaattaaatttttgtgcagcctgcgaacagattggcataaacccaatcacactcccaccacatttcatatgccccgagttaattaaaaaaaaaaatgaaaacaaaagggactgaaatcaacaacacagaaaccgaaacagaaacggtgagactccaatccgcggcgagtggctacaaatcccccaaaggctggtcagcgggcaatgtaggaatttttaaaaatttatttgaataatgtgtgattttaaaatatcacacactggccatgtccgagtgaaagcccaaaggctgcacggtgtcggtttaattggaaaaaagcccaagtacggtgggaaagcgtggaaagcaaaaattgttcgggggcagcaggagctggccgggatattcattattccgtttgtgtgtgtgtgtgtgtgtgtgtgtgtgtgagtgagcgcgacgcttaatgggcaaatcttctgtgcggacattggggcggaaaaatggatatcggggattgaaaaatccatagctggaccacagatacacagatacagatacggctgcgaacggcaaaccatcgaacaaacttgtagatacacagttcagtccagtccagtccagatacatccacacacacaagtgtgcttgtgtatctgtgtgcagacggcgttgtcatcgccatcgctgttgaatttcaaatatgggcattgaatgaatgaatgagcgttcgcacgggatccacaagcttcagtgttgtccgaaatgaaccgaacaatttggctttaaaaggactttaagaaattaaattccttataaaatggatttcagtatgaaccaattttgttttaatctttcactagctagatgcagacagctgtgtctcctttttccaaactttaagtagattcggacttttccagccaagctgtcagcactgaccgtcatgtgtgtgtgagtg

SEQ ID NO: 32561 - DNA, 1092 bp, DROSOPHILA
atgcgcactaaaaataccaacaacaagctaccaaaaatccagattaaccatggccagctggaaagggggcgtggccacgagaatggcaaatggtggttgctgttccgattccacttggacattattccgccgttccaattggaaccagccgtcgtctcgctcgcactcgcatcgccgcaacgcagtggtggtgtcgcctgcagacgctcgctgacagcggtaaaatcggagcagcagcaatccgcatccgagcgggcattcacatcgaatcgtatatacaacgagagccgttctctcgctgacgtcgctgccagcgtcgacgtcgctgccaaatctaggcgaaaatcgcaacacttggcatacacagcatatggcacttggccgcactccgaatccctggctaaaagtcaagtgcaggagcagcagcagccgcagcagcagcagcagcgccagaagcagcagcagctgcggcgccagcagagttttccaagctcggcagcagagattcactctcgtccgctcgatgacgccgaagccagcagttatgcgcccagtagcagcagcatcagcagtcagagcagcagcagcagcattaaagccctaaatcttgataaaaccgttatggacgtggccaaaatgcaagccacttccggtcagcatctgctgcatccggccgcaccgcccgcccaccaacaccacctgcccctcgactacagcctgggcaactttaagccagccatcgcgtctgactttcccggacccttcctcaccagccagcaatcctcgtcggcctccaattccgcctcctcctccgccgccgccaccgttccgctgcaggtgcgcgatctcagcgcgctgacggccatggccacgataccctcgcccacccagctgcttcaccagcgcatacagatgtccgcggacgcggccttgggccaccaccagcagcagccggcacagaatcccaatcccaatccgaatcacccgcagccacagatgccgccggcctccacgtcgccgcacgagtacgcgcctatgtccgccttcaaagcggtgctgcccaagaagcgaaactccgacgtaaatcaatag

SEQ ID NO: 32562 - protein, 363 aa, DROSOPHILA
MRTKNTNNKLPKIQINHGQLERGRGHENGKWWLLFRFHLDIIPPFQLEPAVVSLALASPQRSGGVACRRSLTAVKSEQQQSASERAFTSNRIYNESRSLADVAASVDVAAKSRRKSQHLAYTAYGTWPHSESLAKSQVQEQQQPQQQQQRQKQQQLRRQQSFPSSAAEIHSRPLDDAEASSYAPSSSSISSQSSSSSIKALNLDKTVMDVAKMQATSGQHLLHPAAPPAHQHHLPLDYSLGNFKPAIASDFPGPFLTSQQSSSASNSASSSAAATVPLQVRDLSALTAMATIPSPTQLLHQRIQMSADAALGHHQQQPAQNPNPNPNHPQPQMPPASTSPHEYAPMSAFKAVLPKKRNSDVNQ

SEQ ID NO: 32563 - DNA, 2874 bp, DROSOPHILA; identical to SEQ ID NO: 25603

SEQ ID NO: 32564 - DNA, 443 bp, DROSOPHILA
cttcgacttctaaatttttttctaaattccaaatttactttttcgataataactcaaccaaaaaacgttagacaaactcaacatgtgcaacggatgtggatgctgtggaccctgtaatgaaacaccctgctgtggcccccacagtccgccatgcggagccccgtctcccatcccgtgctctcctgctccgggcatgtgctgtccccctctgcccgagggcggcattcccgatccccgtgtctggaactactacaacacgcccccaacttatccatgtggcttctaagcggctctgttactacggacgacccatataagcggcggaactgagaaccgttggaccatgttgtgtaacacgttttggttagcaactcgatcggatgcatctatcaccaatatgcagatttttaggctttaaatattaataaatataagaaatcgaa

SEQ ID NO: 32565 - protein, 67 aa, DROSOPHILA
MCNGCGCCGPCNETPCCGPHSPPCGAPSPIPCSPAPGMCCPPLPEGGIPDPRVWNYYNTPPTYPCGF

SEQ ID NO: 32566 - DNA, 3069 bp, DROSOPHILA
ttgttgtccggaaaaggattacagacctggatgcatttgtagccgattccgagtacgatgtgatagtcaattgctccggattgggctctaagaccctactaaacgacgatcaaatgtacgcagtgcgtggccaagtttcccgggtgagggccaactggattttctctgccgtgctggacgagagtgatgatggcaactatattatacccaagtgagtatttgccagttacacttatttgttcgtattccaatatctgaaatatttaagcaccgaaagtgttgtcctgggcggaacccatcaggagcgggactacaacactaaagtctgccagaacgacaggcggatgatcgtcgatggctgtcagcggtacattcctggtttggagcacacggagtgcctctttgattgggtaggtctccggccgggtcgcacccaactccgactggaagccgagcgccgcggccgcaagctcctcatccacaactatggacatggcggcagtggagtcactttgtgctggggctgtgccgacgatgtcctcaatatcctgttggccgccaagaacggttccaaattataagtcagttggaaagattattattttagttctataacaaaattggtagtgtaaaggtaacagcatttaaaagcatctctttatctacataataaacattttaatatatttcattacacttagcaatttctatatggaaaatgttataaaattgaattgaatgctgtactacgttttgattgggtcaatgcaagcatatttttgcctgtgtaggcagcactatcgccatggcatggggatcgtattgataggcttatcaccgactgcttggaaacattccactattccaccccccccgtcaaaattggcactccacgatggtgcctgcaattaagtaattgtgaaagggaagctgggggaattacgatggggtagcccaagagtaggcagacatttatgtgaagaagacagcaggaaacatatcaaatatcgtcgtcgtggcgcttttcggctgcctccttggccaacctggcatccagggcctcgtggaactcctcgaaaccgggcatttcaatgtacttcagtaccggcgagacggccagttcaaacagcagtgcgtacatctcgtctagctcgcgaaggatgtcaaagggccgggtgttgccaaccttgtagatcgagtagatagtccgcccgatctcttcgtaatcgatcagactggcggcctcctggtccacggagctgagggcgatgaagctgacccgcggcatgtgcatgtgctgggccacaaagccaaagacatcgaagatggtcgacaggaaatcccggttaaagtagagctcatccggaaaggcgatctcgtggacgaacagtgcatcgtaggtggagatgcccatgttcgctttggtcgcatcgatgagctccttcttcatcattatgatctgctggaacagattcctgggcaacgaagagggaaagaagaccctgtaataaaaacagacatgttactagtatatattaggcaaatgatagtggatttattgatcataccaggagtgccattcctcggtcatccattccagcaatcccactgcccttatttgcgtttcatcttcgctaatcatcatcacggagcactcgtttcgcaggatgtgtcgcacatacctttataacaatattccaataatgttttattactctacatttgttcataacttttttataaaagcacattaccaagaataagtctgtttcatgtccggcaaatcgaatagtcccagactctcatagacaagacttttcagaaacgaattggaccacatgaactcgatcaccatgtcatagtacctacatatatttcaattttaacatctaaactttacatttctctgaccatacatgctttgaattgatgtcaactatttgcatgccctcgaaaacatcccattggatatcataccgcagagtgcggacatcttccatcgcatttaagtcactaagaattttaaaaccaccgaagatttttgaattatatatacgagctcaaaaggtagaagttaaaagtctggaaacttaagctaaaactgcaagatactttcgaaagaagaaaagaaaagcaaagcatactttttgggtccataaaaagaaggaagttaacgtacctcaacagaccatttttttgagtgttttaaatgaagtacatttaaatatctgaaatgtatctgtaatgtttagaataaaaggtgagcaatacatttctctattaatgtagataatttcttgctagaagattggaatatgggtttgcatacttcttggatggcattcacgttgcttgtaaaactgttcaacatattgttttccaaatacgatggtcttaaattggtttttttttcatatccaaacggaataaccgtaaatgtttatttgtattacgaaatgcaaatgaactgttttgaataatgtcataattaaacgaatatacaggcggtaacaatcaagggtgatacgtgtaaatttaatttgtctaatgtctcaatttgaataaattgccaccacataaaagcaaatgcagcccaaaagaatgtaaataacaatcgcacccattttgtgggtggaattcaatggaaggcggatatcgtagtcaaatggaaaccaaaccaaatccaccctccagccaaaaaaaaaaaaaaaagaaaaaagaaatgtgccaactgagaacacgtcctggaacatacaccttggattccttattttaaaattcaaagaccatcgggtgtcatttactaggcaacaaaccaattgaataaccgaatttggctcggatgctccctcatttcctaaaaggatcccttctcaggaaagacagcgcatttttaaatgtttcacatccttgtccgtgagacaattgaatatttaaatacaagcgacacttttaatggctggcatcggatgtcggttggaccgctgccacacgcatttgtggcatagctattcaggacacgtatgccgccgtctcatgtctctcctgataaattcaatatcgaaaaga

SEQ ID NO: 32567 - DNA, 880 bp, DROSOPHILA
accttttgagctcgtatatataattcaaaaatcttcggtggttttaaaattcttagtgacttaaatgcgatggaagatgtccgcactctgcggtatgatatccaatgggatgttttcgagggcatgcaaatagttgacatcaattcaaagcatgtactatgacatggtgatcgagttcatgtggtccaattcgtttctgaaaagtcttgtctatgagagtctgggactattcgatttgccggacatgaaacagacttattcttggtatgtgcgacacatcctgcgaaacgagtgctccgtgatgatgattagcgaagatgaaacgcaaataagggcagtgggattgctggaatggatgaccgaggaatggcactcctgggtcttctttccctcttcgttgcccaggaatctgttccagcagatcataatgatgaagaaggagctcatcgatgcgaccaaagcgaacatgggcatctccacctacgatgcactgttcgtccacgagatcgcctttccggatgagctctactttaaccgggatttcctgtcgaccatcttcgatgtctttggctttgtggcccagcacatgcacatgccgcgggtcagcttcatcgccctcagctccgtggaccaggaggccgccagtctgatcgattacgaagagatcgggcggactatctactcgatctacaaggttggcaacacccggccctttgacatccttcgcgagctagacgagatgtacgcactgctgtttgaactggccgtctcgccggtactgaagtacattgaaatgcccggtttcgaggagttccacgaggccctggatgccaggttggccaaggaggcagccgaaaagcgccacgacgacgatatttga

SEQ ID NO: 32568 - protein, 238 aa, DROSOPHILA
MVIEFMWSNSFLKSLVYESLGLFDLPDMKQTYSWYVRHILRNECSVMMISEDETQIRAVGLLEWMTEEWHSWVFFPSSLPRNLFQQIIMMKKELIDATKANMGISTYDALFVHEIAFPDELYFNRDFLSTIFDVFGFVAQHMHMPRVSFIALSSVDQEAASLIDYEEIGRTIYSIYKVGNTRPFDILRELDEMYALLFELAVSPVLKYIEMPGFEEFHEALDARLAKEAAEKRHDDDI

SEQ ID NO: 32569 - DNA, 7159 bp, DROSOPHILA
cgaaaagtattaattttagcaagcgaacatgtcgaatgcattgctgggtggaagtggttaggagttagcataaactggtaaccgagtcacgtacagagctgaaaaattatgcccgccgcaaaacgcgagctttttgtttatgcggtccattgtttgcctttttcccggttggccaaatggactggaaggagcggcagaagcggataaggatgcggagaatgaaactgaacgagggcctcctccaagccacaaagaagcaaaaaacaatcaaaacgttgcgcgtcaattatcgtgtcataaaatcaacatggccaagccatttttatcgctgatgcctgtctccttgactcgtccaatccgggactcatgccatgatcgatggatttcaacgcaaaacaataaaatgcacaattaatcaaaagcagtttgcaattttgattgatgggcggtacttagtttctgtgttttacgagccccgcaaatccttttgccttttaatcgccgcacggttccgcacaccatattacacacacaagcaaacagttggggttcgattaacagctctttgaactcgtataagccataagggattttaatattttaataatttttgcttaatcaaagaattcatttccctgacctattataatgactaaacttaagcatatattgatcaaaaaatgtaagagttgattttaaataatattttacagtatttaacgtttaatataacacgcattttattttcaatttgtatgtgttttaacattttcctttcaatgttaaccttcttttatcgacgaggcaatattctcaaactggtgaataaagtagagacggcttcgaaaaccaataaagaagcgctctttttattttggcctcaactgtgcatgtgtacacgggtgcacagtgcgtatacgtgatgcgatagttgtgcccatgtggccgaaatggtatatttacttatcgaaacgaaaccgttggcccctctttcagatttatgccccccataacaccatcgacgtggaaaacggttcgcagcgcggatcgattctcgccggtctgtccgcagaacatacccataccgcccaacggaccggaggcgctactggaagtgccccgcgcccgtctcgcccagctgcgccgcctgttgccgctgctgaagaaccaatcggaagactgcttatacctaaatatctatgtgccctacgagacgcgtcgccagagacgtaagtgccattttactcatttgattgcgttccggggaatcgtgcagtgtaatcgaaactaaattgtacaaacagaaatgattcacttgtagtttacacaaaagcaaaacaagtagcttttgctcagaaatagataggtaacgaatatttatagttaaacctcgtttaaggcgctttagcatcagctttaaacaaatgattactttaaaatatcgcatgcaacgcgctgtgttggctactcgagttaattacgtttaatttgatcgattggcaacttttataattaccaaacgctggcagaattatttttaattagctttacaatacaaataatcgattgataaaactgataatatttatttattagttggtgcagtgaacttttaaaatccaatttttatgtacggtggactacagaaaatgataattgcaaattgcatcccatttaaaaatgtaatcgagttattttgtggctcaatatcaaatttgcatacccatactctgcagttcacaacttaagttatttaataagtaattaaggcattaccccgtggaagttactgtttctatatatttcaaaaagagtattggttttgaagttttcaattccgtagtgcattgcagtgtgtttcattatttactgcaagcgctgcggatttggcaactttgacgaccttcatcatctgctagagaaatgtgaaatttgtagtaaccataaaaaaaaaaaatatctaatagaatagtaaatacattaccatcaccggccacttaggtaacaccgatgataccaccggcgaaccgaagaccaaactgtccacggtggtgttcatccatggcgaatcgtacgactggaactcaggaaatccctacgatggctccgagctggctgcccacggcaatgtcatcgtcgtgacaatcaatttccgtttgggaatctttggattccttaagaccggcggcaaggagagtgcccagggaaacttcggactgatggacctggtggcgggtcttcactggctcaaggaaaatctgccggcatttggcggggatcctcagagcatcacactactgggctacggaactggagctgtgctggccaacattctagttgtgtctccagtggcaagtggtagggattacttaaatttataccgaaccatttccattcgagcaatcattggaaacgtttaaattgccatggcatcaagctaaattgaatttgattaaaatgaaagtgctatgatatcaaactgatttgaatttgactccaataagcactaactttaagaaccgattaactcgaacttgatagtaattgtaaacctttcatcagacctaatccagcgcacggttctggtgagcggctccgccctgtcgccttgggccattcaaaagaatcccctttttgtgaagaggcgcgtggcggaacagactggatgccacggcgacatgttgtacgacgacctggccccctgcctccgcaccaagagcgtcgccgaattgctggccgtcaaggtggatcatccacggtatgtcgcacattccattaatccgctgcacgggcatatttctcgtttaaaagccgattaagctgaatttcgattgagcttaagctttaaactttaaagcatttaaatattaataaattccctgaatctaatactatatgcaatgcctaattgaattaaatgtaaacatataaccatattatatattctttcccagctaaaataggccttaaaaagtttaatggatttttatttttcggttttattatattacagatttctcgtgggcttcgctccatttgtggacggcactgttatatcgcctggcgccaatcctttgggcagcaccacattgccccttggatcagctattgttaggtattgaatgttataaaataaagtgaaaacaactcgcatttaattacttttcttgcacgaacagtacttcaggaattgaatatgcaaactttccgaaacgagacctcattttctgccttacatctgtggagtcctatttggatttgagtgcccaggacttggagttcggcttcaatgagacgcgacgggatcgcatcctgcgcacttttgtgcgaaacaactttcactatcatctgaacgagatatttgccgttctaaaggtgagctcgattaatttatgcgctgcggcaaataaaatcccaaactcaatttggctgcagaacgagtacaccgactgggagaaggccatccgtaatcctcttagctcccgagacgccaccctgcaattcctgagcgatggccacacggcctcgccgctgattaagttgggctacatgcacagtttgcgtggaggtcgggcctactttctgcactttaaacacaagaccatcgaggaggagtacccacaggtgggtgaatacccctgcagttatgggaaacctaactaagtcatcgtcctcaatcccccagagatccggctccgtgcgcggcgaagatgtgcctttttggctgggtctgccaatgtccccgctctttccgcacaactacaccacccaggagcgacaaatcggtagactaatgctgcgatatctgtccaactttgccaaaactgggtaagctggtgcaagtgaaacatttgttcctttttaaactaatatagcaaactgcccagcaatccgaatcaatccacggcaaagtcagtgcttcctaatccgaacgaggtcttggagactgcactgcatcagcagaagaagcgctccactagtctgactcatcccaatctcagtgaggccctcaatctggcagtgctctacaatcagcgaaggagcaatgcgatgcacgagaagcgatcctacatacgaagaagactgcgtagcaatgatgcagccttcacccagctgggaatctctagtgaacgggatgtgggcagctacgatggcgatgagctgccattttgggatgcctacgacgtggtcaatcagctgtacgtggaattgggtaagtcctatgatccgacaaatgcaatccaatgtagctaatgtgagtgaaacatttttaggaaacaaggccaacattcagagccactaccgtggtcataagctgtccatgtggttgaaccttattcctcagctacatcgccatttcaacatcaatgaccagtctatgcgacaccatcagttccaggacgacatgaacaacagggatctctacgagggtaagatctacaacggatttcagatcttgagtattttctttatatgaattttccatctctattaccaggcgttgtgcgaccacaattgcagactaagccagctgaagatgataacatcatcatcatgcagaggagcagaacaacgacgccaccgccgccctcaaagaatccgagtacaaatgccacgcaagccttaaatccgcttggcacgggaacacctaccaccacaggtaggatgaaaaactaattatacttttaaacatattaatatcctaacgattccccgcagagtgcggcatcgatggagccatgtccgtatcggaactaaccaccactcagtcgccaaaggacaatagaactggaatagtgcgcgtggagacccagaaggacctggccaccgcgtcgactgggatcattggcaacctggagctgttacgccgtctgggaggcaagcagtttcaaagctatacgacagccctgatagccaccgtggccgtgggctgcttcctgctaatcctgaatgtcctgatcttcgcgggcatttatcatcagcgcgagaagcgagcgcgagatgcgaagaccaaggaggagctgcaggagggcgataacagcaagaactccagcatcctgaagctcaacgctctgatgggcggcggaggagcatgtggttctggtccaggcgacatagcggatgcgtataccttgagcggctccgtggtggacagcaagggcggagtgggcgtcgtgttcggggagtatagctgctacgatgagaagaccaagcagctgaaggaagagaagctgctggtggaactgccaccatcatcgtcgacgggccagacgtctttgatgatagacaattggggcgcgtgttccacgagcactttggatctgttaaaaacaaagccaggcgatcccatcgaaatggtgacctacagtgcgctgccctcggtaatggaatcaacatcggccatgagcagcaagcgtggatcgtttgtggacaccaccctgcaattcaacagtccgcagcaattcgactatgctgtgcagtcctcggatcagatgtcctttaaggcgatagaggatgcagtgaaagcggcggcagggcatgactcggaaatcacgcgggatgatgacattcccgaaccgccgccaccaccacgatcctttctggcagcccaacagcaacaacaacagcagcagcagcagcagcaaacaggaatcctgcgacagacaggagcaggtggcacttccacgtcgggatcggcgagcggcagcggcaagaaacgtgtacatattcaggaaatctcagtctagcaatcataacccttctagtaaccaattgtgaccctagtttaatgtttttatctagttatttatgcgtcgagcttgtccaactggagcttctcctacatctgagtccaagttttagcctatttctcaaaaattaattttcgtctatctaattttttagttttagaatacttttctttaaacaactgacgcgattagtctgtaagctttccagtaccaaattcatattcatgttaggtgagttcgactcttgtttagttatcaatttctgctcactgacccaaatatttaaaatagaatcatgtttctgttctctggcatcaatgcaaaaaatcgttgtaactatatgtattacgtatgtttgtatattatgtaaatgttccttgtagacgtgattgagaagataattgtgtaggaataatttttgaagtgttatcattgtgtgtatagtttatgttactttttggtgtacgattagaaattcatatttgcttctatttgcttgttatttaataattagcgaaatcaaaataatatgtaacaagcttttaatgatttgtaaaagaaaaccagatataataactatgatacacatattgtatttaatgtattgtaaaatattgactctatttgtatgaaatacatatgtattacaaagtattcatattcacattttaaaaactgttttcaattaaccatatccaactgaccccattggcagtggcgatcaatcggtaaggtgtgttagcatatttaaggtattgtacctctaagacatacgctatgtacatcgaatattggtactatagcagcattgcaaactacgtaaagactcggccccattcagcattgaatttgtacatttcgacattatgtaattgttaatttgtactatatacagagatgttaaaaacgaaaggttttaaagctatatcggctcgctttttatttcttttttcacttttttcgtctttgtagtgtcaccgttttccccattcttgcgttttgttgaagttttctttctcggcgtgaattcaggttctttcttaatttctgttataagagcatctaacatctcatctgggtcctctttcttgacttctttctcctccggtgggggactgccaaacttaatggatttgttctgaagcacaaaatgtgtgggggtataattagatatgtttaaatcaggtttcaaaacgctatcaaatctatttgttttttaattaggtagtgccctacctttggagcttcgccattctctagcaatagttctccctcgatgtaaggcatcaagttgctgatatcgaagttttttatgcggatcttgatctcctggtccatggcgatgtcctcgcgacttgcactctggtttgtgaaacgtatggaggtgttgaagacccggtaaatgacgg

SEQ ID NO: 32570 - DNA, 3077 bp, DROSOPHILA
atgccccccataacaccatcgacgtggaaaacggttcgcagcgcggatcgattctcgccggtctgtccgcagaacatacccataccgcccaacggaccggaggcgctactggaagtgccccgcgcccgtctcgcccagctgcgccgcctgttgccgctgctgaagaaccaatcggaagactgcttatacctaaatatctatgtgccctacgagacgcgtcgccagagacgtaacaccgatgataccaccggcgaaccgaagaccaaactgtccacggtggtgttcatccatggcgaatcgtacgactggaactcaggaaatccctacgatggctccgagctggctgcccacggcaatgtcatcgtcgtgacaatcaatttccgtttgggaatctttggattccttaagaccggcggcaaggagagtgcccagggaaacttcggactgatggacctggtggcgggtcttcactggctcaaggaaaatctgccggcatttggcggggatcctcagagcatcacactactgggctacggaactggagctgtgctggccaacattctagttgtgtctccagtggcaagtgacctaatccagcgcacggttctggtgagcggctccgccctgtcgccttgggccattcaaaagaatcccctttttgtgaagaggcgcgtggcggaacagactggatgccacggcgacatgttgtacgacgacctggccccctgcctccgcaccaagagcgtcgccgaattgctggccgtcaaggtggatcatccacgatttctcgtgggcttcgctccatttgtggacggcactgttatatcgcctggcgccaatcctttgggcagcaccacattgccccttggatcagctattgttagtacttcaggaattgaatatgcaaactttccgaaacgagacctcattttctgccttacatctgtggagtcctatttggatttgagtgcccaggacttggagttcggcttcaatgagacgcgacgggatcgcatcctgcgcacttttgtgcgaaacaactttcactatcatctgaacgagatatttgccgttctaaagaacgagtacaccgactgggagaaggccatccgtaatcctcttagctcccgagacgccaccctgcaattcctgagcgatggccacacggcctcgccgctgattaagttgggctacatgcacagtttgcgtggaggtcgggcctactttctgcactttaaacacaagaccatcgaggaggagtacccacagagatccggctccgtgcgcggcgaagatgtgcctttttggctgggtctgccaatgtccccgctctttccgcacaactacaccacccaggagcgacaaatcggtagactaatcaatccgaatcaatccacggcaaagtcagtgcttcctaatccgaacgaggtcttggagactgcactgcatcagcagaagaagcgctccactagtctgactcatcccaatctcagtgaggccctcaatctggcagtgctctacaatcagcgaaggagcaatgcgatgcacgagaagcgatcctacatacgaagaagactgcgtagcaatgatgcagccttcacccagctgggaatctctagtgaacgggatgtgggcagctacgatggcgatgagctgccattttgggatgcctacgacgtggtcaatcagctgtacgtggaattgggaaacaaggccaacattcagagccactaccgtggtcataagctgtccatgtggttgaaccttattcctcagctacatcgccatttcaacatcaatgaccagtctatgcgacaccatcagttccaggacgacatgaacaacagggatctctacgagggcgttgtgcgaccacaattgcagactaagccagctgaagatgataacatcatcatcatgcagaggagcagaacaacgacgccaccgccgccctcaaagaatccgagtacaaatgccacgcaagccttaaatccgcttggcacgggaacacctaccaccacagagtgcggcatcgatggagccatgtccgtatcggaactaaccaccactcagtcgccaaaggacaatagaactggaatagtgcgcgtggagacccagaaggacctggccaccgcgtcgactgggatcattggcaacctggagctgttacgccgtctgggaggcaagcagtttcaaagctatacgacagccctgatagccaccgtggccgtgggctgcttcctgctaatcctgaatgtcctgatcttcgcgggcatttatcatcagcgcgagaagcgagcgcgagatgcgaagaccaaggaggagctgcaggagggcgataacagcaagaactccagcatcctgaagctcaacgctctgatgggcggcggaggagcatgtggttctggtccaggcgacatagcggatgcgtataccttgagcggctccgtggtggacagcaagggcggagtgggcgtcgtgttcggggagtatagctgctacgatgagaagaccaagcagctgaaggaagagaagctgctggtggaactgccaccatcatcgtcgacgggccagacgtctttgatgatagacaattggggcgcgtgttccacgagcactttggatctgttaaaaacaaagccaggcgatcccatcgaaatggtgacctacagtgcgctgccctcggtaatggaatcaacatcggccatgagcagcaagcgtggatcgtttgtggacaccaccctgcaattcaacagtccgcagcaattcgactatgctgtgcagtcctcggatcagatgtcctttaaggcgatagaggatgcagtgaaagcggcggcagggcatgactcggaaatcacgcgggatgatgacattcccgaaccgccgccaccaccacgatcctttctggcagcccaacagcaacaacaacagcagcagcagcagcagcaaacaggaatcctgcgacagacaggagcaggtggcacttccacgtcgggatcggcgagcggcagcggcaagaaacgtgtacatattcaggaaatctcagtctagacgtgattgagaagataattgtgtag

SEQ ID NO: 32571 - protein, 1016 aa, DROSOPHILA
MPPITPSTWKTVRSADRFSPVCPQNIPIPPNGPEALLEVPRARLAQLRRLLPLLKNQSEDCLYLNIYVPYETRRQRRNTDDTTGEPKTKLSTVVFIHGESYDWNSGNPYDGSELAAHGNVIVVTINFRLGIFGFLKTGGKESAQGNFGLMDLVAGLHWLKENLPAFGGDPQSITLLGYGTGAVLANILVVSPVASDLIQRTVLVSGSALSPWAIQKNPLFVKRRVAEQTGCHGDMLYDDLAPCLRTKSVAELLAVKVDHPRFLVGFAPFVDGTVISPGANPLGSTTLPLGSAIVSTSGIEYANFPKRDLIFCLTSVESYLDLSAQDLEFGFNETRRDRILRTFVRNNFHYHLNEIFAVLKNEYTDWEKAIRNPLSSRDATLQFLSDGHTASPLIKLGYMHSLRGGRAYFLHFKHKTIEEEYPQRSGSVRGEDVPFWLGLPMSPLFPHNYTTQERQIGRLINPNQSTAKSVLPNPNEVLETALHQQKKRSTSLTHPNLSEALNLAVLYNQRRSNAMHEKRSYIRRRLRSNDAAFTQLGISSERDVGSYDGDELPFWDAYDVVNQLYVELGNKANIQSHYRGHKLSMWLNLIPQLHRHFNINDQSMRHHQFQDDMNNRDLYEGVVRPQLQTKPAEDDNIIIMQRSRTTTPPPPSKNPSTNATQALNPLGTGTPTTTECGIDGAMSVSELTTTQSPKDNRTGIVRVETQKDLATASTGIIGNLELLRRLGGKQFQSYTTALIATVAVGCFLLILNVLIFAGIYHQREKRARDAKTKEELQEGDNSKNSSILKLNALMGGGGACGSGPGDIADAYTLSGSVVDSKGGVGVVFGEYSCYDEKTKQLKEEKLLVELPPSSSTGQTSLMIDNWGACSTSTLDLLKTKPGDPIEMVTYSALPSVMESTSAMSSKRGSFVDTTLQFNSPQQFDYAVQSSDQMSFKAIEDAVKAAAGHDSEITRDDDIPEPPPPPRSFLAAQQQQQQQQQQQQTGILRQTGAGGTSTSGSASGSGKKRVHIQEISV

SEQ ID NO: 32572 - DNA, 2860 bp, DROSOPHILA
ggtggcacttccacgtcgggatcggcgagcggcagcggcaagaaacgtgtacatattcaggaaatctcagtctagcaatcataacccttctagtaaccaattgtgaccctagtttaatgtttttatctagttatttatgcgtcgagcttgtccaactggagcttctcctacatctgagtccaagttttagcctatttctcaaaaattaattttcgtctatctaattttttagttttagaatacttttctttaaacaactgacgcgattagtctgtaagctttccagtaccaaattcatattcatgttaggtgagttcgactcttgtttagttatcaatttctgctcactgacccaaatatttaaaatagaatcatgtttctgttctctggcatcaatgcaaaaaatcgttgtaactatatgtattacgtatgtttgtatattatgtaaatgttccttgtagacgtgattgagaagataattgtgtaggaataatttttgaagtgttatcattgtgtgtatagtttatgttactttttggtgtacgattagaaattcatatttgcttctatttgcttgttatttaataattagcgaaatcaaaataatatgtaacaagcttttaatgatttgtaaaagaaaaccagatataataactatgatacacatattgtatttaatgtattgtaaaatattgactctatttgtatgaaatacatatgtattacaaagtattcatattcacattttaaaaactgttttcaattaaccatatccaactgaccccattggcagtggcgatcaatcggtaaggtgtgttagcatatttaaggtattgtacctctaagacatacgctatgtacatcgaatattggtactatagcagcattgcaaactacgtaaagactcggccccattcagcattgaatttgtacatttcgacattatgtaattgttaatttgtactatatacagagatgttaaaaacgaaaggttttaaagctatatcggctcgctttttatttcttttttcacttttttcgtctttgtagtgtcaccgttttccccattcttgcgttttgttgaagttttctttctcggcgtgaattcaggttctttcttaatttctgttataagagcatctaacatctcatctgggtcctctttcttgacttctttctcctccggtgggggactgccaaacttaatggatttgttctgaagcacaaaatgtgtgggggtataattagatatgtttaaatcaggtttcaaaacgctatcaaatctatttgttttttaattaggtagtgccctacctttggagcttcgccattctctagcaatagttctccctcgatgtaaggcatcaagttgctgatatcgaagttttttatgcggatcttgatctcctggtccatggcgatgtcctcgcgacttgcactctggtttgtgaaacgtatggaggtgttgaagacccggtaaatgacggcgctgacatggtgcctggagatgtgtcgcaccacgccgctcagaatggcgcccgccttcggtcggaagacataaaagtccgcatttatgaccagatgcatggtgggatcgtctgcgcgtagacccgccgtttgaccgagcaccttgatgttcttgattccgaggacgatcccgtcgagccccgagtcatagaatcccaccttggtacggataaggagctcgtggagcgcgtgcttgaaattggccatgccgtacgggcccattgctaggtgcatgtccgtggtgatgcaacgcacgcatgactccgggctgctggcatagttttccagctccttgaccgaaaatttaatgtatttctgcagtatcttggccattgcgagatcttaaactattaaaactattggttcgaatcgaccacatgaattacatctgacgatctggcatccccgcaggtgctacaagaaatgcaattttagcggttttccgccaaattgtacaccctttggatgagtaaaaaatggttagataaatcgttgaactattaatatttacaactttttaggataattattagtcactttattaaatttaatgccaatactaatggcatacattttgtattttttatatgttttggtattttttctccccgccatttgtacggtcccattgatcggagcatgcttgtggtataggtgaagaaaacgaggaaagcagagtttgaccaaatataagaaaaatagagcctaaaccgaagatataatgggagttccagcattctttcgctggctgagccggaagtatccatccgtgataatagaatgcaatgaaaacaagcaggtggacgcggacaccggtcgaaacatctacgaggaccccaccttgccgaatccaaatgggatagagtttgacaatctgtacctggacatgaacggcatcatccatccgtgcacgcatccggaggacaagccggcgccgaagaacgaggacgagatgatggtggccatcttcgaatgcatcgaccgtctgttcggtattgtacgtcctcgaaaactgctctatatggccatcgatggcgttgctccacgagccaagatgaatcagcagcgatctcgtcgcttccgagcggccaaggaaaccaccgaaaagcggctggagatagcacggatccgcgaggagctgctgagccgcggctgcaagctgccaccggagaaggagaagggtgaacactttgactccaactgcatcacgccgggcaccccgttcatggaccgactgagcaagtgtttgcactactttgttcatgatcgtcaaaacaataacccggcctggaagggcatcaaggtgatcctgtcggacgccaatgtgcccggt

SEQ ID NO: 32573 - DNA, 762 bp, DROSOPHILA
atggccaagatactgcagaaatacattaaattttcggtcaaggagctggaaaactatgccagcagcccggagtcatgcgtgcgttgcatcaccacggacatgcacctagcaatgggcccgtacggcatggccaatttcaagcacgcgctccacgagctccttatccgtaccaaggtgggattctatgactcggggctcgacgggatcgtcctcggaatcaagaacatcaaggtgctcggtcaaacggcgggtctacgcgcagacgatcccaccatgcatctggtcataaatgcggacttttatgtcttccgaccgaaggcgggcgccattctgagcggcgtggtgcgacacatctccaggcaccatgtcagcgccgtcatttaccgggtcttcaacacctccatacgtttcacaaaccagagtgcaagtcgcgaggacatcgccatggaccaggagatcaagatccgcataaaaaacttcgatatcagcaacttgatgccttacatcgagggagaactattgctagagaatggcgaagctccaaagaacaaatccattaagtttggcagtcccccaccggaggagaaagaagtcaagaaagaggacccagatgagatgttagatgctcttataacagaaattaagaaagaacctgaattcacgccgagaaagaaaacttcaacaaaacgcaagaatggggaaaacggtgacactacaaagacgaaaaaagtgaaaaaagaaataaaaagcgagccgatatag

SEQ ID NO: 32574 - protein, 253 aa, DROSOPHILA
MAKILQKYIKFSVKELENYASSPESCVRCITTDMHLAMGPYGMANFKHALHELLIRTKVGFYDSGLDGIVLGIKNIKVLGQTAGLRADDPTMHLVINADFYVFRPKAGAILSGVVRHISRHHVSAVIYRVFNTSIRFTNQSASREDIAMDQEIKIRIKNFDISNLMPYIEGELLLENGEAPKNKSIKFGSPPPEEKEVKKEDPDEMLDALITEIKKEPEFTPRKKTSTKRKNGENGDTTKTKKVKKEIKSEPI

SEQ ID NO: 32575 - DNA, 4288 bp, DROSOPHILA
aacaagatgtggcacaggatgaaaccagaatcgaggagctgcataagaaacgtaatttcttggcctgctactgcaaattggtggtgtacaatataattccaacgatgcgtgcagccagtatatttaagtattacgttaaggtaagtgagcacgagaaaatatctgaaagttctatgtttatccattatctttctattttcagtgctacaacgactatggagacataattaaggccacgttgggaaaagcccgtgagattaataaggttaacttcgctatgacgctccttttgagcctgatcacagtctttaagagtctgcaggagcagagtgaggatggcatagtttcaaagagttcgcaagagtttgtggacctcaaggagttggccaagcgatttgcgctcacatttggtttcgatgccatcaagaatcgcgaatctgtggccgccattcatcgtggtggcatttatttcgctgcgaacaaggagccagatgatccggtgcgggctccaactcgcttgctcttcctggaggttttgaacgagttcaactacaagctactgaagcaagacaagaaggtcataatgagctttctggacaagataataccacccgcaatgccatccagccgagctgaggaatggcagccgctgatattatatcgcaattccttgctacatggcgaaactgatcaagcgcccgtcgccagcaaacgagcctacacacgtaaacgtcgagatcatggtaagaatttcatagctttcattttatttagaatcaacattatgaaaaacatgtttttaatttagatgaagaagaggaggaggaggaagacgaagaggaacacaatgatcctgattacaggggctaggacccatcaggcaatcagccatacacgcggcttaagtgcaaaatctaattttccggaaaatcaagtagttgtaagattaaagctaatattatgtacataaatacgtttaaattatataaattactgtatcctaattgatttccgaattgctaaagctaaagttggccttcatgagcaacattttggatgcactttcggggctcaagcccgcctgcatgtcgaaatacaagtgcgttgattttctaaataagccttcactaaccacacttgctgctggtgctgataagaatttcctaacaatgccatacaaggatatgtattttatgttgctcctccaccaaatcaggggatccatgttcctatcgattctgggttcggagttgtatagatatagcagattcttaatctgagactgggagcccattgacgtatttggctgttgagtgttcgtcgttccagttgtcagtatgctatccagaatgctatcgatctttgattcattcttctgggacgatgtggatgacactttgattattttcagcggtggctgaccattgcaatcctctggcactccagcgagctgaagcagaacttcattggccaccaactgctcctcacgttcggtgaaaaatgcttgcttatatctcggatccaaatatgtggccatcaaaaagttgatgtcgctagtgatgtgggcgaacttcatttccagttcttcaagcaactttctggcgaaactgcatatagtctagacattcgaaatattagacaatactttatggttttatctactgcaacttaccacagatgagacaaagttatggacatctgttcggagggaatcccgtaaagcggcaaccagcgggattacggatgaggtggtcgtagatggattgctccatatcttgattgtttcttcacaaggctgcattactttgctgcacaaatcgatctctatccattcatctggatatatttggaccagactatactcttcgcagtacaaggatagagcatctttcattcgaaacacgctgctcatcatctgaaaagcggaattccattgacagggatcgtaaggtgtaagtgtgcacgggtctcgcgtcaagcggatctcttgaatgaatttcagatgatcgttggccatcttagacgacgcaaaatggtcaactatttgcttgcacttggatgaaaggttctgcagtaattcgttcgattgcaaagcaaatcgaacgcacatctgcaggcggtgcacactgcaatcgggcagggaacctggcagcgccgtcatctcgtccctgattacgcagtgtatcttctctttgggcacctcaatggccaagctgggcacaagatctcgaatgcaacaagctagcttcgaagtgctttcgtaattcagagcctcgcatttcagcattaggcggtgagtctgaaaatcccttgatattccggagcaggacaagctcagcagtccttcgcctttgtcaccacgccagagactcgtagacaacgatatggcatccagcagatccacctgttgcttcaaatgctgatgcattttcctttgtatatcctcgcacagtatcttctcatagtagctccttggttgaatcgtgtaccgcggctgcagcgtcctaatgaaatttacgaatcctggtccttcaatgaactcaaaggagtgatttagtagcatgagggccaacttctcatcacagcgtttgctgtaggatatatcctcggtgtccaatggatctgaatctgtttcctaaaatgattaatagaataatttaatgcatcagattagtgaaaaacgcataatttataaaaatataatactaagaccataacagtacatttttaaaacctccttaactacactttataaacacaacacatgtttgccgatctagccaaacgcggataaaaatccgcatccgctgttgctatattagtaaaaagttttaaataagagaaggcataaattactttatgaactaccaaagaaactatatttgaatggaaacttaagtttggggaaaccatctccacatgacagaatatctagaagggcatgtaccccgatttcacataaggtacacttcttgcacagtacatatgcatgtacataggtatgtatgcacatctatatgctatcccacttacgtgcagattcaattctagctgggctgtggggtgctgtggcgaaccgatggagatctcgctcttaaccaggtccaggtactttatgtccccggatagagataggaactccggtgggtgcttgctcttcagatgattccgcagacatgttgtgccgcgtcctcgcctcgagtagttcctgttgcacagcagacaggtggccactgtgccggatgtcttgtagaagtactgccacacattgcttttcttcttgctcatcgctgcaattctttggtaattctcaaattgtacattttttgcggatgtccacatccgcctctacatccgttctgcggcagagttcgacatccctggcagatatcgataggcccatcgatgaccatcactaatatgctgcaatcagtttttggcgcgccaaagcagctgttgttttttgcattcgaggtttttgaggcatttgcaaattcattcgttaactagataatgccctgtgcgatggagctgcccagcacgcccgatgaactggccgcccagcaagcggacagcgctgcactcaaggacttgctcaaggatcccagtcgttggcactcgattcccctgctcaactacacgcctcttcacaagctgaaggatcagactctggtgcgctttcgtggaatgatccaggacatgatggacccagaaatctatctggagcgctacgaagtgaaatccgccgacggcagcaaacgtgtacaggaaggaaagtacagggactgcttgaaaatagccaatggcgaagtgattgactacaacgccgatggaaacgtgcatggagagaggcgtaccatgttcgtggtctctgtgcctggtctgaacgattggagcaaggagcatgagaagctgtgctgtccccagatcgatttggccagtctgggtcaatctcccagttcagccaagaagcggactattgtaggcgaagaagaagccatggatgtggacgttgcgagcgaaacaacgttcaagcgaccctgcctaaaagagattcaaaaagatagcgagccagtcggcgcctccaaatcctctgttcttgggtctgattacctgattaactcgcctctgccggatcgtcccagcatggcatgcatggtaaaggtttacgaggagttcgatacctaccagcttaactcgctggtcgactttgtgggctttctgtcagtggatgcttcactagacgccgctaccctggaaatagacgattgtgaaaacttgagtgaac

SEQ ID NO: 32576 - DNA, 1836 bp, DROSOPHILA
atgagcaagaagaaaagcaatgtgtggcagtacttctacaagacatccggcacagtggccacctgtctgctgtgcaacaggaactactcgaggcgaggacgcggcacaacatgtctgcggaatcatctgaagagcaagcacccaccggagttcctatctctatccggggacataaagtacctggacctggttaagagcgagatctccatcggttcgccacagcaccccacagcccagctagaattgaatctgcacgaaacagattcagatccattggacaccgaggatatatcctacagcaaacgctgtgatgagaagttggccctcatgctactaaatcactcctttgagttcattgaaggaccaggattcgtaaatttcattaggacgctgcagccgcggtacacgattcaaccaaggagctactatgagaagatactgtgcgaggatatacaaaggaaaatgcatcagcatttgaagcaacaggtggatctgctggatgccatatcgttgtctacgagtctctggcgtggtgacaaaggcgaaggactgctgagcttgtcctgctccggaatatcaagggattttcagactcaccgcctaatgctgaaatgcgaggctctgaattacgaaagcacttcgaagctagcttgttgcattcgagatcttgtgcccagcttggccattgaggtgcccaaagagaagatacactgcgtaatcagggacgagatgacggcgctgccaggttccctgcccgattgcagtgtgcaccgcctgcagatgtgcgttcgatttgctttgcaatcgaacgaattactgcagaacctttcatccaagtgcaagcaaatagttgaccattttgcgtcgtctaagatggccaacgatcatctgaaattcattcaagagatccgcttgacgcgagacccgtgcacacttacaccttacgatccctgtcaatggaattccgcttttcagatgatgagcagcgtgtttcgaatgaaagatgctctatccttgtactgcgaagagtatagtctggtccaaatatatccagatgaatggatagagatcgatttgtgcagcaaagtaatgcagccttgtgaagaaacaatcaagatatggagcaatccatctacgaccacctcatccgtaatcccgctggttgccgctttacgggattccctccgaacagatgtccataactttgtctcatctgtgactatatgcagtttcgccagaaagttgcttgaagaactggaaatgaagttcgcccacatcactagcgacatcaactttttgatggccacatatttggatccgagatataagcaagcatttttcaccgaacgtgaggagcagttggtggccaatgaagttctgcttcagctcgctggagtgccagaggattgcaatggtcagccaccgctgaaaataatcaaagtgtcatccacatcgtcccagaagaatgaatcaaagatcgatagcattctggatagcatactgacaactggaacgacgaacactcaacagccaaatacgtcaatgggctcccagtctcagattaagaatctgctatatctatacaactccgaacccagaatcgataggaacatggatcccctgatttggtggaggagcaacataaaatacatatccttgtatggcattgttaggaaattcttatcagcaccagcagcaagtgtggttagtgaaggcttatttagaaaatcaacgcacttgtatttcgacatgcaggcgggcttgagccccgaaagtgcatccaaaatgttgctcatgaaggccaactttagctttagcaattcggaaatcaattag

SEQ ID NO: 32577 - protein, 611 aa, DROSOPHILA
MSKKKSNVWQYFYKTSGTVATCLLCNRNYSRRGRGTTCLRNHLKSKHPPEFLSLSGDIKYLDLVKSEISIGSPQHPTAQLELNLHETDSDPLDTEDISYSKRCDEKLALMLLNHSFEFIEGPGFVNFIRTLQPRYTIQPRSYYEKILCEDIQRKMHQHLKQQVDLLDAISLSTSLWRGDKGEGLLSLSCSGISRDFQTHRLMLKCEALNYESTSKLACCIRDLVPSLAIEVPKEKIHCVIRDEMTALPGSLPDCSVHRLQMCVRFALQSNELLQNLSSKCKQIVDHFASSKMANDHLKFIQEIRLTRDPCTLTPYDPCQWNSAFQMMSSVFRMKDALSLYCEEYSLVQIYPDEWIEIDLCSKVMQPCEETIKIWSNPSTTTSSVIPLVAALRDSLRTDVHNFVSSVTICSFARKLLEELEMKFAHITSDINFLMATYLDPRYKQAFFTEREEQLVANEVLLQLAGVPEDCNGQPPLKIIKVSSTSSQKNESKIDSILDSILTTGTTNTQQPNTSMGSQSQIKNLLYLYNSEPRIDRNMDPLIWWRSNIKYISLYGIVRKFLSAPAASVVSEGLFRKSTHLYFDMQAGLSPESASKMLLMKANFSFSNSEIN

SEQ ID NO: 32578 - DNA, 3150 bp, DROSOPHILA
atgcgcccgatgtctcggaagatgattaatataacaaccatggcgcatatggaacttctacatggtgaaccaaatgaatttggagcaaacttgtgcatatcctgtttggatatatgctaatgtgccaatccaaacaggccaaacgggatgctaggaaagaaaactcaacgcaaacaactgcccagaccggtaaccaaattcaaagcagggtaataagtgcacagatcaattgaatcataattagtgcaaagagctcaaaatcaaacaagtttttaacaataaatgtgccttttcattcatgtatttagaatggtttctttctagggaaggtgtccatttcatattaagcatcttacccaacgtcagctttatattttataattcaagattttttagtgtaggtcgcgcaattaaataatttttaattatgacacaattacctagaacaaacgcgagtttccagtctatgtagagcatgaattgtagtttgaattgcagatgagcgttgctcgcccgcagatttggtcatcgccaggctttaattgcaactagtaagtgtggaaatttgcttctttagatttgggttagactttcatttagaacaagcacgcatacatttaacaaatttcgtatactaacatgctaaatatgtgcacacatttatcagtactcgtacacctagcttatatttttattttgccattcttacttttaaatatttcttggttctcaaatattatgatctcaaaaaacataacgtttggcataattcaaataattaaatttgatgcatccctggagtgactataacggctaaaatactaaaaatgtcttgcagtatttttatactacacctacacctacaaaacaaaacaactattatcaacagctgatcgcacgaaaaacataaacaaatggtttaggttgtagaatttcctttaatgtcagacagcgtagctcgaaaattgtttagaaaataactccataaagtgtagtaaaaatgtggttggctgggaatctgttcaaaggatccgtagcaatcagattcggtcgcttgctgcatctcaagcgcaaggaggtttatatggtgagtacaagttgtctcaagatttctagcatttcgaaccattatgcaatattgcacctgctatctttaggaatgcttccgcatcctgggcgttcacgaatcagctgatcagaatacggtacgccacgcctacttggatctggtgaaacgggtgcatcccgattcgggaacggaggaggccagtgccgaacgcttccagcaggtggacgaggctttccgtgtgctgcaggaaaagttcgccaagggaaggcgaaacattcaggaggacgaggagggggccatggagtttgacatcaagcatacggcgccgcagcaccggcaatatctgtccaacgagggcatcggagtgggaactccatttcagcggcaaaagcagtaccagcaggtgcgcgccatgaaggctcaggaacgcgtcctggagcaccgcatcgacaaggcggctgccggagagaaaacactaatgtccaagggcggcagccactttcggaaacatgctattaagaccaagtacggtattgatcgtgtggtcgaggatctcattcaggaggccatgtccaagggtgactttaacaatctaaacgggtctggaaagcccctgtcctcggctcagtcgcagaatccctatctggactttacgacccacaagttgaacaagattatgttagacaacggcttcacgccggaatggataagcctgggcaaggatattcgcgatgcgattgctcagctgaagacgaaactgcgccaggagcgcaaatactacggcgaatggccattgcagcgcccggacgatctggcagcctggaaaatattcacgctgaatcaccaggacgatgtgaagcaattgaacaaactcattgacaagtacaatctaatagtgcccattctggaaaatcagttctttcgcctgcatctcgacagaatggccgaacctatatttaaggatccggaattgcaacgtaacgtaatcagacccgaaatgaaatctaagcccagcagcaatctagagaatcagggcagcgctagtacaagtttattttccctaattagcaaactattgtaattaaaaatgtgtgattgtaaaatatgtgatattagatgtagattaaggtgctgtacgtttatgtgtacaatatatgtacgaaatagttcaataatccaagagacctttttgttattataacattaaaatcattgatatgttctttgttgtaaatcgagtgataaaaaatattggatttttttatatatagtttaattaatgtgtacaaattttttgcgatttttttaatcaaacttgaagtttattaatatatttttgtagtttttatataaaaagaaacgcagcctaaacctataaaaattgctatacaacttattaacgtcaaattatcgctgaatgttcaagattataattataactaatttgacaaaaagtcttcgagtaagataaactcatccctgcttgttatatttaaattgtcaggtttcacaagctggcatttactgactgctgacttccggagaaatgagagctgttccgttgaccaacattgctaatgcccttggaaaagcccagtgctcagccttgtggatgcgttgggtcagcgaatcctcgtcgtcatcgggcaaaatgggaacagcagcctgaacaatgatcgctcccgtgtccacaccctcgtccacgaagtgaaccgtgcagccggactccttttcgcccgcctccaaggcctgcttctggacatgcagaccaggatacttgggcagcagcgagggatggatattgacgagccgtccacgccactctcgaacgaatggagcactcaggacacgcatgaagccggcaaggcagatcaaatccacacgagccgccttcagatttcgcgtaagttccgcatcatagacctctcggctagcgaaatccttgtgggagatgaccaacgaaggtattccggcttgcgtggctcgctgcagacccagaacaccagtcttattgctgattaccagcacaacatcggcatggataccctgtgccgagtcgcgcgttgcatcaattagtgctt

SEQ ID NO: 32579 - DNA, 1080 bp, DROSOPHILA
atgtggttggctgggaatctgttcaaaggatccgtagcaatcagattcggtcgcttgctgcatctcaagcgcaaggaggtttatatggaatgcttccgcatcctgggcgttcacgaatcagctgatcagaatacggtacgccacgcctacttggatctggtgaaacgggtgcatcccgattcgggaacggaggaggccagtgccgaacgcttccagcaggtggacgaggctttccgtgtgctgcaggaaaagttcgccaagggaaggcgaaacattcaggaggacgaggagggggccatggagtttgacatcaagcatacggcgccgcagcaccggcaatatctgtccaacgagggcatcggagtgggaactccatttcagcggcaaaagcagtaccagcaggtgcgcgccatgaaggctcaggaacgcgtcctggagcaccgcatcgacaaggcggctgccggagagaaaacactaatgtccaagggcggcagccactttcggaaacatgctattaagaccaagtacggtattgatcgtgtggtcgaggatctcattcaggaggccatgtccaagggtgactttaacaatctaaacgggtctggaaagcccctgtcctcggctcagtcgcagaatccctatctggactttacgacccacaagttgaacaagattatgttagacaacggcttcacgccggaatggataagcctgggcaaggatattcgcgatgcgattgctcagctgaagacgaaactgcgccaggagcgcaaatactacggcgaatggccattgcagcgcccggacgatctggcagcctggaaaatattcacgctgaatcaccaggacgatgtgaagcaattgaacaaactcattgacaagtacaatctaatagtgcccattctggaaaatcagttctttcgcctgcatctcgacagaatggccgaacctatatttaaggatccggaattgcaacgtaacgtaatcagacccgaaatgaaatctaagcccagcagcaatctagagaatcagggcagcgctagtacaagtttattttccctaattagcaaactattgtaa

SEQ ID NO: 32580 - protein, 359 aa, DROSOPHILA
MWLAGNLFKGSVAIRFGRLLHLKRKEVYMECFRILGVHESADQNTVRHAYLDLVKRVHPDSGTEEASAERFQQVDEAFRVLQEKFAKGRRNIQEDEEGAMEFDIKHTAPQHRQYLSNEGIGVGTPFQRQKQYQQVRAMKAQERVLEHRIDKAAAGEKTLMSKGGSHFRKHAIKTKYGIDRVVEDLIQEAMSKGDFNNLNGSGKPLSSAQSQNPYLDFTTHKLNKIMLDNGFTPEWISLGKDIRDAIAQLKTKLRQERKYYGEWPLQRPDDLAAWKIFTLNHQDDVKQLNKLIDKYNLIVPILENQFFRLHLDRMAEPIFKDPELQRNVIRPEMKSKPSSNLENQGSASTSLFSLISKLL

SEQ ID NO: 32581 - DNA, 18967 bp, DROSOPHILA
gctggctacagcacctcaaccggcgccgttgcagcagcaggaggtggcaccatcgatagccacacagtgcttcatactgtccaatatgtttgatccgcgtaccgagacaaatcctacctgggacgttgagatccgcgacgatgtgctggaggagtgcgccaaacacggcggggtgctgcacatccacgtggacaccatttcgcacacgggaaccgtgtatgtcaagtgcccgagcacaacgaccgcagtgctggcagtgaatgcactgcatggacgctggtttgccggtcgagtgatcacggcggcctacgtgcccgtgatcaactatcacaccatgtttccggactccatcaacgccgtcgatctggtgacgtccacgcgcaagaacaccgacgattgagctgaatgcgtgggcaaaaatattgttaatattcgttacaagaactaatttttggtcaaaacattttcaatttttttaaagactcgacgcaagctgaaaattaggggcacatattaaaatacaattaaatacatttataaatatatatgaatttgaaaattttaacatttctcgccttcaagtaattatgtccgtgaactatattaatgtgtagattgcctgaaatgctgcaagatcatgttacaaatggttaattacgtagtttctagtgcttaatttgtaatttgctagtttgaccgccaaaaatgtaaggacaccgaccgacctatcgattgttggcttgcacggagcttgattttaaaacattggacattgtaacatttcccatacttgttaagccgtagttttactatacagatattttgtagaaaaaagaaacgctaatcaaaaataaattgtaaaattgaaagagtattgagtttcaggcggcgataacgattggcacgacagagcggttatcggtgcacagcgatagtttcgactgcagccctggttcttgcatgtgttgggcagcagccaatcgaaatctggctaaataaaattagttaaactctttgctttgccagcacaaacgcacacagtgcacggtgcacgttgcatattttagacaattaaccaatagaaaacattttccaaatactgacgagcgcgatgttaagtgcggaattgaggaaaattccatgtgacccctgaatttcgtgtgcttgtgtgtttgtgaaagcagcgcggagaaaaaaaaatggcaaacacaagccaactacaacaaatgtaggtaccacacagcaacaacaacaattagaggggctattatagggccgaaaatgaaaattcaataatttgacgccttggcgcaaaggttagtttttccaagagctgtgaaaattattatgaaatgtgagaagtgcgcgcctgtgtgtgttttataattcccacacacacacgcacaactgcgcccccgcaaatttgtgtgcgtgagtgttcatgtgtgtgtatgggcgagtgtgttcatttttttgacctcccccaaacagcatcccccgcccaccgccccaccatgccagctgattcatgctgctggtgataaatcaatgcttctaatcgaagaaaactataaaagacaaccacatgcaacatttaacggtgtcgtctaatgaccctgccccattaaacaacaacaacaagcgacgcgacgcgacgcgctacttatataagtgcaaaagtatgtgtgtgtgtgtgttcgtgcgtttgagtgccaaaacaacgcaactttaacaaattgcttggctttttggcaagcgtttgagaattgtcgtcgcttggaaattaattttagagcattatgccatccacgctagtgtttttggcctgacaattgcgcgctctttgcgtctaaaaggaaaagaaatagaaatttgaaaaatgccttcctgtgtgtgagtaatagaatgcgtgaatgtgtgtgtttgtgtttgacagcagcgcagttgctgcgctgccaaactattaccgttagccggcggttttcattcacgattttccgttttgttgttatttctgtctaaaagcgaattgccctcagttcttcgattttctacgtgttatgcaatgcaaaatgcagcccaatgggcgagaaaaaaaagagcgccattgattttctgctgttatcattaggcggccgtatcgcgatttagcggggaacacctacctttcttttggcgtcacatgcccgcaactttttgctctttgtgcgtcattgtttaaaagtcatttcgagttgcaaattgaaaactccaattcacattcagctgttcacgattgctgcgtacactgtgagaataattttttcacattcctttggcatctttaaaattatagtaagggtattccgactacattttacattgaaatgatgatggcatcatttacgaggccataaaacatctgcgtctactggtaaaaaatctaggtaaaaatctagaaaaaaacttcacctttttcagtttaaatattttgggttccaatattctattcaaatttttaaaatccgtcgatcaggaaataaccattatttctttctgtgccgtgtttattgactaataacacttttacctcttgttcgttcgttttttttttttgctattatcaccgcggtttttgatgtatgtttctgagtgcaggcgacgggcctctgagcacgtagtctatctgttccacctggttttggccatctctttgactcttggatctgctcttcgagtactccaacattgccgacctcgaaatcgtcgttatgactcgacaaagcttgcagactccactcgatcaattggttggtttcgggccaagaagaatcagttaacgactgcgcggcgatcaggtctcttctttggtagttaaaagtttaaaaacaagtgccgaattagacttaatcaacaggtccaattaatcgtaattgtcaaaataaagtgatattcagcacgctttacagcttgtaataaatatgaaagacatttaatcattaaatgaatgaatgatctttatctacgtgaaagtttgactaagtttaaatgcagtgatttctttctaaagtcaaaattgtaccgtgtggaaaaggcctaaacgctcatttcacagaaatcagttagctttccacggggtgtctgactttgcgactgccaatttatgtagtagttgataaatattagtcgaaaatcctttgacgttgcgctaatatttatagtattcataatcattcacattcgcccgccgactttatcagccagcaaatagataagcaaaagtcgcatacgttcgttcccctgttcgtttgttagcaatgaactcatttcgatggcaaatagcgaaaatagagtggaaaaagtcgcttggcagctggcttattagtttcatgtgattggtagcaaattaacacaagcccgccttctcctctctctactttcagttgagcaactaaccaccagacgcggcacataggaggagttcccaacccaaaacggtgtccacgccgcgaatccccaaaatcaaagagtaacaattccaagacaatactgctaaccagaagcgatcaccatttaatgctatccgcaactttgggggccaatggcggctctcagccgctcagtccctccgcccaggcgacgctcagcaagcacctgccgcgcctccagtcgaagcgtcttctccagcagacgcagttgcagtcgccggctgccgccagaccacagacctgcgatgccagctgcctgacgggtgagcaaatcatttcgatctcaactacagtccaactatcacaagctaagcttatccatccattcatcgtttttctgtggtaaatcttagcatggtagttgaattgcaggtgcactctaaacaaaatttcacacaaacgtgctaatatattatgttgtaatattcacagagctgtgcagcagcgagaatttgcccgaggtggagattttctcactgctggaggagcagatacccaagtacaaggtgcgcaacgatttcctcacaaacttctcgggctatgcgaatgaggactggttcgttccggcaccagcgctgcccattccgccggagggtctgggcttgaccaaggagcagacaagagagtgcctaaactatttccgtgagttgcatttaattactattctaagtatatagaagattcctgtaaaaagtaagttgcgttttccatgactcaatcatttgaacgaatgagatcatttgtaaacttgaaatattatttaaagtgcgatttgattcaggctgtgttcaactgtttgacttcatatatgtgcgacaatatagagttttaaatttattattagtaaaggaatattacatatctattcctttttcaaacaatattataagggtatcataagtacaagattgcaaaagcaaaactgaaatattctttgcctaatattattcattatctacatattgcaaatcataagtgggtgaagaccaaagtcatttatggctttcataatatatttgtttttatggcactggtcaactctgcctagctatacaattgcccaattaatacaaatttatcagcggaaacttgtgcgctcaccctttgaatcattcatattcgctgtgagttatacaatctatatactatagtagagtatatatatctgtatatcttgtatgctttcacttctccgtgggcttttgttttttaaaattcccaaatgtttttatgcgtttttaagtatttttcaaattgtttatccaccgtcgcttgacagcaaaacgcaattttcttttatctacgcaagaaagcagattaaaaataaattgccatatatactatatggtgcagtattctttttgtatcacatgccaatgttttttgtctctgacatttgtgcgaatattatatttaatattttttaggctctctttgaaatgtctagttcatgtttatttatgatatttgagttgacagccatatggagatgatttgacttgatactaaacaaagtataataatttccattggttataacaactaaacaaatgcggtttatattctatatgctaatattaacataacatataataatgtgcagggagcaaatattaaagctacttaattataattatgaattttaaaatactgcccacttatcgatttcccgcgccatttcaacacttgttgctcaagactccaggcagtgttgtgaaacgcccgctgtgacagctgtggcccgacattcccacaagatcactgccacatgacagctccatcgaaacagctgagtggggcccggccggcgatctggcaacgctgcgcgtgcttttgtcattttgcttttcgattttgtcggacgtttgaaatcggtggggaaagaggaaaagtaatggtgctgcgctccgcgtgcttgtgtgtgcgatatttcaaatgccttagcgccgccgcgaaataaatacgtaaactgaattgtgtgtgccaaaacgaaatgtaagcggtgttccgttcgctccgttaataagtgcgaaaattacgaaaaatctgtgttttcgttcggcgttggcagtgaaattgtgcgtgtgcacgtctggcataatttgccaaaaatactcgagaaatatgtgtgccaaataaaagcaaaatggcataaaggcgagccaatggcactgccgaaaaatcattaacacaaaaattattaataatattgctcatacgcgctgtgtgcgccgccagagcagttggaatttctccaagtgccttttgttcgtgccgtcatacgaattgaatttatttttaggacaactattgccagtgtatgtgtgttagtgtgtgtgtgtgagtgctaaagttttttttccttccttgcttcaattttttgtgaattatgaagaggaaaacgctggctgttgtaaacatttaaagggaacgcgcgtattaatgtattaatgggtggaggccatgggcagggcttgttgtctgtgtgtcagcttaatttgttcttgccgttcgttcaatggggtttcttcgcttgcagttgttgtcgttccgtctctttacataatcgcttttccatgccgtctttcggtttcgctgataaggaacgttataattctatatggccctctatcggaattcccgtccatctctgtcgcgcatcggcattccgtctctgtcacttcaaaaaaaaaaaagccagctgtttgccgatgtttgtttgcattaggtgtgtgtgcgctttccattgtacatatgtacatgcatacatatatagacatgtgcgtggtggacgggcaatttaccatttaccgctacacgaattcccgacttccagttcttggatggcagccggtttacagtgatccctgggtaaacagaaactcctaacagatgctaatttgtatctctgtgttaagaacacaaataaacaaagcgcaaaggtcaggctggaacaaaaaaaacaatccatgtggaagtgatcaattttatgtgtaatctcttgacgcctggaaattcatggttatatttatattcgttatacagttgactaaaaatttcaacaacaaataagagaaaacccatattaggcatagaatataaatatcccagaatttgatgttaacattgaatttctattgagattaagaaggaagatttccaattagtcattcctttcttcacctattaaaagtaatgattaataagcatgaatcacacaggtcaatgtatcttggttatacaatccgttgattacttctctcatagccagcaacaactgtactccattggcgtggcttctttatcgattggcattatctttacccagtagcttggctcttccgcatcaatcaacggtttatctggctgaagaacgcgttccgttggctcatcaagttgttccgctaaaagaaaaaaaagaaaaaccaaccgcaaactacaagagcacaaatgtacaaattttcaaatggccacgttaaatggacagtcataatcgccctggcaattgtacttttattggtgctaagcctgtgccgcaccaaattccgcgcgaaaattggtgtcatgttcgtgggtcctaaactcgggcaaaaaaacataaaaaatgcgaaaaaaaaaaacaaagccgcttatgtgcaactgaccgaccatgcttctttttattcagcaaacaattggccgagatggtttacatacatattgtgacatactttcattgcgtcatttcgcaacagcagcactgcaccacctgcaggctattcgttcaatctgtcggcatttgcctcttcagcgttttcctctgtgtcactggcctattgaggaggacaatcacactgcccgccgctaattggtgcaagaaaatgtggctcgaaaacatttttctcggtaataaccattggatactacaactatcattacccataggctatcactcaagtgcagcggacatcgaacttccttgacgttgttgccgttgtttgttatttattgatcaataaaactatttaaaaaattagctgctcttaatgcagatttaggtgaattattgactggtagcgattatagtaacattaaagtagctggctgtgacttaaactcccccgatatatattgtaaccatttattgcgtaacattttgtatctgatttgtctgatcttgaatttatccgtcgcataaaccattaatccgttggataccgaaaaaaaacaaccttgtaccattgctcatcttgtagtgaccataaaaatctgcttaaatgcaccgaacttttgccattaattaattacgaacagcatttgtgaaagttgatgtgaaccaaatacatcagaaaaactgcaaagctacaaaaaaaaaaaataaagtaacaaataacaaataacatgccaaataacaactgagttggtcttatgttactgctgccgttttcgctttattttcgcgtgtacgaattgattggccttttttgggatgttttgcctgcttttccctcagctatttattatttattcagttgtctttacataattaccataccccgaggcccatgaatgctcgatcggtttttattatcttctcgctcattatatatcatatcatatatcacattttgattcaatcagccaatcaagttgtatgcattcctgttgccgctcgttttgtcatatgtcatatggtttatctatgcgataaagtgatttattcgccggctcccttcgaatgtttaggtgcctgaagttggggaacgtgactcacaggtgcatacgcgctgtgcatgtcgatgaacctaaaaaaaaacccgcgcctaaatgccgctctcaagtgtagggatgcaaaaaaaaaaattaatttaaagcttaacaaaaaaaggtgactcggatcagttgactcatctccgcatctcggattgtgggcatcaaggctttttttttcagttcgactagccagcagcagcagcagcgggggctttatgttggccatctcatgttggccattcatttggcacaaccgttagtaactgaatctagctcagcatcggcagttatcgcagctgggttcagctcaattttctttcacttcgccccactggccggccataaaaagtgatgatcgaatgctggctattgagagcgtgaatggaccagctactcgggatgtgcaccatttcccacattctaaagcgcagcccacgcgtttttttttcctacctgagatggttctagtttggccagagttttcccagcaacctacgtgatcttggccacggaccagcgctattcgaatgcatctcccgttgcgggcaaggctaactaatttgtaaaactcgtttgcgcccaactttcctcaaagtggcagccactaaatctacgccatgcccacacaatctgtccactcttgtcgttgtgaagtcgtcgcagttttgaaatatttgtgatttatttttgttgactagcattgtatgtaaatgctgggatttattatgcacacacaattttgccattgttggtatttttgggaaatgaggcaaacatcttccgcagattgctggctgttgctgatggtgatggtgatgttgatggtgacttgcctcataatccgagtgttaacattcggcaatcgttcgaaaatagcccatcgataagtgcaatttggacttcttgctgcgcagtattttaacaagaaattgaacaaagtaactaacacacacatgcacacatcaacactcgcaatctttataggcactgctgaatgcaagccaaatcccagaaaagctgttcaaacaaaactcttaaaaaaatttccagttagaagttaattgttcgtgtgttccaatacatgttaaaatcgaaattaaaacttaaaagttcgcgtcaaaacgatgtacgtacagcaaaatgccattcctcaacagtgcaacgcgtagtaaaccaaatcatcaagaaccagagtcccatcatcatgacatcaagaagctagactccctgcccataatagtcgagcaggaggcggacgattatgggcaaaccttcgagcatggcaaccagctgaatagcaccttttccttggacgtcgaaaccggcagttcgtcaacctcgctgatcgagagcaagtcgagcagctcgctgtggtccaccgccaactccgaggattccctgaacgccaccctgatcaccagccaaccgtccaattccagcaagcatttcgagaacacctacaagctgctgggtcagcacctggatttcaattgccagcgctcggcggataagctgcagcatctgaatggatctgctagcgatttcgatagcctgtccagctgctcctccatgtcggcgatcgtcaatgggattgagccgccgcccacgcgtctggaactcgaactggaggcagtggatcgcatgcgttgcattgtccagcaaatgaagtcggggccaaagtcgatggatccgccgctgggcgtgtcggctcctcatctggcgctgctgcacgacttcgcctcgaagggacaacgaaaagtggaggccagtgtgccgggcacaccggtacccagtccgataacgggcgcactggaggcgccgcactttgagttgccacaggagctgctgcaggcggcaagcagttgggaagttatgtactatgcctccaagaacgtcgatggcaaaaattgcctgaaggtggtgcgcagtctgctgacgaacaaaggtaagaatgagatcctgacgggatgttgtttcagatggttccgagtcttctgaacttgtagccatgccaatagacaatgtcaagtgtctgataattgaggcattaagataacatataatccatcgctcttcattacacacgagataacaatcacttcagtggataattgcgtgtgagataagagttacactcgaatagttttcgcatttgatgaagctttcaataacaagtagagttaaagttcgcacaatatatataatcattttattgcattgctcatattgaattagtaataactttatctttggcaatcggcaatgatatctgccttatcaatatgcttacaaatggacatggctttacttagattggtttgttattaaagtattttggcaatatgccctcacactttacactttcttgctttcttttcttatcgctgaagtgcaggctgcatgtcttagccttaatttgggtctatcttatcgaaagtctttcatttatatttcctattattaatgaactttagtgttgtttttctggttatttctgatttcttttgttgtggtcgacgtgtgagcaaacacgacagccatttttcgcacatatatgtagccttaagcaaatattctccatttacgcccatttattttctttttttttgatgttcagactttgtatttgctttcgatatactatactatatggattgttatacggcttgttattagagccgagtctgccatattgatatttgcacaacttatgatggctttttttgtacgatcctaaaatcgcctatagacgattttagcaagttcattagagaaaaactatcaagtttgagggaaacgaagggcatgggatggctaaaaaggcacatgatctcaactagtgcctgggatctttattgctagggccgaaacttatctctacgcaagtcttgtattaatttagttttccaaatgtggagaggagcttttttgccttatcatttgtttgccagacacacactatcttggccgattgattgcggaaaaagctcaagtcatttattgccattaatgcaggcaaaaaaccacatgacattattgtcttgaaatcatcactgaagttctattagcgtaaagctgccaaaaaacccattaggtacgtttttatgacttgcacgtttctctctatatcttaaaaactaatcgagactctatactaaactgttttaacctacagattcccttatgagattttaatgtatttaacgcacattaaaattaaattcattaaattaataaagaacactagcattaaagtgcggttaaactttcatgtatttattgctttatagggtaatctaatgtgctacacgcagacctaagataatgagttttcttccaatttttatgactgtccgacgcgtgctgtaaatcattaagtggaaaattagcaggttcacaaactctctaactagatttttaatttttaaagcacagtccggaagatcgtaaatcggctaatccgatccatcgctgatccttaaaccatttcattttgtgcaatagttttctacctacctgatttatgttaaatgttttgtaattcgtggaaatacgaatctcagaatctcagaataggtacgcagaaaattacccgcgtagtttttcgcgccctaaccatgaatgggattaggattaggcggaaaatggttccggtttttagttggagttttcaatttcccgctgtttacctgagaaataggaaatgtgatatattgtgaggggaaacaaacaattggcaaagggatttgatggccaggggtcgcttatccggctcatgtgcatcgaaagtttcgagttaaattgttagcttgctgttatacagggtttgtcgccagtttccgtttacattgctttagttacgcagtatcatgtagtcgaccctcttactacaccactgctatttaccttttgagagctggcaacactgtaccgctctctggctctcgcatttgtggatgccatggtggtggatgtggacttcgattccaatacaacaaacgaaattcattcactcttggcttccacgcctcgcgtttgtcattctctcgagtatctgcaatctgtaaattacacaatttgtgcaaaatccgaacggaaaagtaaaacaatttgtgccaaacaattttccaaagtcaaggagttgcaatttcgaatagtgtgcatgcggttaaagatttaatgagcaattcgaaacgtttgcaaactgcgaaaagaatataaaaaacagcacgcaaaaggcgtaagaagaagagactgtatttgtgtgtgtgtgtgtaccgtcacgagtttggagcgcagtttttgtccgtcctcctctttccatctatatttgaagttttcgcgtttataagttttttgttgttgtttgtgggttatgtctctaacctttggacttttgaactgctattatatatttattgtgaagtgaagtgaaacgccgaaatatttagcacatgtgagtttaccaaaattgtctttttgtatttccatttagaattcccagctgtaagcgtaactattgccatttccctttcactggaaatgtcttgggggaaaacgccttttactttaagtgatgctgctgcagttgttgttgttactgctgtttctattgttgctgcctgcgctgccggtcctccttcgacgtcgacgtccgcagctgccatttgagtgtgtgcgtttggccgagcaagaagttccacttccagtttccaagctgcgctcatggctatttataaaaacaaaaacagaaaagataacattgagccagtcaagcgaggttttttttgttttacgtttattttcggccaagcgaaatctttgaaagaaataaattaacgagctgcaagtgaatttgcgcatgctcggcgtttagtgggtggcaaagaagagagccaaaagtgagtgggagagagccgcacgatgacagttattcattttctcttgtgactctggacaattcgcattaatttagcaattagttttaatgtttacattcaccgagcatcaaggcaattgaataaaaaactacaaaatcatgtgacccccgggtgaaaacgaagaaaagaaacggataaacggggtgaaaacgccgagggaaaaataaaacacccctctttgtaccgccaaacaagccgacagtgcctagacggaatttgtaaaatgctttaaaaattacataatacaaatcgaagaggaaattgcttaacgaaatgatttaaatttaaatgtgattagatctaaagcaagaacgctaagtgactaagaaaagaatttgccaaagaaaacgaaagaaatcaacaaagacaaaatgacgcacgtaaacaatggggaagtaatggaaaaggagatggagccaacgggagagcgagagagagacagggagactgctgccggcagcggggtccatcatcgatttttagccagtgcatcggagcgagatgccaatagcgggaatgcattggaagctgcagcgacaaaaacaaaaacaggcacaacgattaccaacttggaagacttggcctttgaggcatgccaaaattggtcggatttgcaccaagacttcttcatcacggacgatgaacttgagtacgaggatgaactctctttgggcagcagcataggtggaaacattgcaacaacaacgacagcagatgcagcagtagagggtcttataacgggagaacatcagaacgagcagctgctgatggaaggtgcttatgctataactgttaaatcgatgaatccagtccagtgtggagctattgcattcctttccaacactgtcacagggagtctttcataaagtgcctccccgctacggtgaacttttgaaaacattgattattttctgtaacgaacaccaaagagtttctacttttgaacaacattttttctgaattgatttgtgagaaacatttgtgtagaagattctcaaatcgtaacaacatcactacttgtgttcgtcattgtcaaacagagcctgttgaacaaattgccattattttctacgaatttacaaatttcaacatagttattccttctattgatctgcgtttatggttccataattatttggtctttatatattttatagttctatgcggcaaccgcgttagccaaatgactcgggcgtacgatgacattgaggccgtgacgcgactgctggaggagaaggagaaggacctagagctgaccgtgcagattggcaaagagctgctcacccagaacaatgcactcgaggcacgggtcgcggatctggaaaccgatctcaaggcctccaacgacgatcgtgcccagctggtccacgagctgcacaagaagaacgagctcatctctgtgcttaccaacgatgcagacgatggcacagatactggtgagttaaaaacagataacgtaatctatatgggtagataagtgagcaaaaaatcaactttgtataagtcagaaagtacttcatgactaattatatataattttcgctccacagacactcccaccatgtcgaagtctataactttggatctactgcagcgcaaggtcaactccctgctcgacgagaacaagtctctgaaatgcgaagccacccaactggcccaccagacggacgaggtggaggagcacgagcgccagctgatggccgatatcagtgctcagctaaacgatgctaactcacagtacgacaacctcagtttggagttggaacggcagcgggaggaaaaccggctgcaacatgagcagatcgtgaacctgaccgctcgcctagcggaggcggaaatgcgactacaccaactgacgcaagacaacgacgaacatctctcgctgctgcacgtgacgaaagaaaaccaaaatgctttggccctggaactggtggagttcaagcagcgttacgaagaggtgctcgctctgctgcactctgctcaggatcagctgaagcaacagcgaaagcggtcgcagccacaggcaaggagctccttcctcggtggccttggaacaagtggcgctggcatgggcggcagtcttttcccgccggattcactgcactgtgagcttatggagtcttcactgtactcagagaatagcctagactctggcatatccggcgacagtcagcgatcagcggaccgcattagccgcatgatgatgcacatgccgtccggcggcatgagctcgtcgacaatgggaggtagcgtgtatgcgggagctggcaatgtgccgccatacaagcgggtattcgacacagtgcgatgtgccggcaagagcggcaactacatggacagcggcaacgtgtcgatgacgcaactgggagctatgtcgatgagcagctcttcggggccgcgcatggcttcgatggcgtatccagcgggctcctactatcgtggcggtagcaatcaatctctgggagttaaaactctgtcaagcgagagtctcaactcccagtcggatgacggttatccagcccagccctctggtgtgccaggagcgcccggcgccaaggagctggaggcggctctcaagaggctgacgccggctgaggtcttggctcgccgtgctatgttgtcctatgctccggctggaacctataactacgacgaaccaatgggtcacggtacaggtaacgttcgaaactcggatctaccgctgggtgtgcgcacgccggacagtattatgtccaccggctcgtcgggaatgtcgggctccacgaatcacatgtccgcttcgatgacgcatcagtggcgactacccgagaagctgcagatcatcaaacccatggagggatcgcagacattgcaccattggtcgcgcttggccacgcccacgctcagtggactgctggatgagcgtcccggcgtaacgatccgtggtggacgtggcctggatgatctgggaatgcagatatacacgctgtcggacgtagaggaggatgttagcgatgatctgcccggcaaacagtttgaagcaccgggctgcacgttcacctacaccaatagcatggtcatgcatccggacgatggattcgttaacgatctgtcattcctctcgcagtcgcagatgtcgtcccgaatggcctccacgtcgacatcaaggcaacccaggttagtattattaagggtggatagaatcagtatactcgtttccttcttttttcttttttacgcattatttctaagcccgatttataattcttgttgtgttccactttcagttgtcctgccacgcctcgcgctggactatcgcgcaaaaattcctgctccacattttcggtgaacctcggactcgctggaatgctgaatgagaggggcatcaaggcggtgacgcccagtgccctcaacacgcccgccggacctaacttttcgcccacggtgacgccatgcaacagcccggagggatcacctcctcgtgcccagtcgcccgagccgctctttggtctgctctcgtgtggtgcggatttgatccggcgcaaaatcgtaggcgatcagcatcagcagcagcaacagaagcaaaggagcagccttagcaagcagcagcagcagaagatcatgctctcgcacctggaaagacgtgccctgcgatcgctgaacctaattgagaaggtggagagcatcggactggagaacataataagcgcacagagaggccttggctcaggaatcgcgaaccgcagcagttcgcccctgagcagtggcagcctacagagtctccacaccagcagcaacagcattgtggacgacatacacttcgatcgggcacagatcaagggtgtcctgcatcgaggcctgaaatcgccaacgcccgcaacagcatcaacatctgcagctgcggcggcttcagggccaggtatctcgacgagcagcagcacgagtgcttacaatagcgatgatagcgacgatcagggcttggtaatgaaaatcaaaccgtcgaagagcgcgacacccacaacaacaggagcagcacaaagtcagccaagttcggcgacgacatccaacggcacggcgagtgaaacgcgactgaagcagatgcagcgccagaaatcgcgcaggcagctaaagaacggaatggccaaccagaggccagatctgggcacaatttctggcgccggaggaggcggacgagtgcgcccggatctgggaaaggtagccgacagcggcagcagcagcaagctcagcaccaagcgaagtgaggctaagcctgcggaggaggaagaggcgacaccacagaccatcacacaggcgtttgtgggttcagttagttccttgctttttggccgcaagggcggttggctgtaaaacaaatagctaatcattcacaaccttattcttacgcttgctggactatagtttacttttaaaggaacggcggaaggatgccttttgcgagtgaagtaacatttttatttaagcactacgcgagaacaagttgaataacgaaacgtaatgtaatcgtgtgatgaacgtttagtttaatttttctgtttaataccccgcataatgcctgtcatcgccaccttaagcaacactggaaagaaggttttagtgtttgtagctgtgatttgtaaatacatatatagagaaatgtttaaatttagtagttattaatcgagtacttcgcatattattattattatttttgcttcaaccgacgacggcaatataagaacaaaacgatggccagctcgatagagaaaccgagttccaaagcagctatttttaatttaaactacattttgccaattttgtatttattttccctgtgtttattaccacttaaacgaaaacgaaatcgagtatacatttttttttattgatttcgttgtgtaaagggtcaaagcaggtgcaacgttgtacatacatatatagaaagaacaaaatgagagagatcaatctgtaacttgaatgtggttaagtaaagaggtgcatatatatttttttacacgcgtatatagtttgcgtttttcgctttccacacaagatacgtacttcgtagccccccttcccctttccaaatactgtatcacaaagatcataactcaaaatgctattgctttgacttacatcttatttcggtggtgtcaactgcgccaccatacgaaaatacataaattatagcgaaaaacgattatttttctagtcctacactgggtgggtgctcgtttggctatgcagaattgcagagcatagcttccaaacagagcgcacttagcccgagacacaagaacttaagagcactgaacaaatgtgtgaagaaatccgtattagtatgttcatcgctagggaacagcatccaagagccagtaacgaatgcaccatggccaaccaaccaatcaagcattagcaataaacggacacatgttatccaatcactcgcgatcacacaaaagctcgcagttagcaggattctcaaaacttaagtgtaaagttgaagatcagatcagtactacttttgttactttgacttcgaacggtttttaatttgaagaacgaaaatatcatggaataagaatatattgattaagatcaagaagtaacatatgtttattggagttgtacgcgtttttcgagaatttatgtttaatagcatttcaactgagcagttggcattgaaagctaatcgagtgcgtgccctaaagcgtaaattatacaacaatttggaacacaaaaaggattgtaaaagttattagttttaattatcaatatatttatttatatctgcaaaataaagagaacatcgttaaatacaaaataattgaa

SEQ ID NO: 32582 - DNA, 4173 bp, DROSOPHILA
attagttaaactctttgctttgccagcacaaacgcacacagtgcacggtgcacgttgcatattttagacaattaaccaatagaaaacattttccaaatactgacgagcgcgatgttaagtgcggaattgaggaaaattccatgtgacccctgaatttcgtgtgcttgtgtgtttgtgaaagcagcgcggagaaaaaaaaatggcaaacacaagccaactacaacaaatttgagcaactaaccaccagacgcggcacataggaggagttcccaacccaaaacggtgtccacgccgcgaatccccaaaatcaaagagtaacaattccaagacaatactgctaaccagaagcgatcaccatttaatgctatccgcaactttgggggccaatggcggctctcagccgctcagtccctccgcccaggcgacgctcagcaagcacctgccgcgcctccagtcgaagcgtcttctccagcagacgcagttgcagtcgccggctgccgccagaccacagacctgcgatgccagctgcctgacggagctgtgcagcagcgagaatttgcccgaggtggagattttctcactgctggaggagcagatacccaagtacaaggtgcgcaacgatttcctcacaaacttctcgggctatgcgaatgaggactggttcgttccggcaccagcgctgcccattccgccggagggtctgggcttgaccaaggagcagacaagagagtgcctaaactatttccttctatgcggcaaccgcgttagccaaatgactcgggcgtacgatgacattgaggccgtgacgcgactgctggaggagaaggagaaggacctagagctgaccgtgcagattggcaaagagctgctcacccagaacaatgcactcgaggcacgggtcgcggatctggaaaccgatctcaaggcctccaacgacgatcgtgcccagctggtccacgagctgcacaagaagaacgagctcatctctgtgcttaccaacgatgcagacgatggcacagatactgacactcccaccatgtcgaagtctataactttggatctactgcagcgcaaggtcaactccctgctcgacgagaacaagtctctgaaatgcgaagccacccaactggcccaccagacggacgaggtggaggagcacgagcgccagctgatggccgatatcagtgctcagctaaacgatgctaactcacagtacgacaacctcagtttggagttggaacggcagcgggaggaaaaccggctgcaacatgagcagatcgtgaacctgaccgctcgcctagcggaggcggaaatgcgactacaccaactgacgcaagacaacgacgaacatctctcgctgctgcacgtgacgaaagaaaaccaaaatgctttggccctggaactggtggagttcaagcagcgttacgaagaggtgctcgctctgctgcactctgctcaggatcagctgaagcaacagcgaaagcggtcgcagccacaggcaaggagctccttcctcggtggccttggaacaagtggcgctggcatgggcggcagtcttttcccgccggattcactgcactgtgagcttatggagtcttcactgtactcagagaatagcctagactctggcatatccggcgacagtcagcgatcagcggaccgcattagccgcatgatgatgcacatgccgtccggcggcatgagctcgtcgacaatgggaggtagcgtgtatgcgggagctggcaatgtgccgccatacaagcgggtattcgacacagtgcgatgtgccggcaagagcggcaactacatggacagcggcaacgtgtcgatgacgcaactgggagctatgtcgatgagcagctcttcggggccgcgcatggcttcgatggcgtatccagcgggctcctactatcgtggcggtagcaatcaatctctgggagttaaaactctgtcaagcgagagtctcaactcccagtcggatgacggttatccagcccagccctctggtgtgccaggagcgcccggcgccaaggagctggaggcggctctcaagaggctgacgccggctgaggtcttggctcgccgtgctatgttgtcctatgctccggctggaacctataactacgacgaaccaatgggtcacggtacaggtaacgttcgaaactcggatctaccgctgggtgtgcgcacgccggacagtattatgtccaccggctcgtcgggaatgtcgggctccacgaatcacatgtccgcttcgatgacgcatcagtggcgactacccgagaagctgcagatcatcaaacccatggagggatcgcagacattgcaccattggtcgcgcttggccacgcccacgctcagtggactgctggatgagcgtcccggcgtaacgatccgtggtggacgtggcctggatgatctgggaatgcagatatacacgctgtcggacgtagaggaggatgttagcgatgatctgcccggcaaacagtttgaagcaccgggctgcacgttcacctacaccaatagcatggtcatgcatccggacgatggattcgttaacgatctgtcattcctctcgcagtcgcagatgtcgtcccgaatggcctccacgtcgacatcaaggcaacccagttgtcctgccacgcctcgcgctggactatcgcgcaaaaattcctgctccacattttcggtgaacctcggactcgctggaatgctgaatgagaggggcatcaaggcggtgacgcccagtgccctcaacacgcccgccggacctaacttttcgcccacggtgacgccatgcaacagcccggagggatcacctcctcgtgcccagtcgcccgagccgctctttggtctgctctcgtgtggtgcggatttgatccggcgcaaaatcgtaggcgatcagcatcagcagcagcaacagaagcaaaggagcagccttagcaagcagcagcagcagaagatcatgctctcgcacctggaaagacgtgccctgcgatcgctgaacctaattgagaaggtggagagcatcggactggagaacataataagcgcacagagaggccttggctcaggaatcgcgaaccgcagcagttcgcccctgagcagtggcagcctacagagtctccacaccagcagcaacagcattgtggacgacatacacttcgatcgggcacagatcaagggtgtcctgcatcgaggcctgaaatcgccaacgcccgcaacagcatcaacatctgcagctgcggcggcttcagggccaggtatctcgacgagcagcagcacgagtgcttacaatagcgatgatagcgacgatcagggcttggtaatgaaaatcaaaccgtcgaagagcgcgacacccacaacaacaggagcagcacaaagtcagccaagttcggcgacgacatccaacggcacggcgagtgaaacgcgactgaagcagatgcagcgccagaaatcgcgcaggcagctaaagaacggaatggccaaccagaggccagatctgggcacaatttctggcgccggaggaggcggacgagtgcgcccggatctgggaaaggtagccgacagcggcagcagcagcaagctcagcaccaagcgaagtgaggctaagcctgcggaggaggaagaggcgacaccacagaccatcacacaggcgtttgtgggttcagttagttccttgctttttggccgcaagggcggttggctgtaaaacaaatagctaatcattcacaaccttattcttacgcttgctggactatagtttacttttaaaggaacggcggaaggatgccttttgcgagtgaagtaacatttttatttaagcactacgcgagaacaagttgaataacgaaacgtaatgtaatcgtgtgatgaacgtttagtttaatttttctgtttaataccccgcataatgcctgtcatcgccaccttaagcaacactggaaagaaggttttagtgtttgtagctgtgatttgtaaatacatatatagagaaatgtttaaatttagtagttattaatcgagtacttcgcatattattattattatttttgcttcaaccgacgacggcaatataagaacaaaacgatggccagctcgatagagaaaccgagttccaaagcagctatttttaatttaaactacattttgccaattttgtatttattttcc

SEQ ID NO: 32583 - protein, 1116 aa, DROSOPHILA
MLSATLGANGGSQPLSPSAQATLSKHLPRLQSKRLLQQTQLQSPAAARPQTCDASCLTELCSSENLPEVEIFSLLEEQIPKYKVRNDFLTNFSGYANEDWFVPAPALPIPPEGLGLTKEQTRECLNYFLLCGNRVSQMTRAYDDIEAVTRLLEEKEKDLELTVQIGKELLTQNNALEARVADLETDLKASNDDRAQLVHELHKKNELISVLTNDADDGTDTDTPTMSKSITLDLLQRKVNSLLDENKSLKCEATQLAHQTDEVEEHERQLMADISAQLNDANSQYDNLSLELERQREENRLQHEQIVNLTARLAEAEMRLHQLTQDNDEHLSLLHVTKENQNALALELVEFKQRYEEVLALLHSAQDQLKQQRKRSQPQARSSFLGGLGTSGAGMGGSLFPPDSLHCELMESSLYSENSLDSGISGDSQRSADRISRMMMHMPSGGMSSSTMGGSVYAGAGNVPPYKRVFDTVRCAGKSGNYMDSGNVSMTQLGAMSMSSSSGPRMASMAYPAGSYYRGGSNQSLGVKTLSSESLNSQSDDGYPAQPSGVPGAPGAKELEAALKRLTPAEVLARRAMLSYAPAGTYNYDEPMGHGTGNVRNSDLPLGVRTPDSIMSTGSSGMSGSTNHMSASMTHQWRLPEKLQIIKPMEGSQTLHHWSRLATPTLSGLLDERPGVTIRGGRGLDDLGMQIYTLSDVEEDVSDDLPGKQFEAPGCTFTYTNSMVMHPDDGFVNDLSFLSQSQMSSRMASTSTSRQPSCPATPRAGLSRKNSCSTFSVNLGLAGMLNERGIKAVTPSALNTPAGPNFSPTVTPCNSPEGSPPRAQSPEPLFGLLSCGADLIRRKIVGDQHQQQQQKQRSSLSKQQQQKIMLSHLERRALRSLNLIEKVESIGLENIISAQRGLGSGIANRSSSPLSSGSLQSLHTSSNSIVDDIHFDRAQIKGVLHRGLKSPTPATASTSAAAAASGPGISTSSSTSAYNSDDSDDQGLVMKIKPSKSATPTTTGAAQSQPSSATTSNGTASETRLKQMQRQKSRRQLKNGMANQRPDLGTISGAGGGGRVRPDLGKVADSGSSSKLSTKRSEAKPAEEEEATPQTITQAFVGSVSSLLFGRKGGWL

SEQ ID NO: 32584 - DNA, 6279 bp, DROSOPHILA
aatgcgcgaatcaattggcatacggcgcgatgagataatcggtcgattcgggcggcaaaaagcaactgcgtgtcaagtggaaaatcagtgaacggtgggtggagggttgacgagagaaaaaaaaacaagaaaacaaaaacaaaacgcgcagccgaaaatcggcaacaacaaaagcgagtgagagaaatgtgcgagaaattcacctgtccccgtgggccgattaattgatgacgtggaatcggacgaaggacgcagggccacaggatatatacatattttccagtgcacatgcacatgcatgctgcacacgcacacacacatgcaaacacacacagtagcgcccatgcagaaaaccagttgtttggccgttgctgttgttgttgctgttactgctgctgctgcaaatgagaagtgcaagtgaagcagcaacaaaaatcctgctcttaaagtacaaagcgaagaaaaggagaaaataaataagcggaaaagggccgagaagaaggtgcgacaacgacaaaaagttgtttgtcaacttgttgccaatgttgcagccacaaagtggctggctgtacaaacagcagcaacaaaaacgcagcatttggcatcgggcaagtccaggcgaaagtaccaggcccacggcaggataataaggagctcccaaaagcgaaacacggcacgaacaggtggaaaaggccaggatatcctgtcactcgggtgagtttgttcactcgaacggttccttcaattttttttttaacacattaccttattttccccgcagctccaaatcaggaaacatcattaaagcttaatgattactcttttgggcgattagaaaagatttaaaaggaaatagatcacaagtatacaaaggagtgtacacgaatttgatattctatttgcagtgaaggggcaattattccattaaatcatttggcaatcagaagaacccctgcctgcaaccatgtccacgattaccagaagcgctagcgcaagtcctatggcgctgaacggcgtcatcgatgccagcctgttccccctaaagtccacggccgatgttatcaatctgttccgtcgcgctctaacctctggaatcgagcctgatctcaccctgctctccattgtcgttggatacatcgagctgtctttgacgacgggagaggctgctgcgcaggccgctcaagccgccgcggccgcagtcgcagcaggtgacattagtcaggcgacgacaggtgtgtactgcacgccgtttatcacttcattttaccttttaccgctcgcattcaccgttaaccaattagcaaagggtgaccagttaaaacggaagcgattgcatacaaattggaaaagtttctgcctcctctttgctggtttacttcagaattaaaaactattagcaacttgttcacttataattgcaggtggaaatgacatcatcatgggcaacagcgtcccgtttccagttgttacccacgaactgatcgccgggctgtataagaagttccagacgatcctgtcggtggtcgagaagcccaagccccaccgccaagccacccgcgaggtgatcaagaaggtgtcggatgtgatctggaactcgctgatccgcagcagctacaaggatcgggctcacttgcaaaacctctacagctatctgtccggcaacaagttggactgcttcggcgttgctctggctgtggtggcgggttgccagttgcttggctacaaggacgtgcgactggccatctccgaggatcatgcctgggtggtatttggccaaaagcgcgtggaaacaatcgaagtgacatggcacggcaaaggaagcgaggataagcgggggcaggatattcgtcccgggatcgaatccggatcctggctctacttgggtaagcttgaatctgtgcgggcgtgccacttgcttgcattgtctaacatacctttcctttcatttaggtggcctggcggtggtttgcgagcgtggcatggaagtggcggccatctgtgccgctctgaatatttcattgacctcgaacagtgactgcgtggaggtggcagagcttcaacagcagttgctgtggctactctacgatttgggccacctcaaacgctatccgatggccctgggcaccctaggcgagctggaggagattcatcgcacgcatcccagcatcagttgcgagcagttatatcgcgaggctatagagtcggcgaggacccactatcggaaccatcacgtatatccgtatacctaccaggggaactactacaatcgattgctcaaataccgcgacgcctttgccgcatgggcaaatgcggcggacgttattcgtttgtatacgtatcagtgtcgtgatgacgaggagatctacaaggagctattggacattgccaacgagctcataccgtacgtgatgaaaacagaaagttctggtcattcggcgagaagtattctacgagattctgaggttttcgccaatttgctgcgattctacgacggcatctgccaatgggaggaggatagcttgactcccattctacacattggttgggccaaaccactggtgaataatatcaccaagttcgattacgacattaggtcccaggtggtcatcaagttgcccgaggatctggaggcggagcaggcgaaggcggaactggcgagggcggaacaggaagcaaaggaagctaaggagtcgaaggaagctgcaggatcagaggcaatggaaggcaataacaataggatggccacaaaggaggaggtaagcatactcattacttcacattataaattttatttaacacttcagtccagttgaaaatagaaaatatataattcttgaaattcatttggaacgaaattttgcagacatttttttttcataaggtgttatgtatgaaaatcaaaatcgtatccgatggagtaattcttctttagatgcctacattcacgtagtttgtatattccgtggattctaaattggacgcaacatttgcatcaaacctttaggctctttctgaccttagtttgcgaacacctagtatttgatttttgattttttatttgagttggcgtcaacttaacgtcttcctgacgagaaaattccgtgcaagacttgaattcttctttcttggttaattcatcttcatcaataagtgtatccgctttacgcggatgcactcttgccgtttgtgcttggttcaatagcaattttcttaattttagaacagctttttctggatttaaatcgtgtttgtttaatattgactccacgcgtgacaacttgttggtcagcttttccttatcaatctgtaagttttgtagctgtaattctagtttgtcgatcaaattaagattggatcgcagatcactcgtttcctgctcatacttttcgcatacagtgtttagttgctcgttttctggatttggtcttggaatttccgagatttttgacgttgcgtctgtgccagtcttctcatcattcttactgctattgagctttttcacaaactgatcttgcaaataacgtttttgggctttaagttccaactcatcttcgctatccgatggcagagaaacgtgcttgctctcggcaaggaattgtgaggactttttgatattctttgtctgctgtggttctggattcgcctgttcggttggcttctccctacgaatactcttaaagatgcccggtctgaatgatagagcatcgaggctgttttgcctctcgaatcggacgggcttttttgcataattaaagaccatcgactggcatttatgcactgaacaggtgctgccagttgagatggaggctaccttataactattgtctaaaccgattggcgagccttttctcacctttctggcatcgtattcgttccccttgtcgtttgcttcatagaacttgtatatccaattgcagaagaccacttgattgtgtcccagagttaactcatgcactggcatataaacggttactcttagtttttgaaagcaattgtttagtaaccggaaatttaactgaaagtcgctgatgtcgttcgtataaaacttgaccttatgaatttgtatcgaattgggaaagagtctgtgcatcagttggcaatatactgctcctgttttcagatcctcaaagcctcgcaattcgcaatccagtttgctgttgataaacatcagcagcgtcttgaccgagactacatcgtatttgctcgctgttaccctcttcaccatgttggtccatggactagtgtccttcgttgcggaaagtgccatggtactttatgtaagtctgttgactccagttatattaacttgggtaaggagtacaggtcttaaaaggaaacaaaaattttaatttatagttaagtctacttttaaagttcagctattcttaccgattctgtgttgactgaggtacattctaaatggaattccccgaagaaagaaaacagggtcacagcctactacgattgtgggtttcgtgctcgttacaagttattcatattattattattattatatttgccagaaatccaagaactcggagctgccgactaccttggccgatttaactgctgcctgtggcgagaagattctcaatccggatttcctgctccagggcggcggtcagccgttcgccgatcagaagcaacagccttctggcggcgaatccgataatccagaactccacaacaacaacaataacagcaacagcaataacaacaacaacaaccacaatgcggacaaaaaggaggccgcagcgaccacaactaacgcaacaaccacaagcaatggcagcggcacctctgtccagttgcccgtttctagtgaggccaacaatgctggccaagcacaatcccaagttcaaataaatgaccaactgggaaaaccacagcacaaagaagctaaaaaagaggagacaagcgacgactacgatcccttcgagataatgctcaagcggccagtcatcaccttgtacagccaaaaaatgaagggcctgaaggatttgctgctggccgaaaagctgaacacccacgctatttccctccaagtcaccgcccagtcggtggcctctcgaaaggttcgcggtgtggagaaacattcggccacaatttcagccaccatcactgcaatctcttccagttccggcgacagtgtcctgagcggagtcggtggcggaggtggcagtgggtcggcagtcaccggtggagcgtccttggcatcatcgtccctaggaggagattctatagccgcatcacgcccaaaaagaacgcgtcgcgagtaattctcattgttgtatattacgtattggaaaactcttattaatcgtatgtgcaagctaaggtggttcgatttttttttgtgctaatataaagtagagtaaactgtatagtttttcagcaaatttcgttaaaaacactagagccacgctggaaatctgtcccctgagcacaatgaagtcaaaatgcacttcaataacttatatttttaaatatactactacttttacaaatttaaattgtctcgaaattgaaaattgcatcttataactatttcatcagcagaaaattcgaaccacctaagtaaccatgcatatattatataagctatcatatttttgatgttcgatgtgtatttatgtagttcgtaagcgtgagacgaaacagaaattaagccgttatagaacgcctagcgttttaaaaagaaatttaaaatgtgaaacacataacacacagacatgtcccagcaaacaaacaaacaagcacacgaaacgctaagctatgctaagtatttatgatgtatttttagctgttatactttatcccctatgtatttattgctacaactatgtgttttcccctcaagcaagcttaaaatcttttttttttattgtgtttaagcgtaacttaattggtgcttttcttcgaaaacgaatgagaaatataggttctgtgtttgatttgatcacaccttgaggcaaaaatcttgaaaaatgttttttgaacaataaccgaattgaagtccaaatggatagacggactgctcgtatttatgtatttactttaaagcattttattgaggctaagctgattaatttaactctatttacatatatatcctctaatatttaagaacgcaaatccttgttacgaactgttgacttgaagcaacaaaacagttggcaaaaccgaatgctaaacaaatgaatacatatttaacacttcctctatatgtgatacaacactttttctagaaaagctttcatattatcttataaactaaat

SEQ ID NO: 32585 - DNA, 2442 bp, DROSOPHILA
atggcgctgaacggcgtcatcgatgccagcctgttccccctaaagtccacggccgatgttatcaatctgttccgtcgcgctctaacctctggaatcgagcctgatctcaccctgctctccattgtcgttggatacatcgagctgtctttgacgacgggagaggctgctgcgcaggccgctcaagccgccgcggccgcagtcgcagcaggtgacattagtcaggcgacgacaggtggaaatgacatcatcatgggcaacagcgtcccgtttccagttgttacccacgaactgatcgccgggctgtataagaagttccagacgatcctgtcggtggtcgagaagcccaagccccaccgccaagccacccgcgaggtgatcaagaaggtgtcggatgtgatctggaactcgctgatccgcagcagctacaaggatcgggctcacttgcaaaacctctacagctatctgtccggcaacaagttggactgcttcggcgttgctctggctgtggtggcgggttgccagttgcttggctacaaggacgtgcgactggccatctccgaggatcatgcctgggtggtatttggccaaaagcgcgtggaaacaatcgaagtgacatggcacggcaaaggaagcgaggataagcgggggcaggatattcgtcccgggatcgaatccggatcctggctctacttgggtggcctggcggtggtttgcgagcgtggcatggaagtggcggccatctgtgccgctctgaatatttcattgacctcgaacagtgactgcgtggaggtggcagagcttcaacagcagttgctgtggctactctacgatttgggccacctcaaacgctatccgatggccctgggcaccctaggcgagctggaggagattcatcgcacgcatcccagcatcagttgcgagcagttatatcgcgaggctatagagtcggcgaggacccactatcggaaccatcacgtatatccgtatacctaccaggggaactactacaatcgattgctcaaataccgcgacgcctttgccgcatgggcaaatgcggcggacgttattcgtttgtatacgtatcagtgtcgtgatgacgaggagatctacaaggagctattggacattgccaacgagctcataccgtacgtgatgaaaacagaaagttctggtcattcggcgagaagtattctacgagattctgaggttttcgccaatttgctgcgattctacgacggcatctgccaatgggaggaggatagcttgactcccattctacacattggttgggccaaaccactggtgaataatatcaccaagttcgattacgacattaggtcccaggtggtcatcaagttgcccgaggatctggaggcggagcaggcgaaggcggaactggcgagggcggaacaggaagcaaaggaagctaaggagtcgaaggaagctgcaggatcagaggcaatggaaggcaataacaataggatggccacaaaggaggagagaaacgtgcttgctctcggcaaggaattatcctcaaagcctcgcaattcgcaatccagtttgctgttgataaacatcagcagcgtcttgaccgagactacatcgtatttgctcgctgttaccctcttcaccatgttggtccatggactagtgtccttcgttgcggaaagtgccatggtactttataaatccaagaactcggagctgccgactaccttggccgatttaactgctgcctgtggcgagaagattctcaatccggatttcctgctccagggcggcggtcagccgttcgccgatcagaagcaacagccttctggcggcgaatccgataatccagaactccacaacaacaacaataacagcaacagcaataacaacaacaacaaccacaatgcggacaaaaaggaggccgcagcgaccacaactaacgcaacaaccacaagcaatggcagcggcacctctgtccagttgcccgtttctagtgaggccaacaatgctggccaagcacaatcccaagttcaaataaatgaccaactgggaaaaccacagcacaaagaagctaaaaaagaggagacaagcgacgactacgatcccttcgagataatgctcaagcggccagtcatcaccttgtacagccaaaaaatgaagggcctgaaggatttgctgctggccgaaaagctgaacacccacgctatttccctccaagtcaccgcccagtcggtggcctctcgaaaggttcgcggtgtggagaaacattcggccacaatttcagccaccatcactgcaatctcttccagttccggcgacagtgtcctgagcggagtcggtggcggaggtggcagtgggtcggcagtcaccggtggagcgtccttggcatcatcgtccctaggaggagattctatagccgcatcacgcccaaaaagaacgcgtcgcgagtaa

SEQ ID NO: 32586 - protein, 813 aa, DROSOPHILA
MALNGVIDASLFPLKSTADVINLFRRALTSGIEPDLTLLSIVVGYIELSLTTGEAAAQAAQAAAAAVAAGDISQATTGGNDIIMGNSVPFPVVTHELIAGLYKKFQTILSVVEKPKPHRQATREVIKKVSDVIWNSLIRSSYKDRAHLQNLYSYLSGNKLDCFGVALAVVAGCQLLGYKDVRLAISEDHAWVVFGQKRVETIEVTWHGKGSEDKRGQDIRPGIESGSWLYLGGLAVVCERGMEVAAICAALNISLTSNSDCVEVAELQQQLLWLLYDLGHLKRYPMALGTLGELEEIHRTHPSISCEQLYREAIESARTHYRNHHVYPYTYQGNYYNRLLKYRDAFAAWANAADVIRLYTYQCRDDEEIYKELLDIANELIPYVMKTESSGHSARSILRDSEVFANLLRFYDGICQWEEDSLTPILHIGWAKPLVNNITKFDYDIRSQVVIKLPEDLEAEQAKAELARAEQEAKEAKESKEAAGSEAMEGNNNRMATKEERNVLALGKELSSKPRNSQSSLLLINISSVLTETTSYLLAVTLFTMLVHGLVSFVAESAMVLYKSKNSELPTTLADLTAACGEKILNPDFLLQGGGQPFADQKQQPSGGESDNPELHNNNNNSNSNNNNNNHNADKKEAAATTTNATTTSNGSGTSVQLPVSSEANNAGQAQSQVQINDQLGKPQHKEAKKEETSDDYDPFEIMLKRPVITLYSQKMKGLKDLLLAEKLNTHAISLQVTAQSVASRKVRGVEKHSATISATITAISSSSGDSVLSGVGGGGGSGSAVTGGASLASSSLGGDSIAASRPKRTRRE

SEQ ID NO: 32587 - DNA, 2295 bp, DROSOPHILA
gtatataacattagcagactaaatgtaaacacaaacgaaatcaaacaaactatttaattatgtagatttgcagaccgcaacaactaaatgttaaatgttgaactagagttaaaattgtgaactctagaaaccgaaactaacgatgcaacaaaggagtatatattttggcatacaaaatttttaccattaagtcaactaaatggaagaatacaaattgtgaaatatgttttatttttactacatttcggacagcacgaaaaccagcccaaaaatagacaaaacttaaagttcgctatgcaataaatcaaaaggcagcaattcaagaacggaaacaatatgaaaaactatacgcatataacatatatatttattaatgttaacatatggtacatttttgatctaattgtttaaaatagccaaccagcagcaacagttaaattaaatgtagcttaaaacccaaatgctcaataatccctttagcttgaaaactaaatagccagccgtaaaaatgttatacaaatcattaaatgcatataaagccaattttaaagtctacaacaaacctgagaaacttgagatcttaaatgaacttcatttttaaagtgcttcaactttttcgggattgtaatagcttgcgtttgaattcaactcacaatttagtcgggtgaaaagcctaattacttaattcttttactagaaaaggagaaatatattagaattattaacggctgtgtcaagttgccaaatatctgccaacatttgtttgtaatattcttaattaattctttagcctttttttctagctataaagttagatttgacatcactgtcgggtgccaacggtattttgaaagtattttttcctgttcacttgggtatatttcgacggtacagctgcggtcacacaattaaaagtgactggcatcatttagcaacaaaaaacgcgaatagcgtcaaaaacattgttttatcgccgttggaattaataaaagcacacaaaatgtctgccccagataaggaaaaggagaaagagaaggaggagaccaacaacaagagcgaagacttgggtctcctggaggaggacgacgagttcgaagagtttcccgccgaaggttggacgcaataatgtggtggtacatcggcagtttctaatcactttcattgtagatttccgcgttggcgacgacgaggaagagctaaatgtgtgggaggacaactgggacgacgacaacgtggaggacgacttcagccagcagttgaaggcccatttggagagcaagaaaatggaaacgtaaaccggcaccgacccctttgttcagtcctaaccataaaaacgagctgagctgttttgcattaatagaataaaatcagtatattaagtggaattcatctgccagttttgtccgagaacctcatggatttgctcatttaatatggcatatagctgatcttgctccaaattttgctggtctagctcgatcaagtgattattcagatcctccagacgtttcttgcgatcctcaacatcgacctgcagctttttgagttcattttgcaccttgtgattctcggcatcgttttcctggtttctttcctcgtaccgatgtgcacaaagagcgagttcctgcttcttggcctctgcatcctgaaggagcttctgataattaactttacaggtgggcaactgcttttccactgcctccagctgcttgaagctctctttgtaatcatccaccttgcacagcgaaagcacagccgtggccttctccaaagcggtggctatatgttgactgttttcgatcatccggcgatgttcattcgtcacctgttttttactggccagctccgtcttgcagctctcgacatgcgacgatgcgctcttaattttcctacaatgtttgacattaaaataagcacagaatctaggcttgcccgacagcacttactctcgcagctctgtcacttgactgtcctccaccactagctgttcccagtgaccgatgcgtttgtccagctcaccctgctgctgctcaatgagttccagagtgttttcatgctcgctacaggacttcttcaaaggtagaagctttgcttgagtatcctgcaaatctttcttgagtttgtttatggccacttcgcaatccttcgtcttctggctgcattgctccagctgttgacttttggccttcacctcggcggtcagcgaatcctttagcttaatggcctcctctacaggtcccagcaccttctttttgaacaccttgtagtaggccagatggttgaaaaggtagctca

SEQ ID NO: 32588 - DNA, 240 bp, DROSOPHILA
atgtctgccccagataaggaaaaggagaaagagaaggaggagaccaacaacaagagcgaagacttgggtctcctggaggaggacgacgagttcgaagagtttcccgccgaagatttccgcgttggcgacgacgaggaagagctaaatgtgtgggaggacaactgggacgacgacaacgtggaggacgacttcagccagcagttgaaggcccatttggagagcaagaaaatggaaacgtaa

SEQ ID NO: 32589 - protein, 79 aa, DROSOPHILA
MSAPDKEKEKEKEETNNKSEDLGLLEEDDEFEEFPAEDFRVGDDEEELNVWEDNWDDDNVEDDFSQQLKAHLESKKMET

SEQ ID NO: 32590 - DNA, 2739 bp, DROSOPHILA
catgctgggactacccttaattggcgatcaacgagataatcttcagagaatgcagtcgaaaaactggggtttgaccttatccaccaacaatctgacgcattggaaactagcgaaggccataactagaatgcttagcgattcgagttatggtgaaactatattgaaagcttctcaattgtatcgcgatcgtccagtgagtcccagcgatttggtgacctattggatcgagtatatcgttcggcataaaggagctaaaaatttgcacaatcccgccaggcaactcaatataatcgaatatcattccatcgatgtttattttatagtttatgggctcttaatcctaacgattgccatactcagaaaagtgaatagcttgctgtgactagaagtattatttattggatacaaaaatatattaaataagtagctaggaggtcaacttaatcgacaataacttaagtacactcgaatgttgcttgtcaatacttctgattggaacatgggaatctatttaatttatttttaaagaggaccgaaaatgacagttacttaagaacttttctatgaaagcgttacagtgattttgagttcgacagattcttatgattttaataaataaaacactgtagactctttcaaaaaagtccaaaagaactaatactttcagttctcaatgtctgattttatctagtttcactggcatcttaaactcagcttaattaagattacattttaagtgtattttctgtaaagtaatcacttggtccaaatatgaatttgaatcggtctttaatattataatattattactcataatactaacaaccaaacatagtatgcctttagtttgctcgcttatccgaacgaacagttcggatttctggatttctttgttctatggccattgcgtatatttaaacacagtttttcttcaaatgccatgaactttataatgtagatttaagttctggcgttttcattctttcaatgggaatttggtttagcttttgccattctgacgttttgactgcaaacgctgttgcagattgggattccgatttggaagacccgggcgtggacatcgaccgttcctcacatcatatgccccgtagttgcaaaacggcggactgacttctccactttgaatgcggctgaaaaaataaaaattgggggtttaacaaaattatatggcacttaaagcattacgtaatgataatattgacaaaaaatggtttaaaagtgcttaaaccttgaactcaccgtcgttccatcaccgagaatccctcaacgccgtttttcagcctcttgcacgtttcgtcgctgaggtggcagtcgcatcggcagcgctgctccctccgctcccacagacgcagctccaggtgctcctcattctcccactgcgcacgcgatcccgcccaactgaagtccttgaagtgcttggggcataggcaaatgggacttcgtttccggcgcgtttccaccttcacacatccgcattccgtgtggttctccatcgagataacgatgggctcattggaacggccatccactttgtcgaacacccgatccaccgtttcgttccttttcatttggcaggtccaacccgcattgcagcatccgactttgtcgctgcatctgtgcagaattgtggcacggggcgagtagaacgtgttcgtttctctcgtgatgtggaccacctccggtcttggaacccggcagataccctcctttgccatcatcagtcggtgtgcctcgaccctttttttgagctccctggtacgattatctgaaaacggtgataatggttgaattgtatatataaagcttattcaaacttcacattttttgtaagattcgtacagagcttgttaaaactcttcaagcctattttacaacaaaatctatatatctatatagaaatgtagaaatttaatattagaaatagtaaaaatgtttaatgcttaattacccaatatgcatacatttcatatttccaatagcattccatcctgttgctataaatcagctttgaaattctttttacgatcactgcaaacatgcaagtcatagctaaaggcactaaattgcatcctgctgctttaaatataatcccctgaaatgtttaatttttatatgcaacacatatatgcatatgtgtgtcattggaataaccagtcgacgggtttgttacttaatagcccactaaatcggtgagttcagttaactgccagaaattctcttctcgtgcgtttcgcgcgcgattctcatgcgattcggtagcgttttcgatcgcccactggctttttgcgatgccagcagcttaagatcattagtgagatgcgattttttttttattgatgatcggctgctggagattgcccctttaaggccattttagctggcttaagtttaccgttgcaggccagctttatttatcgtcttttgtcgcgaccataaaaaaaagtacaaataaaaagaaaaacatccagaagcgatctttgcatgcggaattaactttttctcgtccgtctggcggtcataaagtgccaggaagcaggcgaattggcgggcatcggagggagcagtctgcacaaagaccacccaatgttcagttagctgagctaatccccaatcctagtcccagtccccattcattcacctagtgggagaacaactttgctggcgaatctcctagggagaatcaacggttggctccacatgtaattttcataaatgctc

SEQ ID NO: 32591 - DNA, 561 bp, DROSOPHILA
atgatggcaaaggagggtatctgccgggttccaagaccggaggtggtccacatcacgagagaaacgaacacgttctactcgccccgtgccacaattctgcacagatgcagcgacaaagtcggatgctgcaatgcgggttggacctgccaaatgaaaaggaacgaaacggtggatcgggtgttcgacaaagtggaaacgcgccggaaacgaagtcccatttgcctatgccccaagcacttcaaggacttcagttgggcgggatcgcgtgcgcagtgggagaatgaggagcacctggagctgcgtctgtgggagcggagggagcagcgctgccgatgcgactgccacctcagcgacgaaacgtgcaagaggctgaaaaacggcgttgagggattctcggtgatggaacgacgccgcattcaaagtggagaagtcagtccgccgttttgcaactacggggcatatgatgtgaggaacggtcgatgtccacgcccgggtcttccaaatcggaatcccaatctgcaacagcgtttgcagtcaaaacgtcagaatggcaaaagctaa

SEQ ID NO: 32592 - protein, 186 aa, DROSOPHILA
MMAKEGICRVPRPEVVHITRETNTFYSPRATILHRCSDKVGCCNAGWTCQMKRNETVDRVFDKVETRRKRSPICLCPKHFKDFSWAGSRAQWENEEHLELRLWERREQRCRCDCHLSDETCKRLKNGVEGFSVMERRRIQSGEVSPPFCNYGAYDVRNGRCPRPGLPNRNPNLQQRLQSKRQNGKS

SEQ ID NO: 32593 - DNA, 2629 bp, DROSOPHILA
tgagttcaatggcggaatttccattcgattaaacattcgtggccgtggaaaaacaaaatgaaaatttgactagaaattaaatatgaaaatttaattttgtttttgttgcgacttatccaggatggtttttgtttgaattgtgttaaaacttagcttaaataacatgaacaatatatttgctcctatatgggtaatttatatatttcaattgtaatattagtgattcgttttcgtttgttcgttttattataattaaataactaattaaataacataacattagtcaattaaaactaaaaacgcagtcaatttatatatttggaatttcatttagcatacgcataaaacacacacataatttattctggtttatttgtggatgttgtatattgaaacacttaagaacaatgctacaaattcatattggcttatgtgtttttctatctcttagtaaaacatgcgcaaaaaagtcttatttccatttgctaagatacagatttttgtttgcacctaactttaatggctcttcggattggagtcctaataaatctaatacacaatcagctgggtcgatttttgaagtagaaaatgcataatctgttttatacttttcttagtaaaagttttctcaactttaattttgatttaaacctgtagaaaatgttattttttttctgcttgttgtcgaatattcattttggttgttttccgacccaacccatgtatagatttatttgttccaattattctgttctagacattacagatttcaaggagggaaaactcctagaaatgctttaaagtgcttcttgctaatcgacccatcgttttactttcttattgttttgtataggatatgcaactaaattcacgtctctcatttcgcctttactcttgtcagaagagaagaatcgctctggattttcctctttgtttgagatttgagttttcttcagaccaaataatacttttcctggcttcacgttgggattcctcccgcttatgacatggcattgtaggatggctgttcgtgttgcttgggacagcgaccgtgtttgtccatgtacaatccaaactcacacgtgggcggcttgcagcgaccttgctgtatgcacctgtttttttgggggagggagaatcagatagttaggttgggaatgggtaaaagtctggttctccactcacttgcgatcgttcatggcaaagtgctcgttgccccgcttcagccagtcgcagtcgtagttgccggagctgcagtcgcacctgcactgcccatcgtcctgcaggatcttctcaaagctcttcggacaggtgcaactcagtatggtggcccgcaccaccgactggccgtagtgggccatggccgtctcctcgttgtaggtcgatcgttcgatgcagtggcactccgtgtggttcacaaaggttcgcttctcgattacactgcgatgcttactgctcttcacctgagggaaatcggaaaatagataaatccttaataaggcggttcacaagcaactaaaccacattcgcttaattatgccgagcaactaactatttgcatacggagcttggataattgacccccgaactgcatgacgagctgccatgtggaacgccatgtgaatccatatatagcgtatatatcttcttaactgacagcagggagttgacagtttcctaagctgactgctcatcaaacttgttgtcattgttgcgatgtctagttgtcggtcggttattgctatagctcttgtaattcttaaatgagttgtcagttgtctgtgccacaggggcttatgttgtgattgtgaatcgctgttgtaagggggatttttcgatttcatgtgcattgtatctctaaagtgtttcattttagatgaacagatggtacagatggacatactaatgccttgtaagcactatttttgatatggaatttgactcagaatcactgtttattcatactactagtaagtacttatctatatatcatattttatagtaaaatttttgcatccccctttaatttgactgaacgccactggccgagagccattaacagaccacaaaacttctacagctgctggggcttggaattggattggtctcgtgtcgtcactttggtggctggcctgtggtccacttgccactcctcacctctacacttcgcccgaatccgctcaaaattgtgggtctcttgttgcatgacaagtgcaaaatgatgaaatgcgtatgaattgcataaattaagttggatttgtttaattaaaataacaagttggccattaatcaagccctggccagccactcatccagcgcatagatcttggttagcaaggagcagtatgtggcaagggggaaactggggaaatgtcaggaaaatgtgccaaaaaaaaaaaaaaacgtctggagaaaatggggagtgctgtgaagcatttgaattttgattggacgcatcagggcagaaacaactaacaatcccaataagttgacaaagcataaaaagggaaaattcactggttcgtttcaggtatttatgaaaatgcttcaaattgagtttttacttaggttcgctgcgtttcgtgttgtgtggtttttacggtttgtggtgtggttttggctaatagaa

SEQ ID NO: 32594 - DNA, 459 bp, DROSOPHILA
atggattcacatggcgttccacatggcagctcgtcatgcagttcgggggtcaattatccaagctccgtgaagagcagtaagcatcgcagtgtaatcgagaagcgaacctttgtgaaccacacggagtgccactgcatcgaacgatcgacctacaacgaggagacggccatggcccactacggccagtcggtggtgcgggccaccatactgagttgcacctgtccgaagagctttgagaagatcctgcaggacgatgggcagtgcaggtgcgactgcagctccggcaactacgactgcgactggctgaagcggggcaacgagcactttgccatgaacgatcgcaagtgcatacagcaaggtcgctgcaagccgcccacgtgtgagtttggattgtacatggacaaacacggtcgctgtcccaagcaacacgaacagccatcctacaatgccatgtcataa

SEQ ID NO: 32595 - protein, 152 aa, DROSOPHILA
MDSHGVPHGSSSCSSGVNYPSSVKSSKHRSVIEKRTFVNHTECHCIERSTYNEETAMAHYGQSVVRATILSCTCPKSFEKILQDDGQCRCDCSSGNYDCDWLKRGNEHFAMNDRKCIQQGRCKPPTCEFGLYMDKHGRCPKQHEQPSYNAMS

SEQ ID NO: 32596 - DNA, 3413 bp, DROSOPHILA
caagtttattttggggatttcctcgaaactatttgcatatttaaaccgactttaaagctggcttactgcaattcgcaatttaggcaaacatacaagggtggggcgttctggtttcttaaaacgatttgttgaagaaactgaagctctacttcaagattaagcaaagctttaatctgttgaatttggaatttcatatttcacaaatccgcaaaatctttaaaattttcgaccctcgtagctcttctattaattataaatacttccctacttccgcttatcttcccatgggtttttcctcgagtgccgaaaatgttaaattgccctacgataatttgtgtggtcttgctcgcaagttttattggataattaagtggggcgagctaacttgactcccttatccgcccccttttcccatacaatgatggctcatgtgtgggcgtgtttgtcttgttcttaagcattttgcggtcatatttgccccagactttggtatttcttctggctcagagtatgtgagtataaatcttacaagtggcaactttttgcggcaagcgcagcataaatatttgaaaattaaaagccatcctcggaggacgtagttactgcctcgaaggctactaataaaaaagttgccaccgcaagagtgaaatttatgaaatttatgtaaagagtggatggaggggaaaatcaactacctacaaagtcgcttgtaatggaaaactaagcaaatgcgcaggaaatttatagaaaataaattttgtttactgccgaaatccgtagataaatattggaattttgtttgaaatttgtaaagtttttgctgaaaataatgtgttattcaataagttgcgataacttatacgtacattgtgctgcctaagccaatttgaacggcttagagatacggaaataatccctgatgcttaagcttcttatatgtagttaacccatttgaatcaaacgaatgcacagctcgtttccgttaattagcaaccatccatcacatggccaacaatccaatctgtagcatattaaaattaagcaaaaatgggtttcctctcccccccagagcaaagcacaaatgcttaattacattctcgatttcaacatgtattgaaagctcgttacgtaacaaaaagtcagcaagaacaatgacgggcagcaacgagcaacaataatcatatcatgaggcataaatcaccaaacaaattgaattatcattgcgtcattaaaaagtcatttcagtcgaaagaccgcactggaaaaagacgtacttacagcgatcaaaaataaaatgaaaataaaggtggaacgatataattatgttgcaatatggtgccctcaagcatgacctacgcccacaacgacaacagcaacgtcgattaccaccgatggtattttcaccagaaagagacggcagcatgtgtgcatgaaaagagacagagcatcggtacttaaagtcacaaaacgcgagcaaagcgcacacgttcgctttcaaaaaccctaaagctcaaatacaatgaatgcgcgtcagaatgaaaatcgcttttcatttattattgttgttgctttcgctgcagccaagcgcaacattttaatgcaaattattttcaaaggcacaagggcgtggtccaatgtgaagtgactcaatgaagactgagttattaacaaaattcggtaaagcataataattgtaagccagctactgcttaaatattttatatatattactataaacccattaatgattgagtataaatctgtatttttatattctgaactcacgaagaagtgcagctcaacgttgtgggtgctcttggcggcacaaatttggcttctgctggggcaacaaccactgtcctcgctgcagcgatgcaggatggtgcagtgaggcgtatagatcttggaaggatcctgctggaccagctgacaacgtttctggggaatgcggcaggtggcctccttcagcacctggttcatatgggcgtgggcaagagctgtaaatggatgaaatattaagttaaatagatttcaccacaggcagtcccaccggattggattacctcgttcactcttctgcttctgagcatggaggcgtctcgctttgatcaccgcttcgggggttcccaactggtcctccttcttctggccaactttcgccgcaacataattgcgtgcgtaaatgttctccacatcctggaaagaaaaaaaaacagggttgggttcattttagttatgctaattgatggttttgttttgggttcgttttcatatgggggatatgttttggccaccatatcaccacccacattacgcatacgccaccggtgccgctgccataaaagtcactcacattaataaagcccccatttgtgccgtgtgatgacaatttgtcaccatttttattgtccatagagggcagccaaacagggaagggaaggcaaacacagattgaggtaacatgccggtgtaacattaacgagaagttggtacccaacaatatgttggcccacctgaagttcataaactaagaattcatgtgcatgcagacggcacaaaaagcaacagcagttacatgaatgaaacgcaagttaaagagactaaaagtcggctgatgaatacccttacccaagtataaaaaaagattatacagaataaataaatatgtccaggcttaatttcttaattggttgttagccaaacttgagcttgggaatttaagcaactttattttctaataaatatttaacattccaagatgcgcttgcaatgcgcttgcaaagtatttaagttgtgttggtacaatctaaaatttaagatacaaactgagctctcgaatcgctctaccttgacccataagtgcagaacaatgggcacatgaaacaaattggcattcaaggcaataaatacaactgcgagaacaatagagaagaaattgtcggacatgaacatatagcgatgctcgggaaaaaggaaatcaacctggtccatggcccaaagcagaaccagcttcaaaaaaaaaaaaaaaaaaaaaaccaggcccagtcaaccacgaattggaagcgagaccgaatgaagtaaaaatgttgaccaatgcgcacaattggcaatttgtgaagttaagcgaaattaatgagctgactgcggccatagctctggcatcacacacacaaaaaatatatacatataaatatacaaaagatataggcagtgtcggtaggagcgaaaaatcgtaaattgtgcaaatgtgggtgggccgaatggctaaataaaaggccaacgttctggagtttgagggcctgttcattagtcacacattgagcatacatatatataagtaagtactatatatgtatgttcggtacaaggtgctcaagagcaattggcataaatcttcgtccatggcatttgtg

SEQ ID NO: 32597 - DNA, 465 bp, DROSOPHILA
atggacaataaaaatggtgacaaattgtcatcacacggcacaaatgggggctttattaatgtgagtgacttttatggcagcggcaccggtggcgtatgcgatgtggagaacatttacgcacgcaattatgttgcggcgaaagttggccagaagaaggaggaccagttgggaacccccgaagcggtgatcaaagcgagacgcctccatgctcagaagcagaagagtgaacgagctcttgcccacgcccatatgaaccaggtgctgaaggaggccacctgccgcattccccagaaacgttgtcagctggtccagcaggatccttccaagatctatacgcctcactgcaccatcctgcatcgctgcagcgaggacagtggttgttgccccagcagaagccaaatttgtgccgccaagagcacccacaacgttgagctgcacttcttcattggattgttggccatgtga

SEQ ID NO: 32598 - protein, 154 aa, DROSOPHILA
MDNKNGDKLSSHGTNGGFINVSDFYGSGTGGVCDVENIYARNYVAAKVGQKKEDQLGTPEAVIKARRLHAQKQKSERALAHAHMNQVLKEATCRIPQKRCQLVQQDPSKIYTPHCTILHRCSEDSGCCPSRSQICAAKSTHNVELHFFIGLLAM

SEQ ID NO: 32599 - DNA, 3209 bp, DROSOPHILA
gacgaacattatttgctttgagccaatttaattggttctttttaaggtaattacaccaagtcggttggcacggacacccagtgacctctgggttcggtggatcaaagggacgcatgaaaatgcaattaaggggggcaatactaaaatctagaacctctgtcaacaatccactcaaagcaaacataatggaatggcatccaaaaagtgcaaatcaaatgcaacaaattaattgttattgttgttgcattttgttgattttcgttgccgttctgactggtttcaattagccaggccgccattgtgaatggctagcggtcagccaaaaagtgccgaattggcaaaagccagctgctatcctttcccctcctccttcaccttcaccgccccccctttcaacctttgccgcattgtgtaaacatttgccatgagcaccaaaacacaaagtaaagctacatgtctgtttttgttgtaagccaaaatgcaaacggcattagccatggtcagtgcgttatgccgaggtgagtaatggcagtgcactgcgagaattttctagctacgaaatgaaagtgagagttctggaatcaaccaattcatcttcacaatgataaacgaatacaattgcaacacaactcattctaatttagatatttacatacttcttatttgtagacaatctcgatagcttagataccattatttggctcagtgcacttgaacatctatttgtttactgacggattttcggcgtgactaaccatcagcaacaaatgaaaatcatacgtgaaaccgaaaccagaatcacagtctggccccaaaagattggttggtcatttgtggccacaatcactactatcgctgtctgtttatgaacggaatctcttatcaggggctctccaagcagccccacagccaaatcccacataatggagcaatgtcagagcaacaacaatggctaatgacatcatgaaatcggcgggatgccgcagacttatcagtgaattcagaacaatgggcgcaatgccagactcacctcattctcaatgttccttatgagaggggtattccggctcttctctcgcatcgccagtagttctttctggtgtttctgctgcctgagatggtgttggtgctcgattttgttccactgttcattggagaagccctcctccgactcggagtctgaatcctcattggagtcgtcctcttcgccaccgccattctttagattcgcatcaattaattgcagttttggcctttcggttcgcattattgtgggctttactgtgctggttgttgaggttgttgttgtcgttgaagtagttgtgatgtgtggctttttaacagcctctttttccctatcatgtttgaacagccaatcgaatatattccgcttgccagcagacttgtcgtgcggattggccacgctgggatacttgttgctgttgcgattgctactcgaaactatgtccagttcatccgactggtcgtacgcattgtaatcggtatcctttaaatcgatgtgtggcaacttctgggtgaacagcgaatatctgggcatttgtcgggccagttcctcatcaacgccattcgaggtatcgccatcctcatcatactcatcgtagtcatcttcgtcatcctcatcgctgtcctcgtcggaatcactcgagtccacctcctgtcgccaattgggacctctggtggttcgaggctcagcccaggatggaaagatgccgtccctgtcaaaatagcgactgtgattggagatcaggccatggtgcctggttgtgggtgcctcggtggtcattaggttcttggccgtgctcggtccgatggacaagcggtgctgctgatgacgcagcgagggaaatacccgctgctcccagctcgcatgatgacgattgtgatgacgcaagtgatgctgctgcatgggcaattggggatcgaggaaggccttcttctcgacatcctcgatcggcggctgatggttgccctccagttcggcccgcagatgctgttcgtgccgcaaatgatgatggtgctgctgatgggcctccagttgttgcgcctcctgcaattgctgcaatctctgctgctgatggggacttcgatgaccgccagtcggggctactgtggtcatcacaggtgctccctttagatcactgctattggcccagacgaggggcactagtatcagaactagccaatgcatttcgaagatcgttgcgtttcaccgcggggattttattgttttatattggcctttttttctaggaatactctgctctttgtgtcgatatttttcacatgcgtttgttggcacttgcctttgtcgtttgttttgtttaaaacatttccctttgtcccacaatccgcaattaatattgtcactttttgttttgacacttgttgaaagttaaaataattcgttattaccggcttaaaatggaatattaattgttcagagttggaattaagtcgtttattttttcgtaaatggaattttaattgttctcgtaaaaaatgttttactggatgttaatttttatatgtcattaaaatattactcggggtctttgttaattataccattgcatttatagctttatttatgcgttgtgtgagattcctagaaacttcatttaagtattaagataacattttatttttttttcatttcaatatgtttattctttattgtaatttataggtattccatataccgcgacgtcaatttattttttatttatctcttttttattgtcgttttcaattgtatttccaaatattagcacttcaacactaatcaccacaaatcattcatttttttttataatattctttattctttttcctttgatcttttgccaatttgttcacacactcagtgattaatggttattaaattcttagctttaaccaattaccgcggccataaatccgccgcagaatccgcgcgcgacttttgacgcgatgccaggaggcaagaaaaacacacccaccaatccactcacgcacatccgagtatatatctccggagtatatatctgtatgtgcgatgctttagcgcttgtttgtgcaatgatttgtttgttttgatttccagtgccagatggcggagttccataggaatagatggagatatggcacttccgtttggctccggtaaatggtaagttcagatcgcgtggctccacgtaggggcggacaaa

SEQ ID NO: 32600 - DNA, 1209 bp, DROSOPHILA
atgcattggctagttctgatactagtgcccctcgtctgggccaatagcagtgatctaaagggagcacctgtgatgaccacagtagccccgactggcggtcatcgaagtccccatcagcagcagagattgcagcaattgcaggaggcgcaacaactggaggcccatcagcagcaccatcatcatttgcggcacgaacagcatctgcgggccgaactggagggcaaccatcagccgccgatcgaggatgtcgagaagaaggccttcctcgatccccaattgcccatgcagcagcatcacttgcgtcatcacaatcgtcatcatgcgagctgggagcagcgggtatttccctcgctgcgtcatcagcagcaccgcttgtccatcggaccgagcacggccaagaacctaatgaccaccgaggcacccacaaccaggcaccatggcctgatctccaatcacagtcgctattttgacagggacggcatctttccatcctgggctgagcctcgaaccaccagaggtcccaattggcgacaggaggtggactcgagtgattccgacgaggacagcgatgaggatgacgaagatgactacgatgagtatgatgaggatggcgatacctcgaatggcgttgatgaggaactggcccgacaaatgcccagatattcgctgttcacccagaagttgccacacatcgatttaaaggataccgattacaatgcgtacgaccagtcggatgaactggacatagtttcgagtagcaatcgcaacagcaacaagtatcccagcgtggccaatccgcacgacaagtctgctggcaagcggaatatattcgattggctgttcaaacatgatagggaaaaagaggctgttaaaaagccacacatcacaactacttcaacgacaacaacaacctcaacaaccagcacagtaaagcccacaataatgcgaaccgaaaggccaaaactgcaattaattgatgcgaatctaaagaatggcggtggcgaagaggacgactccaatgaggattcagactccgagtcggaggagggcttctccaatgaacagtggaacaaaatcgagcaccaacaccatctcaggcagcagaaacaccagaaagaactactggcgatgcgagagaagagccggaatacccctctcataaggaacattgagaatgaggtgagtctggcattgcgcccattgttctga

SEQ ID NO: 32601 - protein, 402 aa, DROSOPHILA
MHWLVLILVPLVWANSSDLKGAPVMTTVAPTGGHRSPHQQQRLQQLQEAQQLEAHQQHHHHLRHEQHLRAELEGNHQPPIEDVEKKAFLDPQLPMQQHHLRHHNRHHASWEQRVFPSLRHQQHRLSIGPSTAKNLMTTEAPTTRHHGLISNHSRYFDRDGIFPSWAEPRTTRGPNWRQEVDSSDSDEDSDEDDEDDYDEYDEDGDTSNGVDEELARQMPRYSLFTQKLPHIDLKDTDYNAYDQSDELDIVSSSNRNSNKYPSVANPHDKSAGKRNIFDWLFKHDREKEAVKKPHITTTSTTTTTSTTSTVKPTIMRTERPKLQLIDANLKNGGGEEDDSNEDSDSESEEGFSNEQWNKIEHQHHLRQQKHQKELLAMREKSRNTPLIRNIENEVSLALRPLF

SEQ ID NO: 32602 - DNA, 5869 bp, DROSOPHILA
aacatatcataggaaaacaatcaaaaatagctgctacatactaatcaacaaattttatcttcccatccattgggtaattgtagtttttaaatatttcttaaatattcttaagcactttgaataaatatttacgtggcttaaaaataattcaattttatcatatttatcttgtgtgtacgttttcaacggaatctcaaaattgcaaggaagatgtttgtttgcttagtagtttttatacgttatatctaggaataatatagctaaagattaggacgtgtgccatttgaaagaaaatgaaaaatgaaaattaggaaaatcaaaagaaaagaaaatcataaatttgcttgggtttcgtttattttcgtataattttttatagatcttagctaataaattctgctaggaaattatacaattaaaaaattctttaaagaataatatcgagattaaagtttgattttgttgattttaatacaaattgaacttacagggctacaaaattaattcgactaacgacgtacgaaaaacaatgacgatttataatgttaaatctaaacaaggttcaaggcccgagctgagggaagttttcttggcgagaaatttgcacaatgtggatatgtctctgcgtggattttggaaaacttgaaggctgtgtcaactctggcttggtcccttccccagctgaaacccttttctttaaattcacattgtccgaaactaaatgtttaaaactagtttacattgtaagctaatttttgtagctgcatctcacataagaagtaatgtacattggttttatgttctagtgtgtataaactaggtctgccttttctacatcctcatcttggtttttgttacccccgaataacaacaaattgaacagctttatgaattttggttttcgttataccactccttagatatccacgagttttggtgttatgtattattatgtattatcccattttactaatgaagtttaaccttgacttttatacggtttcgcactgtataatcgtgtaaggtgcagaggtatgtttgcatgagttataagatgatctccgtcgagctttgctgcagtggatcgcactgataggcctcggagtttggtaccggcgagtacttggtgttcttcttgctggaagctgcaagattcaagggtgcagccgtggtggtggtgtagctataggtggttccacatccattcaaactggtgacagtgctgactagtccagttcctggaaatttggctaccgtcacaacactggctgttaatgtggccgtggaggagtcattgcttcccgttgttcccgaaccccttttggcagtggttttcctgcgcactggtgtctcctgcagcacagctgatttccttatggtctgctgcagcaaggcattcacatcgattgctggccaggcgaccagcgagacacttcgtcataaggagttgtccactggtgaagatccgcgtttatgcttgccatggggattgcgattccagtgcttgcaggacggttgctccacttccttctctcgcaaatccttcgtctccttgatctccagcttatccattttatcttcttctttggtgggaaaagaagtaccgcctccagcggtggatgacagcgagaagtactccgctgattggcttaatgaagaggcatccgcatcggttatgttgccaccgccgatatcactcctcatggtgtgatcgccatgatcctggtccataaacgaagacctgtgggtgctaagcggtgtcagtgtactgctgtgcatgtcctcaccctcttgcgagggagttatggtatgatctgcagctgtacaaaaactttccctttgtcccgtggtctcgtcgtcctcatcatccgcttcctcctcctcatcatcttcctgggaacacgaaccacaacagcagctggaattctggcaagagcagagacttgctctccgagaaccgggaatgcattggtgacactctgcagccaccgtcatttcatgatgtgcctctagatcctcatccaaactgctgcaggagcaggaacttgagcaactgctgcagtaatcctgtccagcctcagctataaaccttttcctcttgatccgaacacactcatttcgcgctggtgcagaggcaggatttcccctctttgtggaactgctggaactattcgtaactgctggctgagttagttgggtctcatcttctggtaagtggtgggatcccatccgcacatcatcgtcgtcatcttcatcgcgagacaattcatcggtttcaattgtggtattggaattcaacgaacctctcctgtgacgatgttgttctcgaagaggagccattataatgggttttactccctcactggccactttatacggaaaattcgaagtggccgtgctgctgttattttcatctccgtcctcgctcatcgttgctgcatcgatttcaatggcaatggcctggtgatgcattgcctcatcactagagtccaaggaagacttgttgttgttgttgttgttagatggaagcatttgtttgtgattcgcctgcttaattggcatatgcttctgatggtggtgactccttttctgatgcagcagagctcgtctctttgtgctcctgtagtgacaatgatgatgatggtgatgatgcctatggtgattgcagtggcagtggtgatgatgggtggtgatcacacagcagcagctgccaccctccaatttagtttgggtggcattattttgcttcctgcgacagcgcccactctcctcctgagcgccaatcagtctcggctctttggatgccggggaatggacaatgacgacctccaaggcagctgccatactgctatcatccttactcttgccactgcctcctggtctgggcaacatcttgttattattgtgatattgaaacgcacgattatcgtggcactgaccaaagtccagcaccttaaagtgctcgtcatccgctcgagctgtcagcagatgatcgtctccactgctgctcactgtgacgggcagcgatagctgatgctcctcggaatgggatgtatgtatgtcgtggtgatgaatgtgctgtggctgttcttcgggggcaaactgctaatcgccgcggcgcagatcgcgcggcttggaattcttacggtagaaccacacctgtgacaggatcgctatgtccaagctgacctgaaattccataaatatagaacatagttagtattctcagcgcatatatttatatcttaaaatgtataaaatactactaaaatacttgcctgcagcgtgccacagatccagaattgcgatggtgctttcctaacaataaagtaaccagtcttaaacatatcaccgagcgtccacatgatcaccatgtgtatgctcattccatatgttgatttattcttaaagttgcgcagaaattgtggcgcccctacatgcaaaagaaataaatacatttgaagataaatatatacaaatataaatgttgtatagcacgaactcacccaacatggcttctgtgaagacggcaacaaaacccatggattccataaaccaaagtacggacaacattagatatgttatggcagcaccaacggcccacacgactagcatgaagtccagatacgattggaagtctgtccagttccaaaagtatttgaagtccaggtctgtaagagtgaatgattgaatattattagtaataaccagctcaatgaattagtttacccagcaacttaagactacttgctaacccacttattttacaggcattgcatgcacttttatttagctacagtaggaaagcaaaaggtcatgacctcaccccaacagtttactactctataaattgttcacaaccaagaaggaagcctttaccaggctgcagatgggaagccagttggaaatcaatttccattatctctgccagcttttaggcgctgcacaatttacgacgagccatgtacaaagaagcccaaggcgtgccaatataattagctcatgtcggtgtgtgtgtatatatatatatatattggttctgtgctctctggttcgttgatcaatttgccgcctggaaccaaccgtacgtacctcctaacccagtttcatgtttttctagtttctctgataagaagtaacgaaggagaagaaataaatgcgaacagccataaagatatgggtttgatatcaaacagcagaatgtactttgctaatggaattacaataacctaacttcccatcctcacacatttgattcaatttcaatctgttcagcaaactgtcaattgagtgaaaagttgttatgctaaaatcttgatccgtaaatcaatgctagtgctagtatgcagactctcctttctttgtcaatcaataaacgcagacatgtcgacttgttaagtccagacccattactacaccctggaatcagctgactcaccattgagatagtgccgggaacgaactcgcttcaggacgcttccgcccgcttctgtggatatagaggcgcccgtatccgtatccgtcatcactttgggcaaatgcagttcatcgcctagaagttgacatgtttatccttcgggtgacaggtttttaaacgcctgatgggacttacctcgcagggcgtgctcgcggttattggcgttaacccgcttcaccttcacgcacagatggatcatcaggaacatggtcacgttcatcacgacactctgcaccagcagtggaagctcatagcggctggagaacctgcaagccagagggaaattgggtaaaggtcaattgaaaaaaggtcaactcaaaatgacattttaattgactgccccctatcgagatgcggttatgtccttgacggtatttcatttccagggacatatataattagcatgtgtccttcaagaaatttatttcaaactttgtaaactttaaaacagaaatggaaagtgcattcggagtggcatttatttaaacagtttgtcggttaattataagtcgcaatggtcatacgctgacagaaagacattccaccggaccctaaataattaagtataactattatttatcacacctcagttgacaagtgtatgctgcacaatgtagtgttgattacagctaattgacaggtgcttaggtggcgccaagtgattgatgttcgcccaagagcataatttactcccgaatcaaatcgattatagagcttaatgtgcacatatttcccacaagtaaaaggtggcgggtgtgctggaaaaatcccagcactgtgtcaagcggcactgtcataaatctgacagatgccaagtgggtgaaaaagggtccccgagcacaaacaacaaacaatggttgaaatgtgttgggcattttggcaaggccccaaacaaatgccgagcaaaccaaaggcaagtcctcagatttgctggggatttttttgtgatgaaagtccttttggtgtccaaacaaaagtcattcccaaatgttattaaaaaaaacaaacaaacatccgacaatttgtcggcatttcgctggcgtagattagtggagccaactgttttacttaagccacagctgtcgctcgcaatcacaacagcagatagcatacatttccgcgtttcttcttccgattaccagatagtaaaatgcggaaaacgcggaaattgtgccacggtggctatttacgcccatgttcattggcaagtcgctttggcggggcatcgaaattcaattaccagttgggccacgccaatgccattccacgcggcttccgactgaatcaccacaaaatacattttactttccgaatgaactagaacatttcaagaaatttactggctctagtatgaattgatttgaatttttagttcgcaaacgtttacgtttg

SEQ ID NO: 32603 - DNA, 2453 bp, DROSOPHILA
atgtccctggaaatgaaataccgtcaaggacataaccgcatctcgatagggggcagtcaattaaaatgtcattttgagttctccagccgctatgagcttccactgctggtgcagagtgtcgtgatgaacgtgaccatgttcctgatgatccatctgtgcgtgaaggtgaagcgggttaacgccaataaccgcgagcacgccctgcgaggcgatgaactgcatttgcccaaagtgatgacggatacggatacgggcgcctctatatccacagaagcgggcggaagcgtcctgaagcgagttcgttcccggcactatctcaatgacctggacttcaaatacttttggaactggacagacttccaatcgtatctggacttcatgctagtcgtgtgggccgtcagcttggacatagcgatcctgtcacaggtgtggttctaccaacagccacagcacattcatcaccacgacatacatacatcccattccgaggagcatcagctatcgctgcccgtcacagtgagcagcagtggagacgatcatctgctgacagctcgagcggatgacgagcactttaaggtgctggactttggtcagtgccacgataatcgtgcgtttcaatatcacaataataacaagatgttgcccagaccaggaggcagtggcaagagtaaggatgatagcagtatggcagctgccttggaggtcgtcattgtccattccccggcatccaaagagccgagactgattggcgctcaggaggagagtgggcgctgtcgcaggaagcaaaataatgccacccaaactaaattggagggtggcagctgctgctgtgtgatcaccacccatcatcaccactgccactgcaatcaccataggcatcatcaccatcatcatcattgtcactacaggagcacaaagagacgagctctgctgcatcagaaaaggagtcaccaccatcagaagcatatgccaattaagcaggcgaatcacaaacaaatgcttccatctaacaacaacaacaacaacaagtcttccttggactctagtgatgaggcaatgcatcaccaggccattgccattgaaatcgatgcagcaacgatgagcgaggacggagatgaaaataacagcagcacggccacttcgaattttccgtataaagtggccagtgagggagtaaaacccattataatggctcctcttcgagaacaacatcgtcacaggagaggttcgttgaattccaataccacaattgaaaccgatgaattgtctcgcgatgaagatgacgacgatgatgtgcggatgggatcccaccacttaccagaagatgagacccaactaactcagccagcagttacgaatagttccagcagttccacaaagaggggaaatcctgcctctgcaccagcgcgaaatgagtgtgttcggatcaagaggaaaaggtttatagctgaggctggacaggattactgcagcagttgctcaagttcctgctcctgcagcagtttggatgaggatctagaggcacatcatgaaatgacggtggctgcagagtgtcaccaatgcattcccggttctcggagagcaagtctctgctcttgccagaattccagctgctgttgtggttcgtgttcccaggaagatgatgaggaggaggaagcggatgatgaggacgacgagaccacgggacaaagggaaagtttttgtacagctgcagatcataccataactccctcgcaagagggtgaggacatgcacagcagtacactgacaccgcttagcacccacaggtcttcgtttatggaccaggatcatggcgatcacaccatgaggagtgatatcggcggtggcaacataaccgatgcggatgcctcttcattaagccaatcagcggagtacttctcgctgtcatccaccgctggaggcggtacttcttttcccaccaaagaagaagataaaatggataagctggagatcaaggagacgaaggatttgcgagagaaggaagtggagcaaccgtcctgcaagcactggaatcgcaatccccatggcaagcataaacgcggatcttcaccaaccataaggaaatcagctgtgctgcaggagacaccagtgcgcaggaaaaccactgccaaaaggggttcgggaacaacgggaagcaatgactcctccacggccacattaacagccagtgttgtgacggtagccaaatttccaggaactggactagtcagcactgtcaccagtttgaatggatgtggaaccacctatagctacaccaccaccacggctgcacccttgaatcttgcagcttccagcaagaagaacaccaagtactcgccggtaccaaactccgaggcctatcagtgcgatccactgcagcaaagctcgacggagatcatcttataactcatgcaaacatacctctgcaccttacacgattatacagtgcgaaa

SEQ ID NO: 32604 - protein, 801 aa, DROSOPHILA
MSLEMKYRQGHNRISIGGSQLKCHFEFSSRYELPLLVQSVVMNVTMFLMIHLCVKVKRVNANNREHALRGDELHLPKVMTDTDTGASISTEAGGSVLKRVRSRHYLNDLDFKYFWNWTDFQSYLDFMLVVWAVSLDIAILSQVWFYQQPQHIHHHDIHTSHSEEHQLSLPVTVSSSGDDHLLTARADDEHFKVLDFGQCHDNRAFQYHNNNKMLPRPGGSGKSKDDSSMAAALEVVIVHSPASKEPRLIGAQEESGRCRRKQNNATQTKLEGGSCCCVITTHHHHCHCNHHRHHHHHHHCHYRSTKRRALLHQKRSHHHQKHMPIKQANHKQMLPSNNNNNNKSSLDSSDEAMHHQAIAIEIDAATMSEDGDENNSSTATSNFPYKVASEGVKPIIMAPLREQHRHRRGSLNSNTTIETDELSRDEDDDDDVRMGSHHLPEDETQLTQPAVTNSSSSSTKRGNPASAPARNECVRIKRKRFIAEAGQDYCSSCSSSCSCSSLDEDLEAHHEMTVAAECHQCIPGSRRASLCSCQNSSCCCGSCSQEDDEEEEADDEDDETTGQRESFCTAADHTITPSQEGEDMHSSTLTPLSTHRSSFMDQDHGDHTMRSDIGGGNITDADASSLSQSAEYFSLSSTAGGGTSFPTKEEDKMDKLEIKETKDLREKEVEQPSCKHWNRNPHGKHKRGSSPTIRKSAVLQETPVRRKTTAKRGSGTTGSNDSSTATLTASVVTVAKFPGTGLVSTVTSLNGCGTTYSYTTTTAAPLNLAASSKKNTKYSPVPNSEAYQCDPLQQSSTEIIL

SEQ ID NO: 32605 - DNA, 2898 bp, DROSOPHILA
cgaggagtttttgctaattaaaaaatgttcgttgacagttattgttatttggccatatatcagggcatttcattgggaattccgctaccaaattggtgccgaagagtgcccaccagttgcgttttatgcttaattgagttatttaaatattttatttggccagaaaaataagataaagcagaggtgggtaggccaaaggcaatcgaatcggttcggcgctctgaatctgaatcgcgttgtcacacaaaagtcaaatgtcgtttaacaaatgttgatatgttaattcccgtgccaccggcgagaatgcaaatccactacatatagatacatttttcgagatacaatttgttgtcgctgctaactgcattttctgattcagttggctgagtttcaattttaaagcgattatgttaatgctggtatcgaaaacgaaaactagtttccaatcagccattatcaattaaccgttttgccttcctgcggaatttatgaccagctgcaagttgcccctcacattttttgttccttctgcccccccaaaacgtcaaactgagttttcaattaccacctttcgaactttcaaattcaaattaattttccgttttcccaagcttaattggcaatatgtgcacccaattaatgaaaacgatagagaaaggggtgagcgtctggcggaaaagtggagaaatagaaattttttggctcaaggctgttactgaagcgaacgagcaaacactgtttaaattccggcgcaaaagttttcccagttttcaggtggggttgctttaaccctataccatgttacattaataatataaaaataaaatataaaaatatcattgtattacaataaatcaatatttttattgtgaaagaaaagcgacagtttctgcatcgacagatgcatgtgagatcggtaccaagggttaaaccctttcccatcggtggtaccacctgacgtatacgcaatggccaggaattgttcttcacctcgcttttctcattttgtcaaaacatcacgtaaacaattgagcaacttctgggggaaagtggcagagctgagtgagttcgggttgtgatgaatcagtagagtggggcttgtggatgtgggcaaatggatggggcagggtggcccagccaattcatcagcaatggccttgggggcaaacagccagtcagccagcgctgcattcagagcaaagttcatgttgcaaaatgcacccagcaggtgcgagaggaacagtcgcctccacctgcaattcccataggtccgttttaaactttttgtgtattgttggtagcttaatactcttacagttgattaagtgaaaagcaaactaaaaatatcttatatctggcggattatgtgctggattcaaaagcaacagaacataacataaagaactatatggagcaataaaataattaactaagcacacatcttaataaatgcacttccagttgaaattggaatgtaaccctattgtttatatgaaatgccaagataatgtagcttcaatttacaatttaagatttttttaataagtgaccccttgctcatcttttggctcgattacccttagtgcggagcattgaaagctaattgttttgatatgtaaaccgagagctgaaccgaaaatcaacacgcaacatggggcaagctcaagagcagctgactggaaggggtgaaagggggagaaagcgactgaagcctcggctcgttgagcatacgacgcgtgttgcacgccctcgccgttgcaatcgttattgttattgctgctgtggtgcggatgctgctgctgctgctgctgttgtgctgccgctgcagatgctgctgcggtgcctgcctcactgtacttctgcgttctccattctgcctggtgttccctgtgcctcattgagcatggttattgcgaagctttttgtgctaattagccacgctgcttcatggttattaagattgcgtcaagtgtactgcactctgcaccactggaaccactccctcttcagattcaaactctccacccccaaaccactcccaaattccacactgaaagtgataagacttgctttctcctgatgataataaatctataattttaccatgcggcctagatcgcttggtttaagtaagggtgttcacatatttaaccactttaattgcatgatgtaagtacgtaagatattgtagtctactggagttatatctttttaattaattaatattgttttctgtgcaaaacgtgtgtttccctgagattggcagctgcgggcgttttcgcattttgtagctgccacaaggacgctgcaccagcagcctgcaacacacacacacacacacatagatatatgttggtagataggccttattatatggtgcagcgaagagcgcttgaaagaaaagaggcccgaaccaggtgcataatatctgctgatgcataaccacaacggaatatttgcattaaaactgcaattcagtcaaataaaaagactaaaattgtttaagagcaactttaagatttaaagcaaatacttaaatgcagattttatatattttttgctttaataattaagagaatcctgttacactacacaattagcttacagtatattttcaattatcaactgcaacatgcaagcttggaaatagatagaaaagtcttaagttcttatattatacaagatattttttgagtaagatccgtgaaactactgatacttacgcataatttacctgttctctacacgcatttctacatatgcccagaattggtgcagttcttggctaatcacaattcttgccaacgcggggcgctgttcacttttagtaaccttttaaagcgaaaggtgtcgccactacagggaacacttacaaaactcttataaaataaatatata

SEQ ID NO: 32606 - DNA, 420 bp, DROSOPHILA
atgaggcacagggaacaccaggcagaatggagaacgcagaagtacagtgaggcaggcaccgcagcagcatctgcagcggcagcacaacagcagcagcagcagcagcatccgcaccacagcagcaataacaataacgattgcaacggcgagggcgtgcaacacgcgtcgtggaggcgactgttcctctcgcacctgctgggtgcattttgcaacatgaactttgctctgaatgcagcgctggctgactggctgtttgcccccaaggccattgctgatgaattggctgggccaccctgccccatccatttgcccacatccacaagccccactctactgattcatcacaacccgaactcactcagctctgccactttcccccagaagttgctcaattgtttacgtgatgttttgacaaaatga

SEQ ID NO: 32607 - protein, 139 aa, DROSOPHILA
MRHREHQAEWRTQKYSEAGTAAASAAAAQQQQQQQHPHHSSNNNNDCNGEGVQHASWRRLFLSHLLGAFCNMNFALNAALADWLFAPKAIADELAGPPCPIHLPTSTSPTLLIHHNPNSLSSATFPQKLLNCLRDVLTK

SEQ ID NO: 32608 - DNA, 4054 bp, DROSOPHILA
ttgtttctaactacatcagccagcgaaagtgtttaataattatttgcactttcttacttccactgtttcctaacaaatgtcacgaactataaaaacaactggtaattcagtacacaaaaattcaatagagcaaatcagcgctcaccgtcctaagttctaagtacacagctttttatactttcggtaccatgccgtcttaatcagccgcttaacaactgctcttctaattgttcagatgttttcagaatgccaattgaaccaagaatggcagccaattgttttcatttcgtgaaaaccacaagcattcgatggctattaattacttggtagtagaacccacggacctccacccccttttcacccacgcgatggcgacaataaaagtaatttgcataaaacggaaacaaggcgaacgagacgtcgaatcaaacggtacaataataaattaaataagttaagcaaatacacgtgaaaaatgaaagcgacaagcagagagcggtatacactatgataattatattaatttcgttctcgtgttattaaagtaataaatattttaaaatttttcttttaaattttatttcctttatttttaattttaaaattccccaatttttaaatttagatatatctatatttgaatactgctatcgaacttcgttgtatacagtatcccagactaaaacgaaagaatgaacgtagtggtaagtaaaagccaaaaatcgccgatctcagcacaggtcacgtagagaacaaaagtgaaaacaagaccagagcaacgaagacgccgcccagacggatgacagtagagtctaatgagaaagctgaccgcaaaactatgatttcgaattggagggggtggtggagctgacacgggtgacttacagatcggaaagaacgatgtctcaattggcagaaagtgagagtgcagcgcactgcatccgacagatacgtgaactcaacaaaagccaaatgtcgctcgggttggggcaacatttccatggaaaccatcgacccaaacactcgaatcatgatgatgctgccgctactatgggtgctatttgttggaccttcagtttttgggtaagttgtaatgagctgggggaaaaaattaaataggttctttattattatttcccattagttcgcctttggagatgcaacttttggatatgatgctgcgcgaggcggaggactatcccagcaatggtcgcgatcagagggatatttccgttttgccaacagctccgataggttgcgatgacagcggtgatgcacaggacccatttagccacattttcgatgaatatgaggagagcaaggaggagtgcatggactttttgccaccctgtgaaccaacgttcccggaaggtctaccaattgaacatccgtgcttcgttagattactcctgctaagaacaccgctgctcaagcaggatccctgcgccaatttcaccctggtaactgaaagaccaagtaccacagtgaaacccaaaaccaagaaatgcgatccaaaacgtaaagccagtaaaagtgccgcacgaaatgaactactggcactacccaataatggtacaataaattcaaccacaagcacaccattaagttcaacaacagaaacaacaaccgattcaaaaatcataaaaattcgaaaattagtgccaaagaccaaaacaaataccacaacatcaacaaccacaacaacgttggaaacaacaactatagaagagagcacatctccagcggaaaccagcacctcagaagtggcgccggaaacgacaactgaagaggaaacgacagcaacaccaaccacaacctcgactacacagccaccttttacagataaccaattaaagcgattgagggctttaaggaacaggggaaagaattccagggcaaagtcaccgaaagtacccgatcccccgcagatcaaactcgataatgccagccaacccagcgaggttattcaggtgatcatgaccaccgaacctgccgaattgaagcttcaaccggaagttaacaccaccacaacaacgatcgtgccgccgaccactgtttctacttccacttcgtatccggaaatcaccacttcagaaagttgcgacgaagaagagaaaagtaccaccgtgccggaattctcaggatgtgatgatgacgaaggtaaaggtaaattcaagaaactttaaacgtagtttaactaggaattttaatcctaaagattttgaagtgtctgaaaatggagctacttctaccactgaggaaccttgtgaggacaccgaagagcaggatacaaatctgtgtccacagtttatgcccacccaagggccatgtaagtaaagaatgcatataattacaatgcacaaatgcccttaattaatactaaaatgaaatttcgtagcagcaagtccaataccacctccatcatatcgttttcgaaagcccgttaaaaactatgttgagcccattttgtacgagcgagactttgccaaaccacttcaacgaatgacaccagtgggaccacagcagagggattattttgtgtccaataaacaaatagttcccagaccaagacccaagtacaggaaacgtataccgccctctatttacatgaataacattgtgaggggcttggattgcagcgatgaagttggtcagaatcctccaaggagccccaatccgccaaaaagattttggggtgtgacacctgtaggattccttccgcggaatcagataaggcaaaaaccggagagaaatatgaaaagttttgccccagttccaattaagagaaagccaatctatcaaagaaattcagcggaaatggtggagagacagtatatgatggaaagggatcctgaaccacgtccgcaatatcaccattatccagaagatgaagtatttcatgaggatgtcccacttgcctcgccaactcccagcttggatccctgtcagcaggaacacgatcatgtcctttttcgccagagatcacagcaccagcaaacagatcatcatgtaaactatcccctaccacctatttcctcgcactttttcacataattaacctaatcgcataacttagttaagtagcacacagagcacccagtaaccagttaaccatcgaaaataaatatgtgcaccactaagcaaatgtcaaaacagaccatcaatcaagcgaagtccagccggataattaggggaggtctttgatcttggaagaagacgacgccagcaattgaattataaagcaattgcctttcagttggcggtcagaagagggacatgggcggagtaccgagtgaatagccacttatcagtccaaagccgaggcttcattcgctggccaaaaggcacgcgcccataatgacaaacccatgagccagccatggccaccacctgatggccgcgaaagggtactttgaggtggccatgcactcaatcctatcgtgatgggccatttgggcgaacttttggaatactatttccttaattactctctactgttgaaaatttcccaccacccctcaaaaaatctatttttcagttcataatcacagctcacacataaatacattgaatgaagaaagcttttaattgtttcgatttaaccgaaaacttttccagagcttcacagttatcctgaaaagacgctcaaactttatatgaatatttaaatacttaaatatgaaaattgaaaatcgaatctttcaaggacttcaaaatacagtattgcgattagtgcgttcgttattattaaaaaacatatattatttttgtaggtaatatttagcttccttacccttttcagttccattccagttgaacaactatgatctaatacattaaaatgccgcgaaaatattattttcctacttctatttaattattttaagcaaggtgtattaaaaagtaagtatataccaatcctgcataacctaaatgccctgcactcggaatcgtaggtgagtggctaacatatgactgtcggaaaagcccaacacgacaaaatgccaaatcaaaagagcgtttttggggcccacaggagtttcccggcgaaaaa

SEQ ID NO: 32609 - DNA, 1825 bp, DROSOPHILA
atggaaaccatcgacccaaacactcgaatcatgatgatgctgccgctactatgggtgctatttgttggaccttcagtttttggttcgcctttggagatgcaacttttggatatgatgctgcgcgaggcggaggactatcccagcaatggtcgcgatcagagggatatttccgttttgccaacagctccgataggttgcgatgacagcggtgatgcacaggacccatttagccacattttcgatgaatatgaggagagcaaggaggagtgcatggactttttgccaccctgtgaaccaacgttcccggaaggtctaccaattgaacatccgtgcttcgttagattactcctgctaagaacaccgctgctcaagcaggatccctgcgccaatttcaccctggtaactgaaagaccaagtaccacagtgaaacccaaaaccaagaaatgcgatccaaaacgtaaagccagtaaaagtgccgcacgaaatgaactactggcactacccaataatggtacaataaattcaaccacaagcacaccattaagttcaacaacagaaacaacaaccgattcaaaaatcataaaaattcgaaaattagtgccaaagaccaaaacaaataccacaacatcaacaaccacaacaacgttggaaacaacaactatagaagagagcacatctccagcggaaaccagcacctcagaagtggcgccggaaacgacaactgaagaggaaacgacagcaacaccaaccacaacctcgactacacagccaccttttacagataaccaattaaagcgattgagggctttaaggaacaggggaaagaattccagggcaaagtcaccgaaagtacccgatcccccgcagatcaaactcgataatgccagccaacccagcgaggttattcaggtgatcatgaccaccgaacctgccgaattgaagcttcaaccggaagttaacaccaccacaacaacgatcgtgccgccgaccactgtttctacttccacttcgtatccggaaatcaccacttcagaaagttgcgacgaagaagagaaaagtaccaccgtgccggaattctcaggatgtgatgatgacgaagattttgaagtgtctgaaaatggagctacttctaccactgaggaaccttgtgaggacaccgaagagcaggatacaaatctgtgtccacagtttatgcccacccaagggccatcccgttaaaaactatgttgagcccattttgtacgagcgagactttgccaaaccacttcaacgaatgacaccagtgggaccacagcagagggattattttgtgtccaataaacaaatagttcccagaccaagacccaagtacaggaaacgtataccgccctctatttacatgaataacattgtgaggggcttggattgcagcgatgaagttggtcagaatcctccaaggagccccaatccgccaaaaagattttggggtgtgacacctgtaggattccttccgcggaatcagataaggcaaaaaccggagagaaatatgaaaagttttgccccagttccaattaagagaaagccaatctatcaaagaaattcagcggaaatggtggagagacagtatatgatggaaagggatcctgaaccacgtccgcaatatcaccattatccagaagatgaagtatttcatgaggatgtcccacttgcctcgccaactcccagcttggatccctgtcagcaggaacacgatcatgtcctttttcgccagagatcacagcaccagcaaacagatcatcatgtaaactatcccctaccacctatttcctcgcactttttcacataa

SEQ ID NO: 32610 - protein, 405 aa, DROSOPHILA
METIDPNTRIMMMLPLLWVLFVGPSVFGSPLEMQLLDMMLREAEDYPSNGRDQRDISVLPTAPIGCDDSGDAQDPFSHIFDEYEESKEECMDFLPPCEPTFPEGLPIEHPCFVRLLLLRTPLLKQDPCANFTLVTERPSTTVKPKTKKCDPKRKASKSAARNELLALPNNGTINSTTSTPLSSTTETTTDSKIIKIRKLVPKTKTNTTTSTTTTTLETTTIEESTSPAETSTSEVAPETTTEEETTATPTTTSTTQPPFTDNQLKRLRALRNRGKNSRAKSPKVPDPPQIKLDNASQPSEVIQVIMTTEPAELKLQPEVNTTTTTIVPPTTVSTSTSYPEITTSESCDEEEKSTTVPEFSGCDDDEDFEVSENGATSTTEEPCEDTEEQDTNLCPQFMPTQGPSR

SEQ ID NO: 32611 - DNA, 3459 bp, DROSOPHILA
ttcctatgcacttagatttcataaaactgcgaattttcgcatacgaatcgggtggcttgtggaaaagtaaacaaatcgtaaagtagaaatccgaattgataacaaattgtcgaagccttatcaatgcggctaatcgtgatgattagcactgggtgaacagcgaacattcacgactaaccccacacacttgtaagctgcgaaaatcgacaagcgatcagagcaaagtttcaactgtttttttgttttatttcgctatcataggggcacaactccccagcaaatggcatagaaaacacccatggattgcagtctgaggcaataaaacaataaaatgtcattgcttcagtgcgtattcaggctggcttccttattggattagtcttttgcctcctttcacatggcgtgctaactgggattagctatcagttgtggccaaaagtcagttaccgctgcagattatgttgcaatgttgtgaagtggagcaagcagaagtgggtcaagccagcccttagcttcgaaatgggtctcggccagcattatccatttgaattcattagtgaaattcaagcagctcatgtcagccagcaacacagtcagtgacgtagcaaccagcttgttgttgtcgattggcttacgttacgtgaatacgtaacgtactgattaagtgcaattgaaatgtttacttgctttaaatattatatcataacttaaaaaatacggataaaaaatgtaatttactgcgagctggaaaactttaatttatttttcatctgtacgttaggacactttatgtttaaatttaattgattaatgtgtatatataattttaatcaatcgccgagatgaatggaatgtaaattatttgttgaattggagctggtgtcgtccatgtgatgtgtgaatcgaaactgaattaggataatgaggtagcacgtggcagcaccagtaatctgcaaaaattaaccacttaaataaataaaatatttaattattttcaacattagttcaccgtaaaaatcagtgtgcgatccagacgaaaaagtcctgcggctgtgaaaaggaccttccgatgcgacagctgcaaggacagacggaaaagtcgatctctgagttctggatcatcggtgatattgagaatcttgtgaactatagctgccgtatagctgctatgcaaaatagtccgactgctgccctccacgatcagcactatgatcactatataccagatgagctgcatcaggaagaaggcaaagaactcatcggcctcaaagacatccagtcgtttgggattcagaatggcttccaaaatgtaaaagtcatcaaagagaatgaacagaaaggatatggctatgattccgagcagcggatatgtgaagtattcctcgatggtctggcaaatgtcgcagagcagattgtgtatgttggacacctgtttgattgcgtattcgggattgaggcgtatgacggaggtaacactgtaccgcttcattggcgtactaatcaaatttcgtaggcgatgtgagtagcgtctgtgattgacaaccgagtgcatgggtgagagttccaaggcgcttaattgctctatatgggcatccaaaatatcctgcaggatctgtcaaagattaaattatatatcataagctagcttttacactaaataatgcacattcaactgggaccttgctggttataaaaagtatgctacaaaaattattctctccaagtttgcaaactatttaacttgaagagagtttgtgatttaatccatcgcattttttttttccatacattatgccactgcatgcgcaataaagtcccatgacactcacttcgtttaacatactaaaccggctcctggccaagtccgtggtgcaaagaaacttgaagaccatcaggctgatattgatgtgcggcagggcgaaggttgtgaaagtcacaaatgagggcgatatggtggcactgaccagcaggctgtagctcacacacaagtaaatgacgttgaacagcagcatgcccaaggatatgagaaagctggacaacagtatcctgcggtagtccaacttcatgcccagcctcacaaatatctcgtccaccactatgttgttctgtattatgctgaccaaacgttgtctcttgaacatggcaaagccaaaaatagtggacatggccaggatgccagtcaggcgtagggttccatcgctgaatctggtgatattggtctgaaagaagtaccctattatggaatctccctcctttacggagataccaaaacacaggacgaagaacaggaagtgcactatgccggcaaagaaggagaacttcgatgtttgcacctccttgcgaggattcaaattcaaacgaaatggagccaggcccaatagcgatatgaatgttagcggtcgaagtgcctggaacacattgtccgcctgtgaaaagcgctcccacaacttaaaggccattgataagaccgtttgatatggtttgtgaaaatttcgctggaggtgtaacgtccgctcgactcgcgtattttccgccaactgacaacggaagtctttgccggctgatgatgatgattacctttgtgtcaactcgagacacaactgatatatcatatatcaaaatcgttaaagcgctaacacacaccttcgcactcttaatagactaatatcaatagtagcaaatatttaattaaccttatgcgagcgggtgggatacgggtggtcaaggtcatttacatacaagttcaacgagttcaacggaattcgtgacatgtccatttttttgccaactaaatgttctccgcaacggctattcattacaattggcaaacaatttacgccacctattaaacgaccacgcaaagtggctgataggcccaatttttttcgggggtacttgctgctaattagttgatggacagcaagaaagggttgtttttcatttgtaccaacattggtgtaacttaacagaaaaaatatgtttcttacatacacttgttagtcatcctgacagccatacatagtttgataaaaatttattccaatttatgtgcttgttttaatacaacatcgaagtttctttacttctgattacccctgtaaaagactatctatgtaaacgattaaaaatttatttccaatcgttggtttatattgacagaaaacacttttttttagcaacaacaataacatttacaaaaaatacacattctgctggacgtattcaataccatttcaccgactccatcgacttccttcgatttccatcccccatattgtaatgacatcgatagcacatctaaagcgtatgattcgtcatattattgaaggtctcacagcaagagctgccattcccataaccattgttcggggaattggatgtgaactgcagcaagatgatgagataagtggtcaaggccccgctgatctgttgtaaatgattgtttcattaggaaaattg

SEQ ID NO: 32612 - DNA, 1242 bp, DROSOPHILA
atggcctttaagttgtgggagcgcttttcacaggcggacaatgtgttccaggcacttcgaccgctaacattcatatcgctattgggcctggctccatttcgtttgaatttgaatcctcgcaaggaggtgcaaacatcgaagttctccttctttgccggcatagtgcacttcctgttcttcgtcctgtgttttggtatctccgtaaaggagggagattccataatagggtacttctttcagaccaatatcaccagattcagcgatggaaccctacgcctgactggcatcctggccatgtccactatttttggctttgccatgttcaagagacaacgtttggtcagcataatacagaacaacatagtggtggacgagatatttgtgaggctgggcatgaagttggactaccgcaggatactgttgtccagctttctcatatccttgggcatgctgctgttcaacgtcatttacttgtgtgtgagctacagcctgctggtcagtgccaccatatcgccctcatttgtgactttcacaaccttcgccctgccgcacatcaatatcagcctgatggtcttcaagtttctttgcaccacggacttggccaggagccggtttagtatgttaaacgaaatcctgcaggatattttggatgcccatatagagcaattaagcgccttggaactctcacccatgcactcggttgtcaatcacagacgctactcacatcgcctacgaaatttgattagtacgccaatgaagcggtacagtgttacctccgtcatacgcctcaatcccgaatacgcaatcaaacaggtgtccaacatacacaatctgctctgcgacatttgccagaccatcgaggaatacttcacatatccgctgctcggaatcatagccatatcctttctgttcattctctttgatgacttttacattttggaagccattctgaatcccaaacgactggatgtctttgaggccgatgagttctttgccttcttcctgatgcagctcatctggtatatagtgatcatagtgctgatcgtggagggcagcagtcggactattttgcatagcagctatacggcagctatagttcacaagattctcaatatcaccgatgatccagaactcagagatcgacttttccgtctgtccttgcagctgtcgcatcggaaggtccttttcacagccgcaggactttttcgtctggatcgcacactgatttttacggtgaactaa

SEQ ID NO: 32613 - protein, 413 aa, DROSOPHILA
MAFKLWERFSQADNVFQALRPLTFISLLGLAPFRLNLNPRKEVQTSKFSFFAGIVHFLFFVLCFGISVKEGDSIIGYFFQTNITRFSDGTLRLTGILAMSTIFGFAMFKRQRLVSIIQNNIVVDEIFVRLGMKLDYRRILLSSFLISLGMLLFNVIYLCVSYSLLVSATISPSFVTFTTFALPHINISLMVFKFLCTTDLARSRFSMLNEILQDILDAHIEQLSALELSPMHSVVNHRRYSHRLRNLISTPMKRYSVTSVIRLNPEYAIKQVSNIHNLLCDICQTIEEYFTYPLLGIIAISFLFILFDDFYILEAILNPKRLDVFEADEFFAFFLMQLIWYIVIIVLIVEGSSRTILHSSYTAAIVHKILNITDDPELRDRLFRLSLQLSHRKVLFTAAGLFRLDRTLIFTVN

SEQ ID NO: 32614 - DNA, 9240 bp, DROSOPHILA
tatgccggcaaagaaggagaacttcgatgtttgcacctccttgcgaggattcaaattcaaacgaaatggagccaggcccaatagcgatatgaatgttagcggtcgaagtgcctggaacacattgtccgcctgtgaaaagcgctcccacaacttaaaggccattgataagaccgtttgatatggtttgtgaaaatttcgctggaggtgtaacgtccgctcgactcgcgtattttccgccaactgacaacggaagtctttgccggctgatgatgatgattacctttgtgtcaactcgagacacaactgatatatcatatatcaaaatcgttaaagcgctaacacacaccttcgcactcttaatagactaatatcaatagtagcaaatatttaattaaccttatgcgagcgggtgggatacgggtggtcaaggtcatttacatacaagttcaacgagttcaacggaattcgtgacatgtccatttttttgccaactaaatgttctccgcaacggctattcattacaattggcaaacaatttacgccacctattaaacgaccacgcaaagtggctgataggcccaatttttttcgggggtacttgctgctaattagttgatggacagcaagaaagggttgtttttcatttgtaccaacattggtgtaacttaacagaaaaaatatgtttcttacatacacttgttagtcatcctgacagccatacatagtttgataaaaatttattccaatttatgtgcttgttttaatacaacatcgaagtttctttacttctgattacccctgtaaaagactatctatgtaaacgattaaaaatttatttccaatcgttggtttatattgacagaaaacacttttttttagcaacaacaataacatttacaaaaaatacacattctgctggacgtattcaataccatttcaccgactccatcgacttccttcgatttccatcccccatattgtaatgacatcgatagcacatctaaagcgtatgattcgtcatattattgaaggtctcacagcaagagctgccattcccataaccattgttcggggaattggatgtgaactgcagcaagatgatgagataagtggtcaaggccccgctgatctgttgtaaatgattgtttcattaggaaaattgcgaaaatatgtagatatgtgtagcaactaaccgtgaaatacaatgtgcggtcgatgttgaacagaccagctgcagtaaaattaattttcagatgcatcaactgcatggagaattgctgcagtttctccttgacctcagcacttttggttttattgagtagggagtgcactatgcctccagttttctcgctctttttgatggctcgattacttccctcgacaatggaaattatggcgatcagatacaaaatcatttgacacgagaaaaatgtcacaaattccacagttttgaatttgctttcgcgcttcgattttcccagtagcgtctccagaacatagtatgcatcgaaaacgatgatcagaaatgctatggatataatggtcagcaattggtaggtaaaatatttgttagccgtggcagctgcctcgcaaatgagatgatgtatctccatggactcctgtataatctccgcaggatccttggttacaatggtgtacatggaaaatgaatcgagacattgtagagagcgctgtttttgattcactgccttgaggcttcgggtgtcccattgatgggctaggttcttcaacacctgtaagtagaatcaaacagaaaatataagttaaaattttagaaatgcctagccaaattaacctcgttaagtgcactcagatatatgcgtaacttaatcattacatttccagccagaaaagaaaccgcgcacacgataaaatgtggtgaaaaaaaactaatcactgctgagatagaaaatgtggtcgtgtctctcaaactgatcatcagaaaactacaggttatatatgccaccatactgccaacaaggattataaccaatcgattcattttcttattagctgcaacctggtgcattgccacgcccacccgtggaaacgcctccgtctcaagtctatcgaatgtggccagcagttttagcaattcttttcggttcaatagcgatataagtaatatggcaaatattcccagcattccattgatcttttgcaaagcatctatcacattggatatgtctgtaaggaaaaagttggacatcaacgtatcccgattgacggcgccgtagaatgagttgaccatatatatggccattcgtatgatgatgttgatgtagccgatgtacgaggatgttagttttcctctgccttccgaagatatggatacgtagtaaggcacaattccgagacaaagtgccatgaatatagtcaatcgatagcaggtgtatacgtcgtgtggtcggttgcccgattttccaaccgatcgcctaaggagccacatggttaatggctgctcaatgaagtcattgtgtccgtggaataagcaaaatgggattacaatctcacaacgctaatgaattgtgaggctcgtaaaacgacggatagtgttaataagttataagagggatatatatttaattatctgaagagctagtgctttgtgaagtttaaaggcttaatgagcttagcgggtaaattctgactttaaacaagcaaatggtttcttttgttaaagattaactttcatttcagcttaacccacctgattcagtacagtgaaatgttgccagagacgatgtaatgtagcgttaaacagcataacaatacttagtagaaatatttggggcacgtagaacgccacaattgctgtgtaaatgggtcgcacatcattacccaacaacatccagttggaacttatcaaatagcccaattgcacgccattaatgaggaagatctgtaaaagtctcaatcgcataatggcgggataattgaagcatacgcccaagttgagaaaacgatcatctatataggaaatacgatcccatatatggatcagcaatctaacacgaatgctgctgcagaggaacagtatcgacattccagtcatgccgatgaatttttgcagtgagtctcccatttgagaaatttccgatttgaaaaaatagccaacaatactctgctgttcgatgagagcggccaaaaagcaatagctgaagaaactcaactgaagaaaagcattcagatagccgattttacttagatgaaactgcctctcaccagcctgaccccttaaacgaaaaggggtcaaaccgagtagataggtgtacaaaagtaaggtttgctcggctccgaaagcatctcgaggtttgaatatttcgcaaaagtaaaatgacattttttcaacgtatttttaaaatatttatagtatgtattcaatgcattgcattgttgccgaaaaagaaagaactccataagagtccagtacaacttgcttttatagcgccgccggatacaattcgtcagtgattggcttttaaagtatttatgatccacaccttgaacgtcatggcggttaaatattcgccgttgacaggtcaggtaatgtaaacccgtccatcagccaccgacaaagttctcatttaatggtagtttctgcgggtttccagcgttatgaaattataaagtgggagttgatgtcctccggttggcgggttcacggtcactgtttgtgtgggctaattaatttaattgaatcagctgaatgaaattgaaaacactggcgaactaaatggaaaaatattatgtcgttactattttagtgtactcatgggaaatgcacaattaaagcagctaactagttgaatagttgctaaacgatacgcatttgattgtaatggtcttgattatatatatacacatattaagaaggagtattaaattgttttttagaatgagatagaaaatgctggaataatttatcattctgtggaaaacaaaataagttgttccaattttctttccaccaatctgtgctacggttaagtgccgcccttaccttattgaccatcaccagtcgcatctccaccagatatgtgaagcaactgaagagcgcaatggcaatggcgatgaccgtgtgctggatgaggaaggtgaagtgcagggccatggtgggcgccacttccgaggaatagagaaccgaaaaggtgccgccggtaaagagtacgtttacaaggaacatggagatcaggaccatgtagctaaatcgcagcaccttgctgtacatgatcttcactcccaccgtctggagttgcacgtccatggtgtgaaacttctgaaggcaacgctccaatcgatggtttgggacaaaggcagtcaggtagatgacagtaactccaatgaatccactcactatctgcatcaaatccccgaaataggtaatgcgagatcgaaagaagtaactagccaccgactcgcaattgttataaatcgtaaggctataggcaaagacaaacatggcgatgtgcatgattccattgatgtagccgaaaatggttttcttgatggctttctttccggttttagtatcgcaactaatgtagaaggaggtgagtccgtggatgtaggtcacatggaacaccgggcgcaggcactcgtatagctgtttggcggtaacaaatcgccgaaatctacgacgcaagggctggcatagaccgggagtcacttctatatccggagtatccgttggattcaccggctccttggccatttcaatgtccatgaccgcttcgtttgagcttcaaccggcgactgacgccagggaccgcaaattatttgcattttaccaggagtcgtcggaccaggaaatttgtgggtgggtttggaaaagtaaataattttcccatttttatatgtacctcgggtctagacaagctgttgtccgcttatgtttcgaccattaacctattagctctagctgttgcattttaattaatggcgcaacccgccagggaattatttccccaaggcaaaccaacgatttccccacgttaagggaagtttttcatgtctatatccctatttagatcaatgggtgaccagagaccctcttaagccaaattaatttcacggtttccatgaagagcgagaatgaatttatgtcaattgttcgacaggctttagtatttcatattctgcgtgtagatgagatttggtttgtaacgttggaattatggccattattaaagacatcggatattactcattcgttttatcggttatgaggggtcattgacattttcggttggtttaggtaatgcgtagaggtgagaaatattgttgcaaatttatgataagcactaagttcccagaagccttgaaatttaatcatttcatattcgaaacagcaaagtgggaagagaaatgagatttttgtgattacgaaatggcgtctttgttttggtcatcttgtactttaaagctgaacggattgtgtatttattgaaatgtattaaatatggaaaaatggaatggtatgtagtaatgaccaagtgtttaatttatttaagcgccttgacgtaggcaacacattttaatcgaatgattcacattcccaatagagaaacttaatccattgccagcagaccttgttggtaaaacagtctaggcagtgttatttgctgaccacctccatccaaaaagcaaacgtaattactaaacatgtctagtggaaacatagcaaataatctagtttgatgggagtatacggttggtaaccatggctttacataaattaattttcacacttgatttgtggttgagtaataaaagcgatgatagcgaatcccccactagaatccaagtcacgcatccccagacgcgctgtcttcactcgctgcaggtaaatatttacctgtacttgctggtcgtactgataaccattacccccacactcacctgattgatgatactgaggcgccgctcgaaactgaaggcaatcacgcagaacaaacaaatcgctatggagacaaccgaatgttgcagaaagaatgtcatacaaacgcagaacgatggtgtgacatccagggagacgagcagccggaaaactccaacgaaataaacacccaggatcagtagcttgaagatcagcaccagtagcgagtaccggaatattctcgaatatttcacacgtactccaatgttcgagaagttcgtatccaagctgtgtagaatggtcagtgtgcccaaaagcttgcagcgttttaggattgccgacgtataaatcacagcaccagctatcaaaccattaaagatctgcaaacgatcgccgattgtggagatttcggtgcgaaagaaatatcccacaatggattctccctgcctcagggatgaaatgtagcagaatccgcagaggcagatgtaaatgaagatgttgaagacaccgaaacaggacatcttcaagtaggattcccccatctttcgtctgaccacatgaaatggcgttagtccgtatagaaacgttaggaagaatagtggacgcagtgcctcgtagacctgagaggatataaagtatttgcgcacccgacgcagggcggacatagtggcgaaatcgaactaatgcacaccggaagcggaaatgaaaacagagcacggcgaatcgcacaaccgttcggatgaaagtgtcaacgcgaactggctggtgaataggaaaaatggcgattgccacgcgacggatgcaaacgaagtgagctaaaggataataaaaggacggggggtcgcgtgaagtgggtgaagaggggatataaaaacgaaatgccggctggcgaaagctcattatcatgttgtctaggactcacaacaacaagtggcgggcaatagcaacaagtgttatcgttttctcactctatcaagctgccagtgatggctttgagaaattttatgcacacaaacaaataaaatggatataaattatgttaataaaaaagacaaaataagaataagtgagtaatgtgtatatcttggggggtacatggaaagaaaatcacaacaaatttgactaaatgtatttcgtaagacaccattatagaacgttggcaaagaattgtttatgtgcaaaagcaaaatggattctctacataaaccgaatcagcatcaccgtgtccttgaaaacggatacgacttgagtttaattcagtcgctagactttaaagatacttcccatcaagagcgtgagcattcatgcgagtttgcttcgtgacgagcaattcattgtcttcattatcaagagacactcgagtaatcgcatatctggtcacactcggtgactgggtggatatggaaatgaaggtgaaggatatcgatggggaatcgttcctggccattgctttagccataagctgatcagatttctccactcagcttactcctttgggcacagggaacgagggattactctgattgacaggtgatatatgatgattggatggctggttattcgctgtagatgaactcactacaccgtattgagttgggatgttttaattgaataggacacatagtaaatactaaactcagtacaacaatattgttatcttctcattactcaccttgtgaaggcaggtgattcggcgctgaaccgttctggtcatcagacaaaacatgcagatggtgatggaaatggccaggagctcgtagacaaaaatgaaggtgagttgccacgaagcgtacacctccattttggccaggcaaactaagccagttgtcagaaggacggtatccaggagaactaccgccaatatgaccaggaccacctggcctacaaccgtattgaaattgacaggacttcgcaaacgttctagttgtgtatcaacctgcaccatattcttgacagatttcaggaagtattttcgcagaagtagcggcaatataaaggtgaacacggccgctataatgccaccgacgtcatggactcgtgtgcttatctgtgacacatggttcctcatgaaatagccaatcaggctctcgtttctcaggttaatgtagctgtagcaataggcgagcagtagccagcgaaaaatggcatttaggaatccataccacgactgttctaaggaattttcccccagcgcgtttcgcctcaccagaaacggtgtgatgcccaaagcaaaggcaatggccaccatcaacgaaatggaatcatagcaatcccgggcactcaaccagtagcggaatcgtcctcggcagccgcgaaaaatgtccaatccgcagcggatcattgctcgaatccgaataaattaacgctcaaaatttgagttggattcatttcgctgaagtgcatagcttatcgcagattaaattgctgagatatggtaattgcttttgtttgctgtgctgctatggcaactggtttaatttgagttcatcaattgttatctaagggaatcatatcctaatctatatttgatcaattaattacaaagcaaataagtaatgtgcttagaagcagtcaacacgcttgaagaggtagaacatgtatagagcttggaagagtagcgtttcgaaatcctattataaacaccatatttatcataatatttatgttagaatgcagaaagacaaaagtccacattaacgaaactgcgcataaacaaattcaaacaagagaacgggccaactagtgccgccatcatcttcatctgctgccagtaaactcaacaatgcaaacgagattgcgtaatggatacccccggcctaatgagcgcccagtttcgagcactcgactccaacccaacatcgtgccacaatgcaacaaatcatgtggctggctggctggctggctcagaatttttgtcgcacaatttgactaacaacagccagtcgaaacaataacagagtgtctcccccgaaattttgcgtttttgtttttagattttctatgacaatggcgccggcgttaaatgaaatgcatcctaacttgtttgtttatttttcacacgtgcaacgcaatgcaacgctaagtatgtgccacaaaatgttatacaaaagtgagaatttgcaagtgaaatacctaaatcgatttatagtgaaaagaaaaggtttcaggcaaattgaaattgaaaaaacaaatctgtttaaaaataaagcaatcatttttaaagtccgcaataagttaccaattgatatttcttttcgttcccgcgtttaaccttatagtaaaatgtaattatttattcaatttaaagaaaacaaagcccaaataaatagtgttcgaaatta

SEQ ID NO: 32615 - DNA, 3684 bp, DROSOPHILA
atgatccgctgcggattggacatttttcgcggctgccgaggacgattccgctactggttgagtgcccgggattgctatgattccatttcgttgatggtggccattgcctttgctttgggcatcacaccgtttctggtgaggcgaaacgcgctgggggaaaattccttagaacagtcgtggtatggattcctaaatgccatttttcgctggctactgctcgcctattgctacagctacattaacctgagaaacgagagcctgattggctatttcatgaggaaccatgtgtcacagataagcacacgagtccatgacgtcggtggcattatagcggccgtgttcacctttatattgccgctacttctgcgaaaatacttcctgaaatctgtcaagaatatggtgcaggttgatacacaactagaacgtttgcgaagtcctgtcaatttcaatacggttgtaggccaggtggtcctggtcatattggcggtagttctcctggataccgtccttctgacaactggcttagtttgcctggccaaaatggaggtgtacgcttcgtggcaactcaccttcatttttgtctacgagctcctggccatttccatcaccatctgcatgttttgtctgatgaccagaacggttcagcgccgaatcacctgccttcacaagttcgatttcgccactatgtccgccctgcgtcgggtgcgcaaatactttatatcctctcaggtctacgaggcactgcgtccactattcttcctaacgtttctatacggactaacgccatttcatgtggtcagacgaaagatgggggaatcctacttgaagatgtcctgtttcggtgtcttcaacatcttcatttacatctgcctctgcggattctgctacatttcatccctgaggcagggagaatccattgtgggatatttctttcgcaccgaaatctccacaatcggcgatcgtttgcagatctttaatggtttgatagctggtgctgtgatttatacgtcggcaatcctaaaacgctgcaagcttttgggcacactgaccattctacacagcttggatacgaacttctcgaacattggagtacgtgtgaaatattcgagaatattccggtactcgctactggtgctgatcttcaagctactgatcctgggtgtttatttcgttggagttttccggctgctcgtctccctggatgtcacaccatcgttctgcgtttgtatgacattctttctgcaacattcggttgtctccatagcgatttgtttgttctgcgtgattgccttcagtttcgagcggcgcctcagtatcatcaatcaggtgagtgtgggggtaatggttatcagtacgaccagcaagtacagctcaaacgaagcggtcatggacattgaaatggccaaggagccggtgaatccaacggatactccggatatagaagtgactcccggtctatgccagcccttgcgtcgtagatttcggcgatttgttaccgccaaacagctatacgagtgcctgcgcccggtgttccatgtgacctacatccacggactcacctccttctacattagttgcgatactaaaaccggaaagaaagccatcaagaaaaccattttcggctacatcaatggaatcatgcacatcgccatgtttgtctttgcctatagccttacgatttataacaattgcgagtcgatagtgagtggattcattggagttactgtcatctacctgactgcctttgtcccaaaccatcgattggagcgttgccttcagaagtttcacaccatggacgtgcaactccagacggtgggagtgaagatcatgtacagcaaggtgctgcgatttagctacatggtcctgatctccatgttccttgtaaacgtactctttaccggcggcaccttttcggttctctattcctcggaagtggcgcccaccatggccctgcacttcaccttcctcatccagcacacggtcatcgccattgccattgcgctcttcagttgcttcacatatctggtggagatgcgactggtgatggtcaataagttgagtttcttcagctattgctttttggccgctctcatcgaacagcagagtattgttggctattttttcaaatcggaaatttctcaaatgggagactcactgcaaaaattcatcggcatgactggaatgtcgatactgttcctctgcagcagcattcgtgttagattgctgatccatatatgggatcgtatttcctatatagatgatcgttttctcaacttgggcgtatgcttcaattatcccgccattatgcgattgagacttttacagatcttcctcattaatggcgtgcaattgggctatttgataagttccaactggatgttgttgggtaatgatgtgcgacccatttacacagcaattgtggcgttctacgtgccccaaatatttctactaagtattgttatgctgtttaacgctacattacatcgtctctggcaacatttcactgtactgaatcagcgttgtgagattgtaatcccattttgcttattccacggacacaatgacttcattgagcagccattaaccatgtggctccttaggcgatcggttggaaaatcgggcaaccgaccacacgacgtatacacctgctatcgattgactatattcatggcactttgtctcggaattgtgccttactacgtatccatatcttcggaaggcagaggaaaactaacatcctcgtacatcggctacatcaacatcatcatacgaatggccatatatatggtcaactcattctacggcgccgtcaatcgggatacgttgatgtccaactttttccttacagacatatccaatgtgatagatgctttgcaaaagatcaatggaatgctgggaatatttgccatattacttatatcgctattgaaccgaaaagaattgctaaaactgctggccacattcgatagacttgagacggaggcgtttccacgggtgttgaagaacctagcccatcaatgggacacccgaagcctcaaggcagtgaatcaaaaacagcgctctctacaatgtctcgattcattttccatgtacaccattgtaaccaaggatcctgcggagattatacaggagtccatggagatacatcatctcatttgcgaggcagctgccacggctaacaaatattttacctaccaattgctgaccattatatccatagcatttctgatcatcgttttcgatgcatactatgttctggagacgctactgggaaaatcgaagcgcgaaagcaaattcaaaactgtggaatttgtgacatttttctcgtgtcaaatgattttgtatctgatcgccataatttccattgtcgagggaagtaatcgagccatcaaaaagagcgagaaaactggaggcatagtgcactccctactcaataaaaccaaaagtgctgaggtcaaggagaaactgcagcaattctccatgcagttgatgcatctgaaaattaattttactgcagctggtctgttcaacatcgaccgcacattgtatttcacgatcagcggggccttgaccacttatctcatcatcttgctgcagttcacatccaattccccgaacaatggttatgggaatggcagctcttgctgtgagaccttcaataatatgacgaatcatacgctttag

SEQ ID NO: 32616 - protein, 1227 aa, DROSOPHILA
MIRCGLDIFRGCRGRFRYWLSARDCYDSISLMVAIAFALGITPFLVRRNALGENSLEQSWYGFLNAIFRWLLLAYCYSYINLRNESLIGYFMRNHVSQISTRVHDVGGIIAAVFTFILPLLLRKYFLKSVKNMVQVDTQLERLRSPVNFNTVVGQVVLVILAVVLLDTVLLTTGLVCLAKMEVYASWQLTFIFVYELLAISITICMFCLMTRTVQRRITCLHKFDFATMSALRRVRKYFISSQVYEALRPLFFLTFLYGLTPFHVVRRKMGESYLKMSCFGVFNIFIYICLCGFCYISSLRQGESIVGYFFRTEISTIGDRLQIFNGLIAGAVIYTSAILKRCKLLGTLTILHSLDTNFSNIGVRVKYSRIFRYSLLVLIFKLLILGVYFVGVFRLLVSLDVTPSFCVCMTFFLQHSVVSIAICLFCVIAFSFERRLSIINQVSVGVMVISTTSKYSSNEAVMDIEMAKEPVNPTDTPDIEVTPGLCQPLRRRFRRFVTAKQLYECLRPVFHVTYIHGLTSFYISCDTKTGKKAIKKTIFGYINGIMHIAMFVFAYSLTIYNNCESIVSGFIGVTVIYLTAFVPNHRLERCLQKFHTMDVQLQTVGVKIMYSKVLRFSYMVLISMFLVNVLFTGGTFSVLYSSEVAPTMALHFTFLIQHTVIAIAIALFSCFTYLVEMRLVMVNKLSFFSYCFLAALIEQQSIVGYFFKSEISQMGDSLQKFIGMTGMSILFLCSSIRVRLLIHIWDRISYIDDRFLNLGVCFNYPAIMRLRLLQIFLINGVQLGYLISSNWMLLGNDVRPIYTAIVAFYVPQIFLLSIVMLFNATLHRLWQHFTVLNQRCEIVIPFCLFHGHNDFIEQPLTMWLLRRSVGKSGNRPHDVYTCYRLTIFMALCLGIVPYYVSISSEGRGKLTSSYIGYINIIIRMAIYMVNSFYGAVNRDTLMSNFFLTDISNVIDALQKINGMLGIFAILLISLLNRKELLKLLATFDRLETEAFPRVLKNLAHQWDTRSLKAVNQKQRSLQCLDSFSMYTIVTKDPAEIIQESMEIHHLICEAAATANKYFTYQLLTIISIAFLIIVFDAYYVLETLLGKSKRESKFKTVEFVTFFSCQMILYLIAIISIVEGSNRAIKKSEKTGGIVHSLLNKTKSAEVKEKLQQFSMQLMHLKINFTAAGLFNIDRTLYFTISGALTTYLIILLQFTSNSPNNGYGNGSSCCETFNNMTNHTL

SEQ ID NO: 32617 - DNA, 2638 bp, DROSOPHILA
cattgcacacaaaatgcatccaaaaacagtgctatggaaattgcagcaagctggggcataatttaagagctttccatttttttagactctttggtgctgcatcacacataggtttgcacgacatgcaatagatggcgccaaagaacgccaccagcggttataaagcgcaacttaatattttagttcgcaaaacaaccgacacatgagcacatggcgccactcagctacaaacgaaacaagccaatgaaagtatgctacatgttgaaatgagtattttttaaagcatacttttgaaaaacttttgctggatcgggaaaaatcatatattccagtatatatgtatatatatatctggattgcatttgactcttaaactatttttttttgattttaaagtttttcttaccgcgtaaacagaccatcgatctgttcatcaagactcagctaataaattttgctatgaactgaccgagccacacctgacagctgccaaaaacttcaaagaccgcagctgaatcgtaaaaattgacatcaaaccaaccaaacgaactaaccaactaacccaccaagcaaccgaacacttaatccccggcagcacacacccgcacccataagaattaacccatgactgccgaacaatttgcctattaaaccaggagacggaaccccaaaaagaccacaacaaagcgcagattatgtcaaattatacagatgttttggaaaggtaaagtcgttgaaggtttttttttttttgtctttgatggggatggtggtataggactcctcacatgaggtattgttgttggtggctctttgtttcgatataggttcgcccaccatttcgctgccttcgtcccatactccattcattgtcccattggcaatttttatggcttggcagcagtaaaatgaaatttttactactatagggtgggggaaatgaggtacatatatgggcaactgcaagttggacttttatgggtcagtccatcacacacacttagattagtggagcatatgcccggggactaggcgaatccgaaagggccgatgaccaacgttggacaattgccagcccattggcgtaggtcaagaggtggtctatctcgtacaggagtggtctaccgttgaaggaacttagagaaaccaaaatagctggtatcagaaggagatacttaatagtttagatcaattttacattccctctgctctgcacttccagtttagtttctatagttttgaccaacttaatttcgttttgaaaacccctttaagaaacctgcaaacaattaagcgttccgctcgagggaatttctttactcacctgagaaaagtatgcgggcaggacgcagcgttggtcgtcgagtcgcgagcactgcacacgctcgagcagctcgaagagatcctgggtggctgtggttgctccgcgcaggcgttccggactgtgggtgacgctgccagagccacttcctccgcccgccggttgctgcttctgtgtgttggccataaaggcatgctgacgtctgcaatgggaaaacaggaaactggttaataacacggcacgcaaagagtcaatcactggagcagagttggcacagctgagcttcagatttgcgagcacgcaatctcttcatgcatcgaagacaggagacctccttcgttcgattcactgagcaaaaattcaagtggcccacaggggttaacctctgccactgcgaggggttaagaattggtttggtctacacgacaacttatgctattcccacaacacgatcaaaagtgccactacagtgctcaagacttcctgactttgagagctcatggaggtattcttaaagaaccatcgatggattcgtaaaaaagaacgtttagacgatgaatgaagtttacttaacagtcagtgttgggaaatttcgatatcaattgtttcccgtatttcagagattagggaaaataaaaccaaatttaactggcaatatcctgcatatccattattacaactttcactgagttctaaaccatttcacatatatttccttttagattctccacgctcctaccagaaatctttattagactcgctcgtctgaaagtcaagaactctctctgcatatcctgaatccttttctttgactcttcgaacatctcgagcagctctcacgcactctttcagaattatgagtggccacttgaacatatttctcctgttcagttgtgagttcatatttttctcgagtttattgtcactagcgcatgttttttgtgagcagcttgctcttgcttttttttttctttttttttgagaagtttatgttgacatacaaacgacgaacgcctcgaaatgaacacataaaacttaaaggaggatgtttaccctgatgttgtgcaatgtcctttgacgttgctgctattgcagctgctcctctgctccacactttcccaaatagtcgaggagaatctcttcgccggctcacatctctgtttatttttaacaggaggagctcgctgctgtcactcgtaaattaacacctacccattccctttgccaaccaaatggagctcgcatatgaaatgatgacagttatgggaaaaggatatcaaaaacacgactgtgatgagcctgattgaagttggaggg

SEQ ID NO: 32618 - DNA, 375 bp, DROSOPHILA
atgcatgaagagattgcacgtcagcatgcctttatggccaacacacagaagcagcaaccggcgggcggaggaagtggctctggcagcgtcacccacagtccggaacgcctgcgcggagcaaccacagccacccaggatctcttcgagctgctcgagcgtgtgcagtgctcgcgactcgacgaccaacgctgcgtcctgcccgcatacttttctcaggtgactattttggtttctctaagttccttcaacggtagaccactcctgtacgagatagaccacctcttgacctacgccaatgggctggcaattgtccaacgttggtcatcggccctttcggattcgcctagtccccgggcatatgctccactaatctaa

SEQ ID NO: 32619 - protein, 124 aa, DROSOPHILA
MHEEIARQHAFMANTQKQQPAGGGSGSGSVTHSPERLRGATTATQDLFELLERVQCSRLDDQRCVLPAYFSQVTILVSLSSFNGRPLLYEIDHLLTYANGLAIVQRWSSALSDSPSPRAYAPLI

SEQ ID NO: 32620 - DNA, 2285 bp, DROSOPHILA
aaaaagaaacacaaccgccagcgtgaaatgaaatgcagtgggtgagcaagttgtcaaatatagaggaagaaaaacttaatgaaatgaagagtgggtggagatagaaagtagtagaaccagaacttgtgcaacaaagttttccataatttcaatagtatattgtcaatcaaagctctcaaacagatactatattcgttcaaacttatcgaaccaaaatgtggttttgatggacacgttgatgccattgaaaagttaagttgcagataagacagaaagtgtcttatgacactcatactgaacttgtcaattgtcaaatgtcatataaacttgcatttctatatattgaatactaaatattgttgccatgcaaacttgagaatgaatcacatatgtactgccttttgtttcattaaatataaatatataataaatactttaaacttccaggagctgcatttctccatccaatttacatccaattcatgcattaaccattttccatttagccacacctcatcgcaaaaaccccaactcatcaaggcaaacgtaaagaaaataactgcatttgcggtgaaatttgttaactggccaacaaatgttggcaatgagaagggaaaactggaaaaccgctggacgatgcacccattatgacaacgtcagtcaaccgcagcgaccaaaggaatgcgacaacaggaaaatggcatacaaaaaaagagagtgctcttgctttgggtgaaaataaccaaaagggagccctcatcaaaaacgcatctatcattcgacagattgcacaaaaactacaaagatactgactgtgatccagctgtcacaattaggcgaaaaccaggaaactgagaattgttgcgaagtggaatatgtaaaattaaaattaataactcaaatgtaatgtattctttcttcatgaccttcttgagttcccaatctattttccttacagttgatatcagtgaattgtttttatgttttttttttataaatgttaaaagggggagtccacactttgagatttgcttacgtacccagctggtgatgatccttggctggcgctcttgccaccgcccgtgtgaatgtgccgctgggggggcgttggctggtggtggggcgacgaggtggccgagacggtgggcgtgcctccgttggaggaggagctgccaccacccacttgcccctgacccgccaatttgcgctttggtgatagctcctgggcattctcgcagacattttccgtgttgacgacctgctccagcatgtgtatcttcagcatgattgatggatttgattgactgacgttgttttgattttggtttcgtatttttggttttgaagtatttttggttttgtgttttttgtttgcttttggtttttccctttaaatggattcagtttttcacatgagttcacttcactcttttcattttgctgctctgcacagggggggaaataaaaatgaagttaaatttatagcacaacacttttcagcatgtgtttttccttcgtttcattctttttcctcgttcactcggtttttatcttttcccgattaattaaagttcaggttgcggtcacttgagccgaaatttccttacgcatgttttacaaccgttgtgaaaccaattttttttgtggccagcaataaaagaatggaaatttaataagtttatgctgcccgacgtgatggtcgtaaaactcggtaagaaaaaatcgtgtcttcaaaaaacaaagaaaatcactcaaaggtaaatgaatttggattctgggtgaggcttaagtgcacattattaaaaagtaatgccggggctgaaaactctctgcccagccgagcgaggaaaagcgcgtgaaaatgcgtgcaaaacagagaggagacaacaaacaacccgcatatgtttttcacgaaaggaaaaaccccgaggcataaccacttgccagggcgggcagtcacttaggcaccatgtccccaccttccgggaatccgcaataagccctcataaagcggcataaaaaacttcgtcttcaacctgccccactgacaattggcttaggtctaaaacaagccaaagaaaatgtgaaaatttcctgaatggttgagtcgggaaaacgccccccaaaaaggtaatgcgatggcgcacgtgtccaagtgccgccaccacagaaaccgggcaagatgatttatgatttacggcattgactgaaggcatctggccgtcagaagtccattgagttactcctgcaattcccggattttcctacccaaggccaggcacctc

SEQ ID NO: 32621 - DNA, 285 bp, DROSOPHILA
atgctgaagatacacatgctggagcaggtcgtcaacacggaaaatgtctgcgagaatgcccaggagctatcaccaaagcgcaaattggcgggtcaggggcaagtgggtggtggcagctcctcctccaacggaggcacgcccaccgtctcggccacctcgtcgccccaccaccagccaacgcccccccagcggcacattcacacgggcggtggcaagagcgccagccaaggatcatcaccagctgggtacgtaagcaaatctcaaagtgtggactcccccttttaa

SEQ ID NO: 32622 - protein, 94 aa, DROSOPHILA
MLKIHMLEQVVNTENVCENAQELSPKRKLAGQGQVGGGSSSSNGGTPTVSATSSPHHQPTPPQRHIHTGGGKSASQGSSPAGYVSKSQSVDSPF

SEQ ID NO: 32623 - DNA, 2327 bp, DROSOPHILA
aagtatgcagaaggcaatgatttccctccaccgagagataaccaaaacaaaccgaataaccggaaccggcgtgggacaccaatacacaagtaaacagaggcacgagccaaaaacagtcggcgttcgcccccttggaaagtggtgttattccagaacacgttctttcatgagcctttttcgagagaaagtattttcacaatttggatataccatttttctggatttctgatgtcaacccgaataagtattacagaatacgaaattgaatatgtatgtatgtatgttatagtagttataaaaaagaattttccgtcaacttttgttgactaaacattgttttttgtcttgtacaccaaatctaacaatttgtggaaaaagaatcactttgaaaagtgttcacaaactttcgacttgtatttgtaaatgcaaaaaatgcagttctcccgcgaactgtttccacaatccacaaaatgacgtcggcgtgttgcacttgttccctcgtttttatcatccacatgcttgccgatgttttcgttggcggctgataacgaacagctgataaccacacgataaaccgcagctgcgaggggcgtttcgaaaacccgaaaacagataaccaactgttgcatgccccacatttttggggttacacatcaaagtgaaccgcaagacaatggatgccacttctttggtagtttctatataaacaggtatggaatgcatgcatatatttggtcattcaacatttatctcggtctccatggaagtgatttacaagagaaagaaataaaattgatttgtttacgatgtgtaggtaataaatgggtaaaatcattttaaaacctttcaaatgctaggcacaaacaaattttaaattcttgaccacctgatgctctgattctaaacgattaaccacattaatatcttggcactcataaaaatgagtaatttattaatgaataaattgaaaaaaaaaactagtttttatcattaagtgcacttaccttagtggttctgtcagcatatctatattctcgcagctttccatctccagtcgctggtattgcaattgcctggcactcgaagtgctcgatctgccccctgatcctcccgaaattgtggccgagttggatgaatggcgacgatactcggcgaaactctcgcttttgcggagacccggaatttttccggaactgttgcgccagtacttgatcatccggtgtaggggcttgggcgaactggctgccgaactcggggccagcgatatttcactgcttcccactataatcggatggccatgatccaccaatgtcctgtaggaactcatttttatcgcctaaatctactaaattttgaaaggttactcttgagaatatgtactaacagaatatgtactatgtactctagtaattgcatgtgttttttattagtttgttttattataatgaatttattaagttaattgaaatatatacgtttataactttccatatagattgtagaatatattatatttttaatttatatttttcactgcgaattggtactcttatcatttctactccgggcttacacttagatttattatattcactcattacacaatgtgactatagttataaaattaatttatgtctacattttttttttctttgcataaattagaattcgttcgttgcataaatcgcgtttcgttggggtttcgatatgatgtcgcgtcgcgccgccttcgattttccgactgaccgcaacaaagaatcggaacagagccccaagaaccgactttttagaaccgagctccattatctggagcgttctccctcgcttgtttttgctctccctctctttccatttccattgtttttataacttcgcacgttttattgcatagtgtttttttctgaatttacttatatttcttgcgatttcattattttaaacataccgggtacttctgatcttaattgggaatatatgtacttaaagcgatcatataagcatcaaaaatctgttcaaacaatgtttttttttttatatatttatttatttagaagcgatgaatcaatacaatgcaataacagtaacataacagcgcaattaacatataaaagataaaaccaaacctctcactaatcatgtgaggacttaattcaaacaatgtactataaataataaatattctcacctttttggggttaatgtgttttattaaaaattaaatttacattttttaggtttaatttagaaaccactaaagaagtggatattgtactcttttataaatataaaaggtatattccattcttaagcgccagttaaacgttttt

SEQ ID NO: 32624 - DNA, 327 bp, DROSOPHILA
atgagttcctacaggacattggtggatcatggccatccgattatagtgggaagcagtgaaatatcgctggccccgagttcggcagccagttcgcccaagcccctacaccggatgatcaagtactggcgcaacagttccggaaaaattccgggtctccgcaaaagcgagagtttcgccgagtatcgtcgccattcatccaactcggccacaatttcgggaggatcagggggcagatcgagcacttcgagtgccaggcaattgcaataccagcgactggagatggaaagctgcgagaatatagatatgctgacagaaccactaaggtaa

SEQ ID NO: 32625 - protein, 108 aa, DROSOPHILA
MSSYRTLVDHGHPIIVGSSEISLAPSSAASSPKPLHRMIKYWRNSSGKIPGLRKSESFAEYRRHSSNSATISGGSGGRSSTSSARQLQYQRLEMESCENIDMLTEPLR

SEQ ID NO: 32626 - DNA, 2210 bp, DROSOPHILA
aattgtagtctgtttttttttttttttggatacccttaaaaagtggagccagtcgaaaggcggcgatgaaaccactgctggagaactgtcccatgaaggaatgaacgaccaggattggtaccaagtagatcaccatatacaaaaaatacggcagcataccaacaactgaaataagaaatgattaagacaactatattagtgttgattctttcaatagtggcggcgattctattattcaagttggtcataaacgtcaaatgtgaaaagtgtgattaaaaattgcacttggaccgcaacgcccataaatttattaagcactgctgtgttcttattacttacagccgatattgaaaaagaaccagtacgagacctcgaagatatccaactttaatgccaatccaaaacaggcaaataggtagtcggtcggtttttcccatttccctcgcttaggatctggagaaaagggctttgtcccagaagcatatgacgtttcataaaccatgttgcttccacgatatcacaccgatgaatgaatccgacggggattcttaaatctattttctacacggcacgtgcgagattgcagcacaaaggcgataatataaaatattaaaatgtatattattaaattgatcatataaatcagtggtccgcgcggatttctactggcgcttcgccgacaaatgcactctatcaactttcgtgcgacttcggaatagttcttcgcgtacgctctctcgaaatttgaacacaatataaaagcgcacacattgtcatgggctatatatatctagatttatctgagatgcattactggccttcagtattatactataaatttattcatgttcccttatactcgtaagagtacagataaaatatatatacttgttgggcttaattttgcaggacaatcggatctgaattatagatattttatttaatatattttacaatacaaaatatcagatatcatgtacatttgcaactggattattttttagttaacctcctcggtgcgatcgaaaagttggtgggtcatctcggatttttgaacaagttctccgtactgctgccgatactccatctccaccggataccaatcggtggctctaaagagctcggatatgctgccgggtctctgatgaatgtagtaaaatccataggcaggtattgccagaatgggtaatcccactagtataatggccataaagtggagaacagacgaggaataagagtgttcttccaagcacattttaatttccaagacctaatatggataaaacaagctcaaccgttttttaaatgttgaaataatgccaaactcagtacataccaaacatatcactaaagttggtggagctacgaaacggagtataaaaaccttccaggaggcaaagggctggcccagcatgaacttaatatccttctggaatcgatctcgtccatagacccacaaaaccaccaaaagaagcagcaaatgcagcagtgtttgtgagaaaatagcatcgatcgatagaatcgcaaaataaagaacaccatgctgtaaaaaaaaccaaaggttgttttcttaacggatttttgtttacaagccaataacttacgtttgtacaaaagtaaagagagcagacggctaggccgccaatcaggccaagggtcacctcttgttttttggctctaagctgttcaaactcgtcaaacaaactttgcaagattgtgaatatttgtgttgtctgcaatgcgcaatatatatgtatatatgtgaatggatattatgtaataataaagccaaatacttacgattacaataagagcagccatcagtagcatggtatagtaaataaatgtccacagatttggccagcccaatgaggataacgctgacgcggaggacaagaacagcacccaatggttaatcacttgcgtttcaaacaaaggtttggggagtcctaaattaagaaaaaaaaataataattgcatttcttaaatattgatttggctttacccagaaagtagtgttccagcataaaggaaaccatgccaaacataatgtaaatgaagatctgtccgaaggaaataatccaactatacgacattatgttggtcttaaatccgttgaaactggacagggttattacactgccccagccagctccaaacgcttgtagtgccattataaatgtcgaagaagtccccaccacaaattcctc

SEQ ID NO: 32627 - DNA, 210 bp, DROSOPHILA
atggccattatactagtgggattacccattctggcaatacctgcctatggattttactacattcatcagagacccggcagcatatccgagctctttagagccaccgattggtatccggtggagatggagtatcggcagcagtacggagaacttgttcaaaaatccgagatgacccaccaacttttcgatcgcaccgaggaggttaactaa

SEQ ID NO: 32628 - protein, 69 aa, DROSOPHILA
MAIILVGLPILAIPAYGFYYIHQRPGSISELFRATDWYPVEMEYRQQYGELVQKSEMTHQLFDRTEEVN

SEQ ID NO: 32629 - DNA, 2213 bp, DROSOPHILA
taacccatgcctaaaagagtatatttaagagtatatacatatattttgtcgaagcttcttgataacctacctttaaatagaggtgacaggcgaaatgcggaaatgaatccactgctggagaactggcccatgtaggaatggatgaccatgattggaaccaagtagataaccatatacataaggtacggcaccattccaaaaactacaaaaagtgaatcaaatattcaagattatttaatctctaggggcatgcaccacaacgccccccataagattaggcaaactattcgctctttaatgtagatagataatagttaaaaactgcaaatgatttgctcacttactgcctgtattaaaaaagaaccaaaatgacgcaacaaaaatatctagtttcagggctaatccaaaacaggcaaaaatatagtccgtgggtttttcccaatttccgcgattaagatcgggagaaaagggcttagaagccatgttgattttcgactttctttcgcgggaacgggaactattttcaagcgttatgaaatcaaaatgaggcactgttgtctacaaccgatgcagactaactgaaacggattcctactgcaggtcgtttttagctcatcgcattgaattgataagcagccattatagcgtcgatttgttgttgtagacactgaaaatttgcatagctataaaagttgttagcagttaaaagtattaacatccgttaatagcaaagtgtacccccttactttgttagattgatggcatcgttgaaaagtatataaggggtattaataagcgaaagcgtattttaaatatatattcttgctcagaatcactctccatttccgtcgaaaaatccgcacccacgctaccacaaccacaatttagaaaattgcctgataggcaggatattctcttagtatttgaaaacatttaaatataatttaaaagcacaattgtttatttggcaaaataaagaagttactcttgatggaaaaactcagtttggtccggcagtaagctgttgggtcatatccgtattgctaacagcttcctcgtactgctggcggtgctccatctcaaccggataccaatcggtgggtcggcaggtgcgtttgaagcgttcgcaaaaggatccagtgctacggtatatgtagtagattccataaccaggaatagccagtatgggcaaaatcactagtatgatggacattccgaggacgattgctgaggaataaatgtgctccatgtagcacactaatattcctactacctaatatagcgaaaaaaaagaaagacattatagaatacaaatcaccagaactacctaccagacaaataattaaaattattggagctataaaacggagtatgtaaaccttccaggaggcaaagggctggcccaacatgaactcaatatctcgctggaatcgttcgcgaccatagatccacaaaaccaccaaaaggagcagtaagtgcagcaaactatgtgagaaaatggcatcaagcgccaaggccgaaaagaaagtaattccatgctaaaaaatatgaagataattatatttaagtctttaaaaaatattactgagaactgtctcttaatttgttgcaaacctaatccagataacttacatttgtgcaaaagtaaaaggagcagactgcaatacctccgattagcccaaaggttacctcctgttttctcactctaagtacttcaaactcatcaaacaaactttgcaaaacagtaaagatttgcgtggtctgaaaaaaaaagaaaaacacataatacgtttaaatcgatcaaaaagtgtttgttaatgtacaaaattaagagtgtgttgtaaatttttttcaccggaaaatctaaaccaaaataaacacatagtctttgttctttgttcagaaaaaaaaaacttactatcacaataagagcagccatcaacaacattgtatagtaaataaaggtccacaggttcggccaacccagagaagacaatgcggtagcactggacaaatacagagcccaatgagtcaatacttgtttgtcgaaagaaccttcaatgccttctgaaaggcaaacgatacaattaagttgtgatattagatatgagttagtggaatcgtaaacctttagattagaaaactctcttgtacatttcgttcctgcaccaaaacaattttttattatattaagggaactggtcttaccattg

SEQ ID NO: 32630 - DNA, 213 bp, DROSOPHILA
atgtccatcatactagtgattttgcccatactggctattcctggttatggaatctactacatataccgtagcactggatccttttgcgaacgcttcaaacgcacctgccgacccaccgattggtatccggttgagatggagcaccgccagcagtacgaggaagctgttagcaatacggatatgacccaacagcttactgccggaccaaactga

SEQ ID NO: 32631 - protein, 70 aa, DROSOPHILA
MSIILVILPILAIPGYGIYYIYRSTGSFCERFKRTCRPTDWYPVEMEHRQQYEEAVSNTDMTQQLTAGPN

SEQ ID NO: 32632 - DNA, 4082 bp, DROSOPHILA
tatatagtcggtgggcttatcccactttcctctcttcaagtcgggggaaaagggtttgtgcccactatcatacgatgtttcatatatcattttgtgacgttagtatagcccggtaaattgtgtgagcaaaggaatttgaaaaacttttgtataaaaagaaatatatccaatttcacacgccgatggaggtacttattattaaaagctttggcaaacaacaaacatttcgcgagcgttttaaattgacgaactaattagtagcagcgatgcggacgaactaaatccgattccgctgataaaccgcagtgtagctgattccactggactgagatgctcatagcctatcccggaccattcacactagatcggccatcaaatacacttttaagaaataatgttaagcataattttttgaataaatagtcggtattactttgtaatactatgtaatgtgaacaagttcaaacagacagtaagaagatccctaataatttaatgtaatatgatgtatattaatttggatatgttaaaacaaacatctcaatgaaactaataccgttcctaaaagtagtgagtcaccgaagtggcattctgaaattaaaaggcatttctatacactaacatgacgtcaataagagtactttgcttataaccataattaatcaataactacattaataattacacgtttttaaaagctctctctctctctcgatagacaaactatgtaagcattataattgtggacgtcacagattttttaagctcaactttattaacttttccgagatatctacgtttctctggacagtcacacgtgtgaacctgatcgattcaggtgagataaacgctgtaaaacccattgctgtaagcatagtgcaataagtgtagcatttccacctttcacaatatgattgtatatatatgcatacctttttttaaatacgcattaaaattactcatatatttatatttagtacatttctaagtgcatcagtaactagttgacctcctcagtaacctcgaagagttggtgggtcatctccgtgttgtccacagcttcctcgtactgctggcggtgctccatctcaaccggataccaatcggtgggtcggcaggtgcgtttaaagcgttcgcaaaaggtgcccgtgctctggtagaggtagtaaaatccatatccaggaatggccagaatgggcaaaaccacgaggacaattgacatcacgaagaccactgttgtggaataagagtgctccgatatggacagagcaattcccgcgagctagttagttaaaagaatatgattattcaaagcaacaagcaactaactaactaactaaccagacaaatgactaaaattattggagctataaagcggagtatgaaaaccttccaggaggcaaagggctggcccaacatgaactcaatatctcgctggaatcgttcgcgaccatagatccacaaaaccaccaaaaggagcagtaagtgcagcaaactatgtgagaaaatggcatcaagacccaaggccgaaaagaaaataatgccatgctagaaacggaaaattgtttaaaatatttcttaataatatatcttttttgtgtaaacttaagtacttacattggtgcaaaagtaaaaggagcagagtgcaatacctccaattagcccaaaggtcacctcttgttttctcactctaagtacttcgaactcatcaaacaaactttgcaaaaccgtgaagatttgcgtcgtctgaaaataaaattatttaagtttagtagcgtgaaaaataaaaattaattgtgtagattatcatcaccatcacaattagagcagcaattaaaagcatagaatagtatataaaagtccataggtttggccaagccattgtggacaaggcagaagcacttgacaaatatagcagccaatggctcaaaacatgtccgttatcatcaacatcggatagttctgaaagggataacttcaatacagtaaagatattgcaaatctataaagtgctattaccattaaagtagtgttccagcataaaggaaaccatgccaaacatgatataaatgaagatctgtccaaaggaaataatccaactatacgacatgatgtcagtcttgaaaccgttgaaactggacagagttattacactgccccaaccagctccgaatgcatgaagaaccatgatgaatgtggacactactcccatggccatgtcacttgcctttggagtcacatatctgtggagcccgttaagagctcccggaaggaacaggaatcgcacaaagcacactaaaagaagaaccagggtaacaatcaccatgtagcgtataagttttccaaacttggccgtctctgagaatttataaaaaataaatgcaatcacaacccaaatgattgcgaataggccaacaaaatgccaagacaactcgtaatccttataccaatccggaaccgcatcctgttgcatgctatcatagtgatttctgtaaacatagagttaaaaagaaattatttttaaacaattcttaaaataatattaaaatatttgcattggattaattaggtaatgttttattgctatataaataggagcacttactgaaaatagagcacggatggtacatggagcagctggtgagatctgttgtattccgaaaagtcctccaagatcagtgtcttattacaagacttaaatataaaaaatgtacttagtcttcaattcaatttagtcatacacaaatttcatacactagatagcgttgcacttccattgtgccaagaactcaagccctcacagctccaaggtaaagtgggtcgaaatgagtttattatgaacagaagtggaaccgcagcaaaaatgctatagtaaattagcatggagatagttaaaaatccactcacatatcccatgcctgaaattgatatttcgatcaatatttaatatctgtttaaacttctcggttacgtacgtacctttaaagaaaggcgacaggcgaaaggcggagatgaatccactgctggagaactgacccatgaaggagtgaatgaccatgatgggaaccaagtaaatggacatatatacaaagtacggcagtattccaagaactggtccaagcaaatagtgtatttaaataaatgcattcaaagataaagattaaattctgatgtataaactgttatctcttgtgctgtataaagagacacaattattacattaaatacataaatatcgacagaattaggcattgttttgtatgtatgtcagatgagaaggtaagagaacattagcagagcaccgcccctccacagattagtctaaatccgaaccttatcagcaatataatatacgtagtcgcccttgcgttacttactgcccatgtcgaagaacatccaaaacgatgccacaaagacatccaacttcaaggctaatccaaagcaggcgaacataaagtccgttggcttatcccattttcctcgattcagatcgggggaaaagggtttatgcccggtatcatacgatgtttcatataccatgttgaactacccacaatattaccgccaaaatgtgggcgagaatggatttaagcaaattttgtaaataagtatatataactacgatctaattttacactcccgcagaggtaatattagtatatatatattttttttctgcaaccgatccgcgagcgttttactctaaattgacggactaattagtagaaccgatgccggcaaactgaatccgattccgacagcaggcctctgtttagctcatccctcttgaatgagataccccaacttaggcgatgcacacttggtctttaatcacacagttattactatggaagtggggtatctttataccgagattcatttgaaacctccctctaatttcaaacagatctgttgtcaaaataaagatatgctaggaaaatatatatctaagcgagttatctatagtttcaagctttcggttatcaaaataattgtaaatttgttattacacgttttgtaagtgtatttccgatctcgaccataaatttgcatttattgttattttgctttaaattcagatt

SEQ ID NO: 32633 - DNA, 927 bp, DROSOPHILA
atgtccatttacttggttcccatcatggtcattcactccttcatgggtcagttctccagcagtggattcatctccgcctttcgcctgtcgcctttctttaaagagacggccaagtttggaaaacttatacgctacatggtgattgttaccctggttcttcttttagtgtgctttgtgcgattcctgttccttccgggagctcttaacgggctccacagatatgtgactccaaaggcaagtgacatggccatgggagtagtgtccacattcatcatggttcttcatgcattcggagctggttggggcagtacgacgcaaatcttcacggttttgcaaagtttgtttgatgagttcgaagtacttagagtgagaaaacaagaggtgacctttgggctaattggaggtattgcactctgctccttttacttttgcaccaatcatggcattattttcttttcggccttgggtcttgatgccattttctcacatagtttgctgcacttactgctccttttggtggttttgtggatctatggtcgcgaacgattccagcgagatattgagttcatgttgggccagccctttgcctcctggaaggttttcatactccgctttatagctccaataattttagtcatttgtctgctcgcgggaattgctctgtccatatcggagcactcttattccacaacagtggtcttcgtgatgtcaattgtcctcgtggttttgcccattctggccattcctggatatggattttactacctctaccagagcacgggcaccttttgcgaacgctttaaacgcacctgccgacccaccgattggtatccggttgagatggagcaccgccagcagtacgaggaagctgtggacaacacggagatgacccaccaactcttcgaggttactgaggaggtcaactag

SEQ ID NO: 32634 - protein, 308 aa, DROSOPHILA
MSIYLVPIMVIHSFMGQFSSSGFISAFRLSPFFKETAKFGKLIRYMVIVTLVLLLVCFVRFLFLPGALNGLHRYVTPKASDMAMGVVSTFIMVLHAFGAGWGSTTQIFTVLQSLFDEFEVLRVRKQEVTFGLIGGIALCSFYFCTNHGIIFFSALGLDAIFSHSLLHLLLLLVVLWIYGRERFQRDIEFMLGQPFASWKVFILRFIAPIILVICLLAGIALSISEHSYSTTVVFVMSIVLVVLPILAIPGYGFYYLYQSTGTFCERFKRTCRPTDWYPVEMEHRQQYEEAVDNTEMTHQLFEVTEEVN

SEQ ID NO: 32635 - DNA, 7160 bp, DROSOPHILA
atatatctaagcgagttatctatagtttcaagctttcggttatcaaaataattgtaaatttgttattacacgttttgtaagtgtatttccgatctcgaccataaatttgcatttattgttattttgctttaaattcagattattagagctcttatatctgtgcctgtctctcttatgtgcgcctatcgtcgtgcattgccaagttcatttcgattttggaactggaaactgatatggtcgtgctcgggaaatgggatgacaaacaagacagccgcaaagttatcaaatctgggggaaaactcagacagcaatgcaaaagcaagtaaaccccataacgccctggctgttgatttcaataacgcattgataatgtcttaatatttgttttttcttatgtttgtttgttattagcgattagttttaggtaataatatacaattacctcatatatttttcaaactattattattttgcatgcatttaaaaacatgcttctaacaatctactctaaacgtcatatattctataactaaaattccaaaattattattattattagtgcgacattaaatagtttaaagtgctgacagccgtatatcataaatttaactcttttccttatacgtttaccaacttcaaaaaaagacttcaacattttcaatgcctaaaaggtaaaattttattagttcataacaatatttttggccgaagcttgttgaacattttagtaggaaactactaaatatcaccagtatattgttcactatagctagcttttggaaaatatcagtacaacttcattacaacaactaacaatcgccattgccaatggatccgcttatttatatactagtgtgcgtgtttgttattgtattttttgcatgtgtgaatgtgaccgcatatgggtgtataataaaagtgagttcagttcagttcatttgtcaagtgacgacgctgtaagtattgagttttgatctagggagtattcgatatttaggcactatgtggtgttggcattggcatctataaccagcatctccgagatgcccatgatttcctcgtagaatcgccggttgtccgcatccaccggatgccagtcatgtggtgcgaggcactgttgcaatcgctggcgccaatcgccattcgtccgacataccttgtaaaccatataagatatggccgttaggagaatcaagccctgactcacataaatcaggacatcgtgtatgcgatcacgcgtaaataaataggttagttgaaactgcaagaaattccaataatatcagtcattaactatatacaaataattttataataataaccactactcaccagacacagtcccagaaaaatgggcgtggcaaagcgtataaagaaaattttgaaacttgagatcgttttgcctaacataaactgcaagtcgcactggaaacgaacgcgtccataaacccaagtggtcatcagcacaaggattcccgaaataagcaagtgtgtaaacactgccaaatttggcagctgagtcagctgactaaagcccaactgaaatggataattatgtattacagtatgctctcagaaatgaaaagaatttaaactcacctgagtacaaaaatatacagaggaagctgtgaggcagaagactagcgatgaaattaccagaattcttcttgaacgcaatgtctcgaactcatcgaacaaggcagtaataacggacatcatttgaatgatctttgaaagatacaattaaattagataaaaattcttaaatgggtgcatatgtaaacttaccaaggcacatagttctgataaaaatatcatgccaaagaacagaaatgcccagagatttggagtcgtcgtaaaacgtccaaacaagtatgagaagcagagatacagaaactgcatatgatgcttctcatccacatgtaatggcatcataccaacgtgatctgtttgaatatagcaatttaaaaattggaattgttttcaaaaacaaaattcaagaggccctaccctcaaagtgatcgtgggccacattgcagcagagcagtcccattaacccaatggtaatatgagtaaggcacacccagatactcagtctttcggcatctctgcgaaagttgttgtagctagacaaggttatgatactgccccaaccgggccccaaggctccgccggccatcaggagggccgtgcgagccgttgccaaaatgctgtcaaagctatccaactggggcatccaataataatgcagggtatcaaacgtgacttgctcgtgaataagtaagtacaagaaaacagcgacgaagaagccgaacatcagcacgcatgaacatcgcagaactttcccaatctaaaaaattagggctgttaaattatgtatattttttagtttgtttgaaatacatacaaaagcaactggcttgagcagcagggccagaaccaccagccaaattgataaaacgcctatgagcatggaccacgatatgctcatggaagtggaaccttttgcagtagaggcaatcatcgatctaaggatatagacaaagtaagctttagctcaatctaatgtgaattcgagtgtaacttgcctgaaaaactctaccgtggaatgaggatcaactctatagtcctataaacacaaactatctaagtaagtaaatatataaccatctaaactactcacatcgacgtcgtagttctcgtgcaaggaacactcctgggtattccaactattgttgcaactcatccagggtatcactgggtgtattgaattcacggtatatatgaggggcactacagctgctatactgtaataggtgagcgttcccagattgaggagcagaatggcgtagccaatgcctaaaagtatgccacattagttgaagcattttacagttagcaactattttaacagattttcacctttaaatattggcgccacgcgaaatgctgatatggttccagaacttgaaaactgtcccaaaaaggcttggatcaaaaatattggcagcgagtaaaatagcattcccatcaggtaggcgattataaacaaaactataaaaaaagaatttaaaagtcaaacatataagagacacatcgcattactgatatattatgagtaattcgaattattattgaaccctgatactcatcataattatctattgcttgcacatcgtgtcgaacactgtgtcattagttatgagtttatcttaaatatgatattagtaacttggtgataactaacaattaaatcattagaaaaacctgttttgaagataattaaggagagttagtaagagatattctggaacagtggctttgattttatgcgggctttgccccgctgttcaccttatcgctcgcaaaatataataatttttcaaagtgttcgcaaaaagccatcattaacgcagcttagataacctttgctttagttaattgaattttattgataacaaacagcaatgggatcaaataaaggggataaccgtcagcaaatgaactgcaaaaaaattatatggaattcttatgcgagagtttaaattttacgctctttgaccttgaataggaatgtcgcattacttttattttattgttcaatatttgtcatatgtatgaatatatatatattaaaaaaaaaactttttttaagtgtacacattttgtaagtgcactttgctattgttaagggtacttacgccaaccgccatgaagtattccaaaggtggagagctccgaaaagatcagcgaactgaaggcatgtgtgcagctggcaaagtaaaagtccgccgatttggcccaacgaccacgacatttatcatgccgatatggtcgctccagggtatcatacgcactacccgttcgcacggccatgctgtgcacctggcggcttcggatacgacgggcggctagggccagactaccgcccattccgcctccggactccgtttccactggctccccgataaaatcaccgggcagttctgtgccatgttcactattctcacagtcgcccaggagcatgcaattgttgagctgctcaccgcagatgcccttcatgttgggtcatcaggtgagaagttgctggccagatgagaaaaccaaacactcgcgactctgctggctcaattaaaattgcccagattcggtttgttccaagttcatgccgatttgttccgtttttgttttgcttcggttttgtttttctgtttttggctgtatgacctagtattcagcagagtttttctgggtcacttcacgaagaacaagtcgtagaaatgcgagcttcagattatcttctaattggttggtggctattgccgccagcggattcacgccgcactcttgaaccttatttaaaattaaactcaattttgattactccgggcgccaagcaatcagctccgatgctcggcggcaaatgatgctatttaatggggattgccgttctcaagctacgccaaatgaagcagtattataggcaccaccaacaacaaagaacctaacaactcacaaatttaattaaatatatatacggctttctacgtagttttttcgtacaatgcgtatatgtgagttccattgagtgtgcaacgattatatatgaagcacagtggtgcgaaagataaacaaaaataaactggtaaaaatgaaaaaatattttgtagaattaattatgtatattaataaacaacttggttaaactggataaacagagtggcttgccctttaaaacttcagcgtttcaatcaatgaatactaggctattttaaaatacaacaaaatattaacaaaattgtaccattagactgaattaagttgtccaatctacttattgtgcttctttaaatagtccgtacctattctattatcagtatcgccaaacaaagaaaattccaactgaaggggaaatcaaaacaaatgaaaatgtatttttaaaaacaaagcaatcttattgaatcgaatccaatcgaatcgcatcgaagcacaacaaagccgataaagctgaattcaagagaggagaagagaaacgaaacgaaactaaacggatggcaagctgaacgggggcaatggacagctgatgattctctttcccacccccacttgcactctctccgttcacaatgccggtggcctacggagcgtatacttgacattgctcatacgtaccattggctgcgaggaagatttagctctcgcgttttctctgcccaaaaacatttcaacaagtaaagcaatgaaaagagaggggcggggggaagcgtgttaaagggtgtgtgaaaatcagctgttttttgttgtgagctgtgagaattgtgtaattcaagcaaaattttctgcctccacactttctgccttcagtgtttacgcgtattggacgccgatgacgctgttgatttggtgtggctccatttatgagtaaattagtgagtgcaccgaatgcggcgaacgtgtccaattactcgaatcgaaatgttacaaacaaacactcaagtgtgcgcaataaatttgcgaaaaaaaaacatttgaaatggccaagaggaaagcacaaacaaatatatgcaccgtgaaaaaatgttagtttggcattcatagacaaccatgacattggatttaacagttttaaaataaagaaaattaatgtaaacttgattctttacaatttgtctatgacctctgtggaccattaataaaatacctaaagaacggactaaatatgggaatgaccacaggacgaccgtttggatgttttatctctcagtgtgtttgcttgcgttcaaaagacgcaaaaagttggcgtctcaagtgttggccaagtctgtgggcagtaccttgccctcccatcgcagttccaacccattttcacaattttccgcccgtcaagaagacaatgcatacatagatagtgatattggcgccacataaactcaatatgttcccttatcgtccgtttgtaatctcagccatctgaaactcacatttgcattcacctgcaaacagtgcacttttctattactttcaggcgacacgttttccaatcacgcacaaaacccctgcaaaactggcactgcgcgagtgttaatccgaacccgaatctcgatctgaacccgaatcggaaactgctgcgactgcgacggcacgttgccagcacgtctgccagcgaacgactgaaaactgaagagtagaaacacagccagatagtcgccgaatgtcaggcgaatgcgaatgttgctgctgttgctgctagtgttgctgttactgtgttactgcagatgttgctgctgtctcttatcgcagacgctgctgtgtgctacttttactcttcgggagaaatgcgaagagtgacagaaagaaagagcaacagctgtggttcaattttctaaatgctctgtgttggaaagaagttatattaagtctgaaaaaacatataagctatcagtgatacacagattttatagactatgtgtttaagtaataataaggccaataatattaccagaacatattaaaatgttcttatattttaaaactaaacatattctaccaaaattaattttgattacttaaaagaaaatttatcttgctaagtctcagtatgtcaaatcgacttcgaattaagattttttaccaacaaattgctttcgattataacattaaattaagtggtaattatttaacccatgtcggatcaattttctaaattgcatatagggaacgttcataagagtacgtcaaattcgtattgaccccctgcgacttctgtgtgattttctctttgccggtcaattaccggctattgccaaaacgaagcccagtaggaaatttcttgccattttcgagtcggactccaagtaaggggagactgtcgacacgattgacgcttgactcttggccgccggcgtacaataaatcattgcagtcagttcaatacagcagatttaatcgctagacattgcagagaaaaaaaacgtttaatcattttaggaaaatattacaaataaaatattttaccgaaattacagaactttagaggtagagcataaaagtttgatctacatatacacttatataatatttaataataataataaattttttatcaattttattcacagttcttttcagtgtatttaaaaggaggtgtggtgagaaaaagt

SEQ ID NO: 32636 - DNA, 2111 bp, DROSOPHILA
gcagacgtgctggcaacgtgccgtcgcagtcgcagcagtttccgattcgggttcagatcgagattcgggttcggattaacactcgcgcagtgccagttttgcaggggttttgtgcgtgattggaaaacgtgtcgcctgaaagtaatagaaaagtgcactgtttgcaggtgaatgcaaatgttcaagagtgcggcgtgaatccgctggcggcaatagccaccaaccaattagaagataatctgaagctcgcatttctacgacttgttcttcgtgaagtgacccagaaaaactctgctgaatactaggtcatacagccaaaaacagaaaaacaaaaccgaagcaaaacaaaaacggaacaaatcggcatgaacttggaacaaaccgaatctgggcaattttaattgagccagcagagtcgcgagtgtttggttttctcatctggccagcaacttctcacctgatgacccaacatgaagggcatctgcggtgagcagctcaacaattgcatgctcctgggcgactgtgagaatagtgaacatggcacagaactgcccggtgattttatcggggagccagtggaaacggagtccggaggcggaatgggcggtagtctggccctagccgcccgtcgtatccgaagccgccaggtgcacagcatggccgtgcgaacgggtagtgcgtatgataccctggagcgaccatatcggcatgataaatgtcgtggtcgttgggccaaatcggcggacttttactttgccagctgcacacatgccttcagttcgctgatcttttcggagctctccacctttggaatacttcatggcggttggcttttgtttataatcgcctacctgatgggaatgctattttactcgctgccaatatttttgatccaagcctttttgggacagttttcaagttctggaaccatatcagcatttcgcgtggcgccaatatttaaaggcattggctacgccattctgctcctcaatctgggaacgctcacctattacagtatagcagctgtagtgcccctcatatataccgtgaattcaatacacccagtgataccctggatgagttgcaacaatagttggaatacccaggagtgttccttgcacgagaactacgacgtcgatttggatagctttgacagcattttggcaacggctcgcacggccctcctgatggccggcggagccttggggcccggttggggcagtatcataaccttgtctagctacaacaactttcgcagagatgccgaaagactgagtatctgggtgtgccttactcatattaccattgggttaatgggactgctctgctgcaatgtggcccacgatcactttgaggatcacgttggtatgatgccattacatgtggatgagaagcatcatatgcagtttctgtatctctgcttctcatacttgtttggacgttttacgacgactccaaatctctgggcatttctgttctttggcatgatatttttatcagaactatgtgccttgatcattcaaatgatgtccgttattactgccttgttcgatgagttcgagacattgcgttcaagaagaattctggtaatttcatcgctagtcttctgcctcacagcttcctctgtatatttttgtactcagttgggctttagtcagctgactcagctgccaaatttggcagtgtttacacacttgcttatttcgggaatccttgtgctgatgaccacttgggtttatggacgcgttcgtttccagtgcgacttgcagtttatgttaggcaaaacgatctcaagtttcaaaattttctttatacgctttgccacgcccatttttctgggactgtgtctgtttcaactaacctatttatttacgcgtgatcgcatacacgatgtcctgatttatgtgagtcagggcttgattctcctaacggccatatcttatatggtttacaaggtatgtcggacgaatggcgattggcgccagcgattgcaacagtgcctcgcaccacatgactggcatccggtggatgcggacaaccggcgattctacgaggaaatcatgggcatctcggagatgctggttatagatgccaatgccaacaccacatag

SEQ ID NO: 32637 - protein, 546 aa, DROSOPHILA
MKGICGEQLNNCMLLGDCENSEHGTELPGDFIGEPVETESGGGMGGSLALAARRIRSRQVHSMAVRTGSAYDTLERPYRHDKCRGRWAKSADFYFASCTHAFSSLIFSELSTFGILHGGWLLFIIAYLMGMLFYSLPIFLIQAFLGQFSSSGTISAFRVAPIFKGIGYAILLLNLGTLTYYSIAAVVPLIYTVNSIHPVIPWMSCNNSWNTQECSLHENYDVDLDSFDSILATARTALLMAGGALGPGWGSIITLSSYNNFRRDAERLSIWVCLTHITIGLMGLLCCNVAHDHFEDHVGMMPLHVDEKHHMQFLYLCFSYLFGRFTTTPNLWAFLFFGMIFLSELCALIIQMMSVITALFDEFETLRSRRILVISSLVFCLTASSVYFCTQLGFSQLTQLPNLAVFTHLLISGILVLMTTWVYGRVRFQCDLQFMLGKTISSFKIFFIRFATPIFLGLCLFQLTYLFTRDRIHDVLIYVSQGLILLTAISYMVYKVCRTNGDWRQRLQQCLAPHDWHPVDADNRRFYEEIMGISEMLVIDANANTT

SEQ ID NO: 32638 - DNA, 2889 bp, DROSOPHILA
gagaatctgcgaaagcgtttgaaggccatgctgaagaatgatcgctacgtggtgactctgaacataaccctggaggacctcctgcgtgctgataaagtgggcaaatggtggattgtgggctctgcctggacgggaaatctggatgagatgggatccgccaagcaaaagcaggataagaactcatcgaagtctgccaacggaggttttgcggatcagctactggagctggccagaaagcagcagatgaacacagccgaaaggaggaatatcttctgcatcatcatgagcgccgccgattatgtggacgcctttgagaagattctgcatttgtctctgaaggaccagcgagcggtggcctacgtgatcatccattgcgctctgaatgagaagcgtgctaacccctattacgctcatttggcacttaagttctgtcaattcaacagaaagtatcaactggctttccagtttgccagttgggacagaatcaatgatatcgaaaagctttccaagccgcagattcgcaacctggctagttttctgcagcaagtaatcctagctgctggtctgcagctgtcagtgctcaaagtagtcgactttatgcagctggacaagctcagcttttactttatgaaggaagtgatggtcaggctgcttttggctaacgatgaacgcgagatttatcagacgttcgaaagagttgccaaaaacaccaaactgcagcagtttaagcaaagcgtaaggctcttcctgcagcattttcttttgcaagaggaacagctggacaaacttaagctgaaggacgaggatcgacagcttctgcagcagcgcgttgatcacatagacaaacttttagcctatgtggacctgtagttataagttgtaaatttgtaaaatattcataatgaggatgctataaaacaaataaaggacaagtttttgtaaaataggaaggcatgtgtaatttattcctaaggcaaaaattaacaactaacataataaactagtcgaagctttggaggagatcgcgtgcccgccggtactgcgtggactcgattagctttcgcctttccgcctcgtcctccagcttttcgccctccttgtccagtttctggatcacctcctcggccaactgactgatctttgagcgcgctgctccctgggaactggccaaatactccagagcagttggccacagctcgtcatccagtttctccacatcaaaggcggtttgttgtatggaaatctgtcgcagtttgttgaacttccaatcctggcgggattccttccattttagaagatattccttgttgactttggcatctttgttggagctctgactcttttgggcctcgaggcgctgctggtgcttctgtttcttcttttggcgcactgtaaccactgcataagcgttctccggacgagctgcttcttttagttgcgctgctgtgggctgggagtccacatcgtcgtcttcatccgagttattttcctgcgttttgctgcgtttcagctttttggtttcgttggcatcctggacttgttttctcttctgaggcttctgaggaagactttcatcgcttccactggtggccacctgctcctccgcttggtttttcctgctttgtttcttagtggccgatacttctgattctttatgccgcctcttggcgggtttatctgtaaatgttggacatgttacacaaagccgatatagatttgagctgaaacacacctgttggaacctcctgttgatctacctgtggagctagaattagacttttgttggccacctcgtcgtcgctggccgcatgctcagggttcttagtcacctcgtgcttgcgttttttgccctggcgcttgacctttttctccagttcagtgcgggccattttagaagcgtgtcgtttaaaaattaactttgtacaccaaggttattcaaaagaaaatttaaaaaacttctttagttacaaacaaaatgtgtttctgtctggcgttgccaagctgggcctgaataccgctgttagccaacactgaaaagtgggctgctttcgcagtctggcaccagactcaccatatgactaaccacaatcaatctggcaacggcgccaaacaaatgccaaatcttagctttcgtttaacaataaataatcaaaacaaaataagcaagctataaatcataaaaagtgcatttcgcgtgtgtatgggcagcgcctatgccatcccaccgtctctttttaaacgaaatcgcgccaaaatcaacgaaatacgtgtcgtcctaaaggcgcgtaaataaaaccggtgtgatagttgtgattaattaatgtaagagtgattaagtagttaactaagctttgattaaggtatagagcggtattagccatattacaggtaagtctattgcgaatttgtacatataccattttcaatccgcggcggcaacaacaaatccagccggcaaaatgcaactgtttacttgcgcgtgtgtttgtgttttcggcagtgcgtgcgcgtatgtgtgtgtcaccggcaaataaatatgaaaattcctgtttatcggttttaaaacgacgaggaaatatccaaatgtaaatttaaaagcaaggaaaggcgacatattgatgaaagcaaaggcgggtgtcctgcaacagctgttgtttgcttggtggagtggtcgcaaggtcctgcgttccggctgcatttttcaaggtacgtacaagtgtgggtgtaagtcgccatcaaaacttaccgttataagttaagcaattacacgttttaccgcattaactttgatttgcgagggcggattatcatgttttcaaatatacattccaaaagaaattaattgttaatgaatgcttgtcgaacaaaaaatatctttaggtgggcaga

SEQ ID NO: 32639 - DNA, 834 bp, DROSOPHILA
atggcccgcactgaactggagaaaaaggtcaagcgccagggcaaaaaacgcaagcacgaggtgactaagaaccctgagcatgcggccagcgacgacgaggtggccaacaaaagtctaattctagctccacaggtagatcaacaggaggttccaacagataaacccgccaagaggcggcataaagaatcagaagtatcggccactaagaaacaaagcaggaaaaaccaagcggaggagcaggtggccaccagtggaagcgatgaaagtcttcctcagaagcctcagaagagaaaacaagtccaggatgccaacgaaaccaaaaagctgaaacgcagcaaaacgcaggaaaataactcggatgaagacgacgatgtggactcccagcccacagcagcgcaactaaaagaagcagctcgtccggagaacgcttatgcagtggttacagtgcgccaaaagaagaaacagaagcaccagcagcgcctcgaggcccaaaagagtcagagctccaacaaagatgccaaagtcaacaaggaatatcttctaaaatggaaggaatcccgccaggattggaagttcaacaaactgcgacagatttccatacaacaaaccgcctttgatgtggagaaactggatgacgagctgtggccaactgctctggagtatttggccagttcccagggagcagcgcgctcaaagatcagtcagttggccgaggaggtgatccagaaactggacaaggagggcgaaaagctggaggacgaggcggaaaggcgaaagctaatcgagtccacgcagtaccggcgggcacgcgatctcctccaaagcttcgactag

SEQ ID NO: 32640 - protein, 277 aa, DROSOPHILA
MARTELEKKVKRQGKKRKHEVTKNPEHAASDDEVANKSLILAPQVDQQEVPTDKPAKRRHKESEVSATKKQSRKNQAEEQVATSGSDESLPQKPQKRKQVQDANETKKLKRSKTQENNSDEDDDVDSQPTAAQLKEAARPENAYAVVTVRQKKKQKHQQRLEAQKSQSSNKDAKVNKEYLLKWKESRQDWKFNKLRQISIQQTAFDVEKLDDELWPTALEYLASSQGAARSKISQLAEEVIQKLDKEGEKLEDEAERRKLIESTQYRRARDLLQSFD

SEQ ID NO: 32641 - DNA, 3456 bp, DROSOPHILA
aggaggggtcgcccaaagtttaattaacttttttagcacaattgctaaacatgttctcgcggctgcagccatttttaagcccggagtggtaattttatttaattacttaggctttaaggtgggtatatgtaaaaaataaagaactctacaagtaacgagcaaacacatacataacaacttgttttcgatttgttaaacaaactaacgattcaacgccttcgcgcattcaccccagggaatgattaatcgtgagtaaatatcccactttattagggaactttctcgagccaaactctgcttaaccccatcgaagtcgtcccaccctaagcccacgcaatcacccataagctgccgtgttcttttggcccactgtcaagtgactccaaatggcagcagcggcttttgacagctgcaagcccggagctccgacggtattacaactgacagctggcgtctgatgcggtttatgttaaaaggcgcaccattcagccattcgccagccaagcccacacatgtgcgcactcacaccgcgaatttatgtttatgttaacaaagtcgagccattcaagtggcaagccaaaacaagacagccccgaatgggctgaaaccacataacagccgaaaaccccacacccattcatgtacccgacagccaccagctccatccaatccacctgccctcagatgagatgcagtcatgtgcacaatgccgaaaacattgtaaccgagcgcgaggttcagagataacagcgacaactgctgctccttcttgatgacgacacactcaaaaaacagggcttctaaagtatatttaccaaaaatcttgttttataaatgggatttctttatttgtacgcgaaatctttaggtttatgctaaaacaaacatacttgctgaggcgcgaattctttagaattgacagtttgttcgcttgacggtttagaaaatacaatggacacaaaatctaaggttaaaatacaactacaaattaccgaaccacttattctgtctttggcggggtctcttcatttggtggagcctcctcctcgtcagctatacttccgaccaggcttccttgggtttttctcttgctagcctccgcggcatactcaccaaatgtgagatttatgtcgtacggagtgcgccggaagatgttcggaggagtgtagttgctctgtatgggccagaagagaccgtcctcgtcgggggagaagggtacccggccgtagagccaggcgaactctcccaactcgtagtagaatcgtgtggatgccaaaaccagttcgatgcgctggatctcgggcaggtgcttccggaacacctccaccggcaagtgttcgcttaggattgagctcttggactttgactttggcatatcgtcctccatgtcgctttctcgcgtggagatcccgtccggatccacttgctgaccctccgagagcagccggcagatggtcagcagcttatccttgatgatcagatgctgttttcccatgagatactcatcggtgggcgtggaggtggggaacttctcgttcagaaagacggaagggatgcggcgaaacataagttcttttgtatagagctcctgcacgtgatcctcgatctggaagacgcgattcatcaaccagaaagtctcacagcaatcggccagggcccgtgtgaagcatccgatcatgtcctcggaggactccagcatcagcatgctgtattcgcccatgtggagaaacaatccgcacatgggatccggcgtgatggccagcgccttgcactgcttatgcagctcctgcaggcgctcgctgaagatggcaaagaagtccttgggctgatcgggtgcttgggtgtccatttccagttcctcctcttcgacaaagtcttcttctggatcgtcttcactgaaacggaacatgtgggtaactacttctgcagtttccgtcgcaccttcttccggtgcaggaatgggcgctggatccgccgtcgtgttcatgggcgattccgtttcagtgttgtcgaagatcacatcctccatgaactgtatgggcgccgcttcatctggttcaggctcagcctgttccaccaccgcgtcggcgagcaactcctcgttggacacaactggcgtcaagtggcagttcttggccaggataaagatgcgctgatagaacacggaggtgtccatgtccgctagctccatgtccacgtactccaccaacgacttgcgcacctggaaggtaatgggtctcttcaaattgaaaatggtgtgccgggtcatcctggtcgtccgcgactgccgctggcgggcggctatggaagcttgtttgacattgatccggtgaaaggacatcttggcggggtgtgactgctcctgtcgggggtcgagaacacactcccagggtcaccggggtctaccaggaatatcgataaagctgttgtttctggaaattttgatgttgtctagcaactaagcggttgcttagactgttatcgcttacgttgcttttttgctctggaatgaatagaagaaatcaataaataaataaatagaatcaaggaactgccaccaatttaagtcccactaactccctcttgtatctttaaaattttaggaaaataactccttttgaaaaatgaatgatcgtaaattacaatcttatcacatttttctctcagtgccgactcatacacagcacactcttgcttgtttaatgtacatgtacagcgttattacctaaccattgtgcaagtacttgggtcgctgcttcaattattattatcattcgtttgaaatctaaggctctgctcagccactcgcctttgttttgctcggcttttagtttagcttggcttttgcttttcagcgagttaatttattcatggcgcatttatgagcatagtgatttccggcagcacctacacttgccacccaccaacatcccgcccgcaacatccgacatccagcaacaaccttagacgaggacgaaaagggaaaacttcttcatcaggagcccaactcgtccttcgagttttcctgctctctctctctctttgaacaatttgaaacacttgggcatacaatatgttgaaatgataatgaggcgaaattgttttttgactcgctcccaggtgtttctgtttctctttccgccccacctggcttcaaaggatgtctgagctgtgctgattatccttacccgccaggattcgcctgagtggcctcgcccgttttggccgtttagtttattgactccaaaagttgcgtagcaatttgccgcaatgttttaataaccaagtggtttcgttttccggactaataagatggagtttttaagagctcatcagatgtgcttaagaactttattctagaatcaacgaattttattataaaatgcatatgcaagtgaagttagaagttcaaatagtaaccttaatttaattcgcttggcggtgagctctgtagcc

SEQ ID NO: 32642 - DNA, 1456 bp, DROSOPHILA
gctagacaacatcaaaatttccagaaacaacagctttatcgatattcctggtagaccccggtgaccctgggagtgtgttctcgacccccgacaggagcagtcacaccccgccaagatgtcctttcaccggatcaatgtcaaacaagcttccatagccgcccgccagcggcagtcgcggacgaccaggatgacccggcacaccattttcaatttgaagagacccattaccttccaggtgcgcaagtcgttggtggagtacgtggacatggagctagcggacatggacacctccgtgttctatcagcgcatctttatcctggccaagaactgccacttgacgccagttgtgtccaacgaggagttgctcgccgacgcggtggtggaacaggctgagcctgaaccagatgaagcggcgcccatacagttcatggaggatgtgatcttcgacaacactgaaacggaatcgcccatgaacacgacggcggatccagcgcccattcctgcaccggaagaaggtgcgacggaaactgcagaagtagttacccacatgttccgtttcagtgaagacgatccagaagaagactttgtcgaagaggaggaactggaaatggacacccaagcacccgatcagcccaaggacttctttgccatcttcagcgagcgcctgcaggagctgcataagcagtgcaaggcgctggccatcacgccggatcccatgtgcggattgtttctccacatgggcgaatacagcatgctgatgctggagtcctccgaggacatgatcggatgcttcacacgggccctggccgattgctgtgagactttctggttgatgaatcgcgtcttccagatcgaggatcacgtgcaggagctctatacaaaagaacttatgtttcgccgcatcccttccgtctttctgaacgagaagttccccacctccacgcccaccgatgagtatctcatgggaaaacagcatctgatcatcaaggataagctgctgaccatctgccggctgctctcggagggtcagcaagtggatccggacgggatctccacgcgagaaagcgacatggaggacgatatgccaaagtcaaagtccaagagctcaatcctaagcgaacacttgccggtggaggtgttccggaagcacctgcccgagatccagcgcatcgaactggttttggcatccacacgattctactacgagttgggagagttcgcctggctctacggccgggtacccttctcccccgacgaggacggtctcttctggcccatacagagcaactacactcctccgaacatcttccggcgcactccgtacgacataaatctcacatttggtgagtatgccgcggaggctagcaagagaaaaacccaaggaagcctggtcggaagtatagctgacgaggaggaggctccaccaaatgaagagaccccgccaaagacagaataa

SEQ ID NO: 32643 - protein, 446 aa, DROSOPHILA
MSFHRINVKQASIAARQRQSRTTRMTRHTIFNLKRPITFQVRKSLVEYVDMELADMDTSVFYQRIFILAKNCHLTPVVSNEELLADAVVEQAEPEPDEAAPIQFMEDVIFDNTETESPMNTTADPAPIPAPEEGATETAEVVTHMFRFSEDDPEEDFVEEEELEMDTQAPDQPKDFFAIFSERLQELHKQCKALAITPDPMCGLFLHMGEYSMLMLESSEDMIGCFTRALADCCETFWLMNRVFQIEDHVQELYTKELMFRRIPSVFLNEKFPTSTPTDEYLMGKQHLIIKDKLLTICRLLSEGQQVDPDGISTRESDMEDDMPKSKSKSSILSEHLPVEVFRKHLPEIQRIELVLASTRFYYELGEFAWLYGRVPFSPDEDGLFWPIQSNYTPPNIFRRTPYDINLTFGEYAAEASKRKTQGSLVGSIADEEEAPPNEETPPKTE

SEQ ID NO: 32644 - DNA, 3199 bp, DROSOPHILA
atggagctacttaatatgggccaatcaaaacaaatgacaagaaaattatgcgataccaatgtttaaaattcaacaacttcctgggtaacaacaaagtgtttaaattaataaatgccactccggtttccacacccacttaataatcgcattttcccgcatttcgttactaggcgtcgccctaaaggtaggcaacgaaaatccactccgcctgctggaaaatacattttcaatgaagcagtctacttttccaatgacaaaaaagtttcgctggaatttttggaatttaatttgcatacatttggttggctgattacaagctatagctcggattctgaactatttaagcttgccatacttttgagttccatttcaaggactacctatcatttctattggcattggatgctgcttaattttttttttttttgttccatggcatcgatatctgtggcatcgactgcgctaattgttctaatgcgctcaagctgtaagctgcttaaaattgcttaaattgcaagttgaataacagcagggggggagtaggaaactctctaacaagaacctgaatggaggaaatatatattcgcatatatgccttctgagccattggcgtcactaaggaaataatctacaattacgcagcagttggagaaattggcagcgattattgaacacttagtgtaagtaggtaggggaaacaaggtttgcaatttaaagacgagtccttttaatttaaagacgtcaaggatttgccatgcgaaaagtttaaaaacttatttgaaagccgctatttggagtcttgttttattgatttcattagtagttattagtagctatacctgagctgtaataccatagccttaaaaaattgttgagatatatatatgtttgtacgatttaacgtaaacaatgcattatatatgctctagatattcctatgaagctatcttattagtatataatattgaattttataccatagggattcataaagaatacatcacagcttgctcttagcgtgtgtgctccttttaaagaatctttcttgctgtcgccgcttttcctcggcacttaggtgctcctccttgccactcaaggaccaagaagtgagtgccgggggtcggtggtgtcggatgaagggcactatgtatcgggcacactcctcggcagcatgaagatgaacgtggtgggtacctccctccacctcgtagaactcgaagtgcggattgttttgacgtaagatggcaaccgccttctcggttctagcttccacaaaatcagactttgaccctttaatgatcaaacagggtattctccgaattcgcttcaccaacgcctcaccaaattcgggttccatttgcaaatggctgtagtatttaactcgtccatctctggagaagaagaatctgtctggatagagttgcgacttcgacacctgccggtgaagcaagtgttgggcaaactctggcgtcaccgagttgtcacttcctttggcgaggacctgtgtcagctgtgcgagggtgtaggagggaggctcgtgcaggtttccctccacctgacgttcctcttccaccaggtgcttatccaaactgtggttcaaatatttaataaccgttttggggtcctttgacaagggcagcaatatgtccagtgagatgaccatgtccactgtatctggtgccaaagatgtgtaaacgaagctaatgatgccacccaatgagtggcccatcaatgagacctttgaccagccgtattccttcatcactcgaggaatgattaacacgtaatcgttgacggcgtagtgcattccaggctgaatgtgagcggatcttccatgtccgggaagatcgatgcacaacacgcctatgtagtcgggaagcaggggaatcagccgatcgaaggttcccagattgtccagccatccgtgaatcgccaggatcggtcgctccgttcgattaccataccaacgaccggagatgtgaccccaaggtgccggtattctaacctccttgaactacaaaatagcaatactggttactatgttcattaaaatcagtatgaattaaagtttttttttttactatacactttcagtttctgcactgtaaacaaaatttgccggtacacggattaaggttgcttatcttcgtatttcgtctataatattatttctggcatactcacatcgcttagagacatagttcccatatcgattagtggtttgctgacctttgcacgtctgtaaattggtccgaaatccagaaatgaaggcaccgcgttatcttaagtatctaaacacctgcaaataactcggcgattcggcgattcgcacctctttcggctacaacagctgatcaacgactaatttctaaaattgttgtttcacttttgaaagcgaacgaaagagaaaaaacgccgatagaaagagtagctgtttttggcgcggaaacaaatcaccaactataagagagcgaagaatttgtttttcaaatagctgattaaaagtattaccaatttttagcattgtttacattcgcgtttgtctatttaaatgttgatatattttttgtgtattaatacgagctcgttgaatacctattctttcgaaattcgtaaaaatattttaaaattgtagctggcactatgataatagccaaagttcactgaaaaagcatagcgagggtggtatggtcccattgttcttatctcctattgttatgattttatttatttgcttactcattcgcctaatgacacagatctcaaaagacgatagccctttgcactttgattcttagactgggtccagtccacttccaaaattatcttaagtatcaaaaacatattgtttaatatgatagtttaaatttaatacttgtcgtgtgttcacgttctcaaactttaaaacctttacaactaaagttacagtgtattattatcacaacttgctgcgctttttgttggtccatgtgaaaaatcgctttggttttctcgatctatcttcctttccggccacagtccaggaggtcatagcaggaggtctgtgatgttggatgaagggcacaatgtaaccggcgcattcctcggcggcatggagatgcagatgatgggtgccgttttccacctcgtagaactcaaagtgcggattatccttggccaaaatcgatatagcctcgttgttgcggacggagagatatgg

SEQ ID NO: 32645 - DNA, 1029 bp, DROSOPHILA
atgtctctaagcgatttcaaggaggttagaataccggcaccttggggtcacatctccggtcgttggtatggtaatcgaacggagcgaccgatcctggcgattcacggatggctggacaatctgggaaccttcgatcggctgattcccctgcttcccgactacataggcgtgttgtgcatcgatcttcccggacatggaagatccgctcacattcagcctggaatgcactacgccgtcaacgattacgtgttaatcattcctcgagtgatgaaggaatacggctggtcaaaggtctcattgatgggccactcattgggtggcatcattagcttcgtttacacatctttggcaccagatacagtggacatggtcatctcactggacatattgctgcccttgtcaaaggaccccaaaacggttattaaatatttgaaccacagtttggataagcacctggtggaagaggaacgtcaggtggagggaaacctgcacgagcctccctcctacaccctcgcacagctgacacaggtcctcgccaaaggaagtgacaactcggtgacgccagagtttgcccaacacttgcttcaccggcaggtgtcgaagtcgcaactctatccagacagattcttcttctccagagatggacgagttaaatactacagccatttgcaaatggaacccgaatttggtgaggcgttggtgaagcgaattcggagaataccctgtttgatcattaaagggtcaaagtctgattttgtggaagctagaaccgagaaggcggttgccatcttacgtcaaaacaatccgcacttcgagttctacgaggtggagggaggtacccaccacgttcatcttcatgctgccgaggagtgtgcccgatacatagtgcccttcatccgacaccaccgacccccggcactcacttcttggtccttgagtggcaaggaggagcacctaagtgccgaggaaaagcggcgacagcaagaaagattctttaaaaggagcacacacgctaagagcaagctgtga

SEQ ID NO: 32646 - protein, 342 aa, DROSOPHILA
MSLSDFKEVRIPAPWGHISGRWYGNRTERPILAIHGWLDNLGTFDRLIPLLPDYIGVLCIDLPGHGRSAHIQPGMHYAVNDYVLIIPRVMKEYGWSKVSLMGHSLGGIISFVYTSLAPDTVDMVISLDILLPLSKDPKTVIKYLNHSLDKHLVEEERQVEGNLHEPPSYTLAQLTQVLAKGSDNSVTPEFAQHLLHRQVSKSQLYPDRFFFSRDGRVKYYSHLQMEPEFGEALVKRIRRIPCLIIKGSKSDFVEARTEKAVAILRQNNPHFEFYEVEGGTHHVHLHAAEECARYIVPFIRHHRPPALTSWSLSGKEEHLSAEEKRRQQERFFKRSTHAKSKL

SEQ ID NO: 32647 - DNA, 2378 bp, DROSOPHILA
agcagctgcgcctaattgtcgaaagtatctggcagatacatttctttttgtcacgtttagttggcttttgtgtctttgctctgatgtcagacaaccttgaaccttttgtggcgtttgtttttctgctgccgtttttcaaatatttataaccgctatcaacaacttttgctttcgttgttcgagtgctaattggcgcggaaatcgctggaagccggtttaaacaatcgaaaattgtaagccagttttgggcattagaagttcatgaatttttcagtgctaaagtcacatagttttgcctcagatccgaaggggctagctatgggataattatagaaatttatcaattaatgtcgaccgattggtagtgaacatttgcttggttggaggctgggccatttaataatagtcgaacgttgttttatagtgataaattgattgaaaaatgatttgataacaatctgagataatgtatctattgaactattttctttgctttacatctctcagactgtttttgccccactacgcaaaatgaaaaaaatgtaaatatataattgcactgtcattaataatgaacaaagattatgtcgtcattcaaatgataagctcatttatattgaaaaaaaaggttaatatatttagactggcttaattggttgttatggatttttatagcttcacataaaactgagtcgaatgcaacttttttcataagatgtttcaatgaccacagcttatcctagatgtttccccgtgttttcgaaacctgactgcacttctagatttatgatttattcaagatctcccaatgccccgtcccaaatctcttttgaagtcctcccagatcgccttccgcataaatttccgcgcacttcaagagctttctccgaacacttctcccgtatctagataaatgtttcttcatgtttgtttcccatttcttggcctttttgctgtgtgttttttgtttggattcgtttcgttttttagtttactatttttattgtttgcggggtacaagagtacaactcacttgtaggagcgctatcaccagctggatgggtccgcatcggacgacaacggtgccaatggtggtggctctcagggaggaggaggatggtggtgtggtgtgggtggtgccggtgccggtgcccgtgcccgtggacatggctgtggacatggcctgacttggagtcggcgacgatgatgacattgttgctgaataattgaaggcgtctagctgggactgctgagattgctgggattgctgcgtctgaagttggtggccggtgtgcggctggcggggattgggattcgaggaggaggcgaccgagtagagcgaagacatcgatgagtctagggcttggcggcgttccatggttgcttttctttctatctgctcgtctctacttctctctgttttctttttttttgactaactttcgaggattgagtgagtgcttgtagtttggtgtgttttgcgtgggcgttttataatctctgtcgtttagtttttctcgtattttggcttacttcccctgcttgtgtctcgtgttttgcattttgaactctgctcgaaaaagtggaactattagattgagtcactcgcgttcggatttaatttattgggattagttatagccaggggattcgattcggcggttccttcgtttcgttgcgagcgctatcaacgccggcgatcgtctgagaacctccgcgaatcggtagattttcgaaacggagaattctttttgcccgccgcgatgactatgacttcatactcgcgctctccctgtcgctctagtgtctgtttattattccgtagtgtctatatatacggctatatagccgagagaatcgtgtgtactttttgcatattgagcctgagaaaattgcctttgatgcgtgtgctagtctcgttgtagaacctcggtagccccccgccccgccaaaactcaaagacaatgctcgattcgcgtttatttttaaaacaacaaactattgagtaattttttgcggcgatttctgccacgaagctaaactgttgttctagcccagatactcagatactgcgatgctacagatacaggctactatagctaatagataaagcgcgcggatgttcgtcaaatctgtaacatgtgccaattgcattggcagaagtcgtcgccagtcagtcatttttcatggatttttcgatatttttgaatacattacgcatacgccgcgtatgctcgtgtgcagccagctgcctccattaggtaatttttggtgtttctctcaatttttaatagtcgccgccgttgctggcgtaatgtaaactattttaattgtactttgcgctgtctaaaaataagcagcaaaccaaaaattgggaa

SEQ ID NO: 32648 - DNA, 378 bp, DROSOPHILA
atggaacgccgccaagccctagactcatcgatgtcttcgctctactcggtcgcctcctcctcgaatcccaatccccgccagccgcacaccggccaccaacttcagacgcagcaatcccagcaatctcagcagtcccagctagacgccttcaattattcagcaacaatgtcatcatcgtcgccgactccaagtcaggccatgtccacagccatgtccacgggcacgggcaccggcaccggcaccacccacaccacaccaccatcctcctcctccctgagagccaccaccattggcaccgttgtcgtccgatgcggacccatccagctggtgatagcgctcctacaagtgagttgtactcttgtaccccgcaaacaataa

SEQ ID NO: 32649 - protein, 125 aa, DROSOPHILA
MERRQALDSSMSSLYSVASSSNPNPRQPHTGHQLQTQQSQQSQQSQLDAFNYSATMSSSSPTPSQAMSTAMSTGTGTGTGTTHTTPPSSSSLRATTIGTVVVRCGPIQLVIALLQVSCTLVPRKQ

SEQ ID NO: 32650 - DNA, 8777 bp, DROSOPHILA
cctaaagtcagacatattatttttctttgggttaatcccctaacctattttcgcgatactagaatatcactccctcggtagattttgccgtgttgacgatcgatataatcatgccctacctctctacaaggacggactgaaagatattttgtatctgtgtatccataagactgccaggcacgagacatcataaagtacacaaagcaaaaagagtgacattgatgcgtcgcgacatttaaatatgcagcctgtctacctgaccaaaaaccaaaggaaatacaagcaaactcacagatagacaaaaccgacaaactgacggacaaagcgggcagctagacgaagtcttgcgcttgattgaatgtctgcgacaagctgcaaaattcttcactcgctcgctaaacagatatgggcaaaagatgcattgtcagccgaggatgaggaagtcgctcagctaaatgtggctatcatttaccagacgttgagatactttgctcgagatacttcgcttgagatactcttggctagctacctgcgcaccgccttttgcgcatgcgtgcaatagtcacaccaatccccataacaataacagacttgttacgctttgttctttgacggtcggaagatagagccatggtttgtgtatatacacatatatatcttgtatctgacaaataccgctgctacctggcgcaaatgtgcgaattttgcagcgctctcttttcgcttttgagtgaattcgctgctcggcggagtgactttgttgctgttctctgtgtatctgcaagataccaagcggcaaaacccaaataataaaaacaaaaacaacaacaacaacgaaaatcaacaaaaacaaataaccgacaaaaaagcagctccgtgggtttccacagtgtttgctgggcgagccggcggcagttgccgagcgtgtttgctgccgtctagccgtgccgcatttagcggaactctcgagagttgtatctttgtatctgcgatctgtcgaatggatatctcgtttcacagcgactgtattttgtttcggtgttctgatacttctgctgcagcgtgtttattgcgtgtttatttccgtgtaactaaattaatttagaaaacggcttatgttgggagttttgagccaacaaatataataacgtaatccaaccgcctccgcagattcataacgcgcaccacgcgttccgccagtcgccagagttccgccggacactccccacctccgccgctgcatcgcagtgacgactcctccagcagttcaccctcaccgacacgcagacggaataagccaggtggtgctcctgccgccacagatccaccatcatcgtcggcgaacgggaatagttccgcttatgagacggcagccaccactgtgatgacccatgaccagcagcgagatcctccagttgaagttcctaaggctctaaacgtcgagccaccgcagccagaagacatcgtcctgggctcctgccccactgcatctgcccactcaggtgagtccttgagtccctaatctgtatctgtgtttcgttgttgcttgcgtgacgtctctgtgttgcctgtttgtgtttcgagtttcagttcgtccatgagcgttttgttatgtccttgctaccccgcttactgatcctttgcttccaaactgcagttttccacattcatggccttggcagagttctttattatccttgagaaactctctttccgcttactccacgcatcctgttcaaatttcattgttaggaggagaatcccatttaccttttatatccatagcaacatatagatctcttttatcgcttttcacttgggatattaatatcaaattaccctttttgtgctccatttatcattataaatttgtagatcaacaccaatcaaattgtagttatatgatcgtaatttccttcttaattactgcttagatattggtacaggttaattacacagttcagtagatcattaaattaggccacgcatttggtctatatgtaatcatatttaagcctttcatcattcctagccatccatttgtcaaggctcacatatgactaatgatgcatttagttattggattataacattataagacgatcctttagtatcaaaatctatacaaatcatttcttctctgctggctggctattatttgccttgatcgttttctgatctcacacttcaatttaccttcgcttaccccactttgcgaacattacaaattcattagttctttggtgaaactttcccaaccaaagttcggtaattagcccgccccatgccgatttagccctgaaccgtgagcctgtcaacgtttttctgcaaattagccgagaaataaagccaaaaactccatcatcggaagaggcgagtcgccgcgtggcttcgtttctgtttcttttgcttgaaacacttaaaagcaatttaaactaaattagatttttgtcggcttgccaatcaagcgaaaacgttttctagacaaatgttaatttggctcatgagaccttcggtcaaaacatttaaatcaaattgcaattgagcaattcgattcaagtcgtcgaatcaattccaaaatgttttgactgccgaggtttctcgattgtcagaaaagtctaacattccgaattattatataagataatttgcgcaatttttattcgcattatgagtgtcagagtttctcaagaaatgtttttttttcgcaaactccccactgtataaatgaataaaattgtttgtcatttgataaaatcgatgttcagtcttcacgcaacttaggcaaatgaaagatgccataaaattgctaatagaccccaacccaaaccgacgacgagagctgtgcccaattttcattttatttatcaatgaatgaatcggacggatcggatcggatcggcttggaaccgggtttattatcaatgactggacgagggtttcataaatttttgacagtcgtctctgtgtgtctggcataacggattgagaaagtccgcccgaagatcgttgacatagatccgatgattatgggaagtttccgtttaatcgaaaagatttagtaagcatttgcgaccacacagaacgtgcagctgctaaaaaaatcaataaacaactatgatgatgatgatgatgatcgactatgatcgatcagccgtatcgatttcgtttcaattgttttcggcctttgttttgccactgcgcgtattgatttcaatatttaccaatttggcaatttttttttattcattttatgtggaattaatttgattttcgcgagctgtctagagggccaacgatcgcccggaaagtttagagcgttcactgatctctgacagccagcagaaggcaatgaacgggcggaacccggagatgctggcagatgatttgccgaaaaatgtttttcgcccctttctttttgcccgtcttctgggtggattatgaaatcgttggggttttacataagccaccactttgggggccaaaacatcaaagttgaaatggattattacagtgcttccagctgtttttgtttgcaaagaatctattgggaaatcacagattcctcatcaagtgaatgtccagacttgagataatactttttatggtattttcgattcgaaaccattacacaaagttcccacactcaccacttcagcgagtcataaattctggtttatttgtgaacgaaatctaatcgctggacgataatctaatcgctggctctgtcagtttaatgtccaataaagtgagcaaagctaatacatcatcgttaaataaatagatacctaatgacctaagatcgactcgaaaactttcgtttggcgcctaatgcatttcttttgtcccagagactttcgcaactatttcgtgtttgtcaccacaccaatcaatctttgccagctagccattagattggagccgagttttttttcccccagacacccatatttgcattatgcaatccaaaaccaaaacaacaacagcaacagcagcaaccacaacaagcagcaatcataagctttaatgtctcactaaaactccacgcattttaccctcctaaaaaataataacaacaacaaaaaaaaacacatcaaaatgctacagcagagagccaaagtcgaggaaaagctggcaaatgcagtattaattgcacctacagccacagccacagcaccaacaacaactgcaacgcgcgacaacgcaacagcagcaacatcagcagcaacaacaccatcagcagcaacagcagcagcagcaaaagcacttgcaacaacaatagcaaacagcaacacgccacgcccatgccgcccctagctaatgccaacaaagccccgttaattgtgcttaagacagccgcatctgcagcagcattgccgtccattgccgcagcagcaacatccagcggcacggcagcaacatctggtggtgttggttcgcccatcaagcgtcgcaagaatccgctgtcgccgctgctcctcggcagccagtgccagtccaccattgcgcctccgcaggccattgccagtccgctcctgagcggcggcagctgctcctcctcgaccacctcgccccaatcctcgccagcggttcgcaccaccaaggcgagtcgtctgcgcgccgccgcgcttggtgagtctcctcctcctcctaacagcccatcttcatccccgaattggtggaggtcatcaggttttccatctgtccaaatccattacccccgtagcctaagcactgtagtttgttttttgtgcattaatgttttttggtaattcacaaactttctcatgcaagcaaacctccataaacaaaggtttaaaatcacttcatatattttatattcgattttatatatgaaaatgtgtataatcacaatttttaagattaaatttgtatttaataacaatatcagatttcaattcatgttataaccaactctcggttgaaattcgtaatagttattttagagaatggttgtacgttttcctctgtgttgccatgcctgcatttcatcatcctcaatatcgtgtgcgtttcccctttttctaacccaacccgtagataaaaagaaggaagaggagcaacgcaatcgctacagttcgcccgtttcaccaaaagcctccagcaacggcggagtccaagcacaacgtcgtcttagcaactcggagctatcgcccaagtcgccaggtgccagtggattcacttcggagccagtcgcgtcagccacagcgaacagagtcccgacgagatctgcctcccatcctgtggacacaccgcccacacaaaggcgacagcctctggtggccgtgagttcgggcatctccatgaagcagagtctcagcgagctgcacttcacgggtggagcagtcagtccgcccaaggctacggcggaatgcactctaaggatgcgaccacgtagctccacgatgagcaccgagaacacggagaatggccgacgtgaccacttggctaatctgcaactaagtcctgtgcaaaagcaaaagcgaacggtaagcggaaactgaaattttcatgaaatgaaaccacattagagattaaagagtctagttagaaaccagacgttctaaagtggttttgtctcctgaaatttaattctcggtaattgcttatattgtattaatccatctatattttatagcccgaagtatcaccacgccgtttcggagatcgcgacaagtcggccaaacggaaatcgaatttgaatcgttcgttgaccgaggaagccaccaaggatggcggtaagttggctggcaacagcaaacggatgcagtgcagcaacagcaaacagcaaggggagatgatcagcggggcaccaaatttggaacgccttcaagcttgaataggcatttcaatgaggccgcagcaaagagaagagacctcactaagattcattcgatcttcgagcgtcatgtggcaaccaccgcctcagaataatacgtattttaaataccactttcaacattttcatttaaatcattttgtgctgcctccagaaagcttttccaccgaaagaacttgtgtaaaatatgttaaaatccaagctgtgccgagtccctacttattgttatgcacgtgttatgtccagaatctgcttatttagctcttaagttcccataagtggttactaattccctgatcttctcttgcagatgaggttgcctcttcgacccgccggcgccgacgtcgtgaactgggaatggctcgtcccctggttccgggcgatgatgacgccctaagagatttgctaacgccgcagaagagttcctgcagcgagtcaaccaactccatatccgaaccccatctccagttcataccagccgttcgtcatccggtggttccagtacgcaccatgactgctgtgctgcctgcaccacgaccgctgcatactcctgcggcccgcaacgtcagccagaagttcaatgaaaggaccaaaacagatctggccgagatcaagaagattgctgagcaatcggaggcgcaggtgcaacagccttcggtggatgataaccagaaaatgtcagccataatgcgcaggaagagcacggatgagggtggatcagctttgggggcaacaaaccagaattcaccacctgccccaaaccaaattgtatccatactgaagaagaaggaacatggacttggcgagtgcaactccagtgcttcaagcaatccctcgccggtgaccttctcttctagcgtggtggatcatcctttggctggagctggccggtgcaaacggcagggaatactcaagaagagatcgagtctagatgaatcgcgctactactcccgatcgcattcacccgacgaacgtagtattctcattaagtcggccaggaggaattccctggaggaagctggcactggattgagtccggctcaggcccatggaatcctcaagcagagcagctacgacagcagcaagagcgacggctgcccttcggccacggagagccagccacacagtatcctgaaaaagaaggattcgctatcgacaccttcggacggaggatgccacaagcatgtctctatatcgcaagctgtaactttagctgctgctgaactggctgcccatgatggaatcaccttcgatgatggtgaggagcatgagatacgaccgatcctaaagcaggagagcacctccagcgaggaggctgtgcgtccgccaaagcccatactcaaaaagaaatcctttggcgaggcggatgaacacgaaatacgtcctatattgaagagctctcgtaaaagcagtcgagaggagttcgatttgagtggcttggaaaacgaggtcaacgattccctatcgtcaatcctaaagacagactcgccgtccaagcgtcggtcgctcggttcagctttgcatgatttggaggagtccaccacttccccgagcatgctcaagaggcgcacccgttcgctggaacgtcaagatgtccagcctggcatggatttggcagctgcactggatgccatcgccacatcacaggctactcccagcaccccggtggacttcgtgaccacaccaacaagtatatcggtggcggagcggatcaagcgcatggagatgctgtcgacgcccacttcccgtgcggcgggtggggccaacagcagctgggaatcgccactgcaggcatcgtcagcagagcatggagcacccaccaccccaagggttctcaagccaagtgtgctgcgcagagatttgcagagggagcggtacaaaacgcaacccgtgaccaacgaggagatgagcttgtaagtcaaaactaattgctactgctccgttttagaagtattacactttataaaaaccctatacatatgaatgatatctgaaactgcataaatatccttgtcggggcagtattctccagaatttccattcaaattgccacattctcgctcacaaattgcgcatacgtcgtgtggcccgtcaagctgtcaactgattctgcagcgaacgccagttcacgcttcgatggccccaagaattccagcccccgaatccgaatccgaatcccaatccgtatccgtatctgtgtttgcgtggtacaatatttgtctatatactcgcattcattgctatttttggtccgccgagcacatttctggctggcacttggccgagcctataaatatttataccatcatggtgcccacaacccccgcctcactgtcaactggaaaatgtaccagttgtttggccattcatgcgccgtagccaacattataatccagtcatgatcggcttaattaactttactgtggacatactccggtaaacacgtagccataaactagccgattctgatgaaaacttgaacacattttgcccgcggctattttggcaatagtttaattgctttcccattgctccgcaaccaaatgtcaacaagtttcgttggcgaacaagccattgaaatcctccatggctgctgacctcaattcgatccgctgtcatatcattcacttttctttgccgccttttagtttttattggcccgacgactggctgtgttgctggtgtcacttaagcagcttattgcttgcctaattacctgcgcaactattgaggccaacaagaacacggcgttgcgcgaaatacaaataaaggttagtaatggccagcgataatggaaggtcgattggattcgcgagtttgcaagagggcatccatagcaatatttgttgtgttaatgctcatagaactatttctagtctttctagaaccaaaatgagataccatcaagtactatcac

SEQ ID NO: 32651 - DNA, 3051 bp, DROSOPHILA
atggatatctcgtttcacagcgactgtattttgtttcgattcataacgcgcaccacgcgttccgccagtcgccagagttccgccggacactccccacctccgccgctgcatcgcagtgacgactcctccagcagttcaccctcaccgacacgcagacggaataagccaggtggtgctcctgccgccacagatccaccatcatcgtcggcgaacgggaatagttccgcttatgagacggcagccaccactgtgatgacccatgaccagcagcgagatcctccagttgaagttcctaaggctctaaacgtcgagccaccgcagccagaagacatcgtcctgggctcctgccccactgcatctgcccactcagcagagagccaaagtcgaggaaaagctggcaaatgcagtattaattgcacctacagccacagccacagcaccaacaacaactgcaacgcgcgacaacgcaacagcagcaacatcagcagcaacaacaccatcagcagcaacagcagcagcagcaaaagcacttgcaacaacaatagcaaacagcaacacgccacgcccatgccgcccctagctaatgccaacaaagccccgttaattgtgcttaagacagccgcatctgcagcagcattgccgtccattgccgcagcagcaacatccagcggcacggcagcaacatctggtggtgttggttcgcccatcaagcgtcgcaagaatccgctgtcgccgctgctcctcggcagccagtgccagtccaccattgcgcctccgcaggccattgccagtccgctcctgagcggcggcagctgctcctcctcgaccacctcgccccaatcctcgccagcggttcgcaccaccaaggcgagtcgtctgcgcgccgccgcgcttgataaaaagaaggaagaggagcaacgcaatcgctacagttcgcccgtttcaccaaaagcctccagcaacggcggagtccaagcacaacgtcgtcttagcaactcggagctatcgcccaagtcgccaggtgccagtggattcacttcggagccagtcgcgtcagccacagcgaacagagtcccgacgagatctgcctcccatcctgtggacacaccgcccacacaaaggcgacagcctctggtggccgtgagttcgggcatctccatgaagcagagtctcagcgagctgcacttcacgggtggagcagtcagtccgcccaaggctacggcggaatgcactctaaggatgcgaccacgtagctccacgatgagcaccgagaacacggagaatggccgacgtgaccacttggctaatctgcaactaagtcctgtgcaaaagcaaaagcgaacgcccgaagtatcaccacgccgtttcggagatcgcgacaagtcggccaaacggaaatcgaatttgaatcgttcgttgaccgaggaagccaccaaggatggcgatgaggttgcctcttcgacccgccggcgccgacgtcgtgaactgggaatggctcgtcccctggttccgggcgatgatgacgccctaagagatttgctaacgccgcagaagagttcctgcagcgagtcaaccaactccatatccgaaccccatctccagttcataccagccgttcgtcatccggtggttccagtacgcaccatgactgctgtgctgcctgcaccacgaccgctgcatactcctgcggcccgcaacgtcagccagaagttcaatgaaaggaccaaaacagatctggccgagatcaagaagattgctgagcaatcggaggcgcaggtgcaacagccttcggtggatgataaccagaaaatgtcagccataatgcgcaggaagagcacggatgagggtggatcagctttgggggcaacaaaccagaattcaccacctgccccaaaccaaattgtatccatactgaagaagaaggaacatggacttggcgagtgcaactccagtgcttcaagcaatccctcgccggtgaccttctcttctagcgtggtggatcatcctttggctggagctggccggtgcaaacggcagggaatactcaagaagagatcgagtctagatgaatcgcgctactactcccgatcgcattcacccgacgaacgtagtattctcattaagtcggccaggaggaattccctggaggaagctggcactggattgagtccggctcaggcccatggaatcctcaagcagagcagctacgacagcagcaagagcgacggctgcccttcggccacggagagccagccacacagtatcctgaaaaagaaggattcgctatcgacaccttcggacggaggatgccacaagcatgtctctatatcgcaagctgtaactttagctgctgctgaactggctgcccatgatggaatcaccttcgatgatggtgaggagcatgagatacgaccgatcctaaagcaggagagcacctccagcgaggaggctgtgcgtccgccaaagcccatactcaaaaagaaatcctttggcgaggcggatgaacacgaaatacgtcctatattgaagagctctcgtaaaagcagtcgagaggagttcgatttgagtggcttggaaaacgaggtcaacgattccctatcgtcaatcctaaagacagactcgccgtccaagcgtcggtcgctcggttcagctttgcatgatttggaggagtccaccacttccccgagcatgctcaagaggcgcacccgttcgctggaacgtcaagatgtccagcctggcatggatttggcagctgcactggatgccatcgccacatcacaggctactcccagcaccccggtggacttcgtgaccacaccaacaagtatatcggtggcggagcggatcaagcgcatggagatgctgtcgacgcccacttcccgtgcggcgggtggggccaacagcagctgggaatcgccactgcaggcatcgtcagcagagcatggagcacccaccaccccaagggttctcaagccaagtgtgctgcgcagagatttgcagagggagcggtacaaaacgcaacccgtgaccaacgaggagatgagcttgtaa

SEQ ID NO: 32652 - protein, 1016 aa, DROSOPHILA
MDISFHSDCILFRFITRTTRSASRQSSAGHSPPPPLHRSDDSSSSSPSPTRRRNKPGGAPAATDPPSSSANGNSSAYETAATTVMTHDQQRDPPVEVPKALNVEPPQPEDIVLGSCPTASAHSAESQSRGKAGKCSINCTYSHSHSTNNNCNARQRNSSNISSNNTISSNSSSSKSTCNNNSKQQHATPMPPLANANKAPLIVLKTAASAAALPSIAAAATSSGTAATSGGVGSPIKRRKNPLSPLLLGSQCQSTIAPPQAIASPLLSGGSCSSSTTSPQSSPAVRTTKASRLRAAALDKKKEEEQRNRYSSPVSPKASSNGGVQAQRRLSNSELSPKSPGASGFTSEPVASATANRVPTRSASHPVDTPPTQRRQPLVAVSSGISMKQSLSELHFTGGAVSPPKATAECTLRMRPRSSTMSTENTENGRRDHLANLQLSPVQKQKRTPEVSPRRFGDRDKSAKRKSNLNRSLTEEATKDGDEVASSTRRRRRRELGMARPLVPGDDDALRDLLTPQKSSCSESTNSISEPHLQFIPAVRHPVVPVRTMTAVLPAPRPLHTPAARNVSQKFNERTKTDLAEIKKIAEQSEAQVQQPSVDDNQKMSAIMRRKSTDEGGSALGATNQNSPPAPNQIVSILKKKEHGLGECNSSASSNPSPVTFSSSVVDHPLAGAGRCKRQGILKKRSSLDESRYYSRSHSPDERSILIKSARRNSLEEAGTGLSPAQAHGILKQSSYDSSKSDGCPSATESQPHSILKKKDSLSTPSDGGCHKHVSISQAVTLAAAELAAHDGITFDDGEEHEIRPILKQESTSSEEAVRPPKPILKKKSFGEADEHEIRPILKSSRKSSREEFDLSGLENEVNDSLSSILKTDSPSKRRSLGSALHDLEESTTSPSMLKRRTRSLERQDVQPGMDLAAALDAIATSQATPSTPVDFVTTPTSISVAERIKRMEMLSTPTSRAAGGANSSWESPLQASSAEHGAPTTPRVLKPSVLRRDLQRERYKTQPVTNEEMSL

SEQ ID NO: 32653 - DNA, 3842 bp, DROSOPHILA
gtatttctattttttttttttcgatcgacaaattgacttttgctttgtgactgtttgctcctctcatcgtctgataagatatgcgatcttactactatactactatttgcccacttgagatgtgctaactgtttcaatatttgaatttcactgggcattcgtaattgctggccaaatatatcccacagatcagtatccactctctcttgtttgcctgctaattgtatttgtataatttttcctcattttcaactgcctgtcataataaattaggcacaaaaaattcgctgagctcttgcatttgctcagcatttggccaaaaaggccggtattttatttgagcacattcgtgaaattccatttgggcacttggcatttgaaatgtgcgcagcagctgtcagatacataagtggtttatataatataacaacttgcattactttctgtaacaaaataaccgaatttttcgtttgagttcccgctctccacacttatgagattaattaggccctcgtgcgcttccctgttctaccaatttttacccaaacacacacacagagcataactaatcgctcataccttggcagttgtcaaatgagatttgcatttacatgcacacagtcactgccaaaagtacgcggccagcaaaaactgcactcattgccagagcagagcagatgcttggctataaaaagcaggcaaccctcacctcaccttgacacggttgtaggtgtttagtgggtggggatgggcatggggcgtgccaagatgagggggcgttctgggttggctgtagagcatgcaatatattaatccgagtgctcaggtgcaatttaattgctgccaagatttgctttttttacgcgccaagtgcggtgcgggaaaagtgaattagaaaagcaaacacacggggcggcaaacgaaggggggaattttgcactcgaaaaaataaaatatgaaaataagtaatatacattaatttaaatttaataagaatgtaatgaaagtgtattttaaaggtatgcatcggcatattttgaatctaaaatgaatttaatcattgcatacttttcacaactgtttcttaaatttctggttgccaagtgtaataatccccagtggggggacatcttgctgtattaagcggaaatgccattgggggaattgagttaacattacttttcatttggcccactctgactcactgtttttttattctcccctttcattcgcagaaaccattgcggcctcaagtgacttatccacagcacctgccactgccaagaccagctgccagccacctgagccactgaaacagaagccaccgcagcagcagaccaccaaggactcggaggattccagttcacagaagagtgctccagtccagtcgtatcgtggtcagcatccgcacttccaccatcacaccacgcccgcttactacacggatcttcagctgagaattcacacgccgaacgcatcggatgtgggcgccttgaacgagaactatcgaagtgtatacagtactccgagcacccagctggtggaacagcgatcgtttccaaagagctccacggccacgaaggatccaccgctgcccataagcaatccggctaggggaacattttttcgtggcgactctgcgtccagcgacagtcactcaagactccgtcggagccagcagagaaccggcagcgagggacgcttcttcagatactctcagggatctgtgagccctaccaaaggtgaacctccaatcggccacgaaggtggtgagcagccacccgttgtcgccagtcactcccccatcacatccaccagcaccaccaccatcagtagttgtaaccccgtagagcaggctagtccaccaccaacaaacgtagtaaatcccagcggatccggtcgcaacagccggcacaagcagcgtttccacagtcgatcccgtcgagcggtgcgcgtgcgcagtgaatcgcgtccgattagcgccctctatgacataatatgcaaggagaagaacctggaaaacagcagcagcagcagcagcagcagcaacgagcaggagaagaaaaaggatcaggagcagcctaagaccacaaccgacaagctggcgaccttttggcccctgcaccatcactacctcaatcccccgatgagcagcggcaactcgggcggcagcagtggcaatcccaagcagcagcagcagcagcagcagcaacaacagctagagcagctgggacaccagacacatcttgtgctaggagcatcaaaggagttgcccgcggtcagcagcagcagcgatgaagagggatccctgcggactctccactccagtcgcaaggtgaccaatctgaatgccaagtccacctctctgccacccgaggaaggactctcgggtgatgtctccctggagtcgtcctccaaccgactgaatctgcgattggccaggagcctggagccctcagtccgcaatatcactgcatccgcctccaaggaagtacagagctatgatgctggggagcctgtgaataccaatcgattgtttgtggaaccgcccaagataccactgtctgccatccgaaactctcttgacgatcacgacctggatattgaggagtgcgacagcaccacccagttcgatcagggggatatctacgataccctggaacgctggagccatggtgtcagcttgggggcacatctattgaactgcgcgaatggccacgatcaatctgatcccgaggacgaccatcaaaccgatcatcatcagcatgcacatcaatcattgccagtagaacccaagtctcatcatcatcagcaccaccaggccaccaatgcgcgcaggtaagccggaggtatcccatccccgcatggaatccacctccccaaaaacatcacaagtacctaaatgtatctctatctgttgcggtggcaataacgcgcataattagcttccttttcgccagtcgttagccgaggaaaggttgtcctgattacaggcaggtgttattgggtattgaacgccccaccccatgtttagttattcctagccggttaattacgcatcgatgaacagcggtagcttaaaaaaatagcaatttattatatataattaatttgtttgttttttgtaaatctaaagttatttttctaaacctattttctttccaactagagttgttatagtacttatattagtggttatagtacgaaagtgtttttctaaaccacattgttttctttgcgtgctatttttttaaccgccactgtgattgtgtgtgtgctttgattggaattactcgagggtcatcaagctgattaccgttgagggtgaaagcgttttgttctcggaagttgtggctgattaaacagcaaatgtaatgcgattatgatggttctgtgtataattttattaaaactggaacttagttcgaagctgttctgtggatctaatccgttttaaggcaccgccataatccttggcgcacaatcaaaacaaattgctggtattgtggtccacctctttcatgttgagatccatatgccatcttcacccatattgttcgacgtcgcgttatacaatgcgacttggcggccctctttaagccgggcccccaaacaaatcgagattcacagaggcagggggcttgttaacaaacgaaatccatgtattgttcgcctcttttctgtcgagtgttacgtggtccattgtcttggggttgagattgcgattgggattgggattgggaatgggctttgggcttcggtttgggatcgtatcgtatcgcggcggcgacatcttcgacaatcgcgtcagtgcgtggagtgcaattcgcagcggcagccgg

SEQ ID NO: 32654 - DNA, 1626 bp, DROSOPHILA
atgaaagtgtattttaaagaaaccattgcggcctcaagtgacttatccacagcacctgccactgccaagaccagctgccagccacctgagccactgaaacagaagccaccgcagcagcagaccaccaaggactcggaggattccagttcacagaagagtgctccagtccagtcgtatcgtggtcagcatccgcacttccaccatcacaccacgcccgcttactacacggatcttcagctgagaattcacacgccgaacgcatcggatgtgggcgccttgaacgagaactatcgaagtgtatacagtactccgagcacccagctggtggaacagcgatcgtttccaaagagctccacggccacgaaggatccaccgctgcccataagcaatccggctaggggaacattttttcgtggcgactctgcgtccagcgacagtcactcaagactccgtcggagccagcagagaaccggcagcgagggacgcttcttcagatactctcagggatctgtgagccctaccaaaggtgaacctccaatcggccacgaaggtggtgagcagccacccgttgtcgccagtcactcccccatcacatccaccagcaccaccaccatcagtagttgtaaccccgtagagcaggctagtccaccaccaacaaacgtagtaaatcccagcggatccggtcgcaacagccggcacaagcagcgtttccacagtcgatcccgtcgagcggtgcgcgtgcgcagtgaatcgcgtccgattagcgccctctatgacataatatgcaaggagaagaacctggaaaacagcagcagcagcagcagcagcagcaacgagcaggagaagaaaaaggatcaggagcagcctaagaccacaaccgacaagctggcgaccttttggcccctgcaccatcactacctcaatcccccgatgagcagcggcaactcgggcggcagcagtggcaatcccaagcagcagcagcagcagcagcagcaacaacagctagagcagctgggacaccagacacatcttgtgctaggagcatcaaaggagttgcccgcggtcagcagcagcagcgatgaagagggatccctgcggactctccactccagtcgcaaggtgaccaatctgaatgccaagtccacctctctgccacccgaggaaggactctcgggtgatgtctccctggagtcgtcctccaaccgactgaatctgcgattggccaggagcctggagccctcagtccgcaatatcactgcatccgcctccaaggaagtacagagctatgatgctggggagcctgtgaataccaatcgattgtttgtggaaccgcccaagataccactgtctgccatccgaaactctcttgacgatcacgacctggatattgaggagtgcgacagcaccacccagttcgatcagggggatatctacgataccctggaacgctggagccatggtgtcagcttgggggcacatctattgaactgcgcgaatggccacgatcaatctgatcccgaggacgaccatcaaaccgatcatcatcagcatgcacatcaatcattgccagtagaacccaagtctcatcatcatcagcaccaccaggccaccaatgcgcgcaggtaa

SEQ ID NO: 32655 - protein, 541 aa, DROSOPHILA
MKVYFKETIAASSDLSTAPATAKTSCQPPEPLKQKPPQQQTTKDSEDSSSQKSAPVQSYRGQHPHFHHHTTPAYYTDLQLRIHTPNASDVGALNENYRSVYSTPSTQLVEQRSFPKSSTATKDPPLPISNPARGTFFRGDSASSDSHSRLRRSQQRTGSEGRFFRYSQGSVSPTKGEPPIGHEGGEQPPVVASHSPITSTSTTTISSCNPVEQASPPPTNVVNPSGSGRNSRHKQRFHSRSRRAVRVRSESRPISALYDIICKEKNLENSSSSSSSSNEQEKKKDQEQPKTTTDKLATFWPLHHHYLNPPMSSGNSGGSSGNPKQQQQQQQQQQLEQLGHQTHLVLGASKELPAVSSSSDEEGSLRTLHSSRKVTNLNAKSTSLPPEEGLSGDVSLESSSNRLNLRLARSLEPSVRNITASASKEVQSYDAGEPVNTNRLFVEPPKIPLSAIRNSLDDHDLDIEECDSTTQFDQGDIYDTLERWSHGVSLGAHLLNCANGHDQSDPEDDHQTDHHQHAHQSLPVEPKSHHHQHHQATNARR

SEQ ID NO: 32656 - DNA, 2132 bp, DROSOPHILA
acaatattatttattttccattccattttaatatttatttgcatttatgcttaagttttcttttaccagcaaataaaataacatttattacactatattaccttcgttaggtagagaatgcacaaatttgtaaccgttatatgcttgtgtttaaataattaaattgatcccaaaattgatagcattgcaccgtgcatcatgtttccaactcacccatcaacagatcgatgcctttgcattctttcaacacttgcatcttggcctctgagttttcacagcatttcccccccgccaatctccactttcatgccatctccggcattttggtttttcacgccttgtggcagttaccgttgcagcacgtttttcgttttgttttggctattttgttttgatttcgctgcttctacacggagctctcaaacacagcggcagtctgcgcacacacagatacaaatactcggggcacacagatactcacaaacacttgctcgcgttttgttttaattcttttgcttcgccgagtaagagataaagaacgaaaacgcagcgcacacacacaggcagccccgagttctagatacttttgtctagcgttcgccgctcagtcgcaaaatcgtttagcgccgagacggacggccaagccgttgggaaattattcgaaacaaaataaaaaaatacgggaaaatcgctgaaacaccagcgaagcgaagacgacacgtcgagtgtctcttgttgtaacgttgacgcgagtgaaaagcgcttttctattttcgcctcaagtgcagcctcctcgttgcggcaaaacccaaaaacaaaaaaaaaaaagaagaaaaaaatagaaaaaaatccccatcaacgtttcgcttttacacaaaataaacacttgacgcgtatgtcttactttctaaaataaaataagaaaatccgcaagaagatctgagaaaagaagctagacgaccgcgttttggggcgggccaattttagccaggttgacaaaatgctggccctcaaggagtgcctcatacgggagggtgttctcaatctggacagccccgagaagtaccgaccgtaccatctaaacggcagcaaaagcagcggcgccatggattttccccgatatcgcagttagtatccaaacattccggacagcattacgcagttgatagcgggtatctgtcagatacggccgcacttttatgagatagatggttggcagtttgtaaatatagcaaaaaaaaaaaaaataccttctattccatgatccaatatgtctcttaaaataaggtctatttataggtcgcacaatcattctctaatctgaaagatcggatctgtaagatacacagtgcgctggccagatatatttgcagttgtgaatgatcaaataaactaaatagactcgtttcgcagtgattttctgccgtctgaatcaatctaactttaactatattatatattatcaattactcatgggttctaatgattgctcattagttttactattttatagcaattttttttatcaatgtgttatggcaacttttagactgtgccccgaaagaatcagttttcattccaattggttatttttaaacgctggcgtcgcacagccgaacagttgtccatctatcgttattatttcctatataaatgcgcctgtttttcttactggattattgtttaataactgttaacgatttgtgttgccattgttcacctgctggagtattgttttaccttacattttttcttctttgtcaaagttgtcgataaagcgagacccagaaagattttgtcatttgtctatggtgtgtgcggtgttcctttgttttacgttcgattgttggtttttgtagacgacccggccagcttttatttcatttcgattgtctgtgcatatttctctctctaagtcttgatgtatggccattttatttgattgtaaagggcttaagtgctgagaagacgagggctccagttcgattccccaacctgcttataaagttgttccaatcagaggtcatttgtgtataacgacctgttatccaatcttgggcacagaacgagcgagaaagatactttggccaagcggattagtgccgatggctatcaatggagtaatttactta

SEQ ID NO: 32657 - DNA, 132 bp, DROSOPHILA
atgctggccctcaaggagtgcctcatacgggagggtgttctcaatctggacagccccgagaagtaccgaccgtaccatctaaacggcagcaaaagcagcggcgccatggattttccccgatatcgcagttag

SEQ ID NO: 32658 - protein, 43 aa, DROSOPHILA
MLALKECLIREGVLNLDSPEKYRPYHLNGSKSSGAMDFPRYRS

SEQ ID NO: 32659 - DNA, 8954 bp, DROSOPHILA
gagacatgtgttctgggaagttcttcaaaattctatcgaaaaagttcttaaaatttttacgagactttgaattgttctgaaagaaaaatgttaaggctatggaaatgtatgtatgtgattctaaaagagtaaaaaacgaccatatgaagagacttttagctttcttactcaatgaataatggatgcgagtaatctatttggttgaagaatgatcatttaatatcgaaaaaaaacttgcaaatgaattgaaactgaatggtggtaataagccaatgttttccataaaaactccaagtgtttctcgagttcgcttacagatgccaacgatatcgaatgtcattcgacacgagcataatctctttatgcttatgtttccccattcattgtttaccacttggaagggaagcaagtgttaccctttgggatatcttcttctgccccgatatcatttgccgtcatccttagctatttcgaatggcgtcagcaacggaaatgatgcgtccagatcccacacgccgtctggtgccccaaaaatcggaccaattgcagagctttctgtataaacaaatattatatatgtatgtgccctccccattgaatttcacacgcaatttggtttattttcgtttaatatcctcgaaaatgaaaaaaaaaatgaacgaattgaaaaccggaatgaaaattgtatggagagggctgtaaaataaattaaattaattagtttcagcatttgtttgcggggcctttcaattggcaaatgggattggcagataagattaaatagttcctcgggtcttaaaagctttgatggatcatgagtgaattggctgaaatgtttccaggaaccaaacaatacattatgcattatgtataagcaaaatggcaagaggtttatctagatagcttgtatgtaagtcacttctcaaagtactcgcaaaacttctaatttgctatgataataagctgcttccgctctgaattcacagaaaaaaaagtatttatgtacaagtactgtgtgggagccgtatgcaaatgatttcgcttaggaagaaaaaaaaaccgcacttgacacgtggaaaaaaaattgaagttagatgtctcttacactgggagaaatgaggagccctaaatatttttctaaacccagggtccaacgaccctgaatcagatgtagttttatttctggttgtcatgtaaatgcaagcgacgtgaggtcgtaaaaaagcttaaaccttttagatagccgcaaagatcgttaaagactctctgagtttgcttatctcgaggtcttcgggccaagttaacacaagttgaaaccacgaaatcttatcagactcgcggttccgcgagttgcgggcaaataaaacattcatttatcttgattgcgtttgagtgaactcaactaaatactctctatttctctcgtttcatttacagactgttcaaaccacttggcggccacaattgccgctgcccagggagcttcagctgaccaatgaccggaatagcgccgacgaccaccacgattcaaaggtgataacgaccaccacaaccacagcggacatccatcaccacaaccagcaggaggagaacgaggaagaggatatggatcggctaaggggcaatcacagcattggaggatcctcgcagcagctttctggcaaacagaaatggtccttcgggcgactttttcgcaagaaaaaggaggcggagagtgcatcctccagcgaagaagatcgcaaggcgggatttgtgcctgcccagcgccagtcagccagcaagccgaagggaaaacatggcaaaggatcgcgaggttgcagcaaattcgatcacattgtggtgagtcagcggcaagagcaggctccaccacatccaccccaaccgcaaatcgacaatgagttcttcttgcccttggaggccatacaaccggagccctactatcaaaatcaaccgggctactatcaacgatcgagtaactcgctggacaggagattactaatgcagcctggagttcagggaaatggttaccagcagcccaaatctcgatcggcgcagcgaggtcccaagccaccaggagctcactccagcgaggaggaactgatctcgctgaactcctccacgttctccaaataccgcagcgatgagagtattcatttgggttccgctgctggacaaagtcgacgcagtcgagcggcccgcaatgagcgttactacaagagattgtcccgggatggcgaaccgagtcatggcggagcacccgttgtagcccagcagcgatacaaaacccagccactgcctttatccatttaccagccaacgaacgcgtccactggctatgtccagtggcaaccgcagccccagaagaacctgcagaatgcgatgcagaacgatggaaagcgaagcatcagctacgacagtcaaatacacctgcagaacatgaatgggaggatgcagagtaagccattgccaccgccaccgcctccaagggatccactgaggagagtgcatgttggaggttccgggaagattggatccagctctggagacttgcgtcccgtgtcctatgccttcgatcacaatagtcgctgtgcgtcggatgatcgcatttggcagccaccccactaccagtcggtgcattcgctcaactcccagcccagttcgtcaatagtcagtgcaccagtgagtcaacagcaaccgcaccacaggagattcataactcgatccgagaggaacgcaaatcctggcaagcaatccctgccgaatggtattgatttccattatgtggcagatgcaacgccacgctccaggaagcccatacacatgatggatgcaggcaggatggacaatacaggagtgccagcatccagtggtatattgcgaacctctaagagtgggctgcccacaccaagtcctgctccccagcagcccttggccaaaccgcggtcgttctccagctcgcgacttagtgagctgcgaacctatcccatgcccatgtactccgaggtgcagaaacctaagaggaatgcgccaccagtcaatccctcgccgaatcaggataacatagtgtgtgggagtctgcacataaaacccacacaagagcatggaaatcaaaactatgtggagattcgtcatcgggatgtgcacaagaccaactcaatgccgcaccattatcagaataggcgatctggcgaggatttacccaacaaatatgaggagtacgtggcagaaaagagggagcagcatcaacaggcaccacccccagtttatccggagcgcaaaatgagcttgacaccagcagtggcgccaccgcctcctgtttacttccctcgcaagaagcctgccaatttggaggaggccatcaacgaactggaggccatttacaagtctctaggactcactgaaccagccgagcccaaacaggaaccaaagctggatatttcctccaagatgcgtgtgccaactcccagtgattttgaaaagttcgccttggcgcatgctgatgactacgaggatgaagattcgccaaccggagaaccagatccaatcagagatgatgtggccttcaggaacctacagttggccaatctgcaacatcggccatcggagaagcagcctccattcggcatcccagtgggacccattgtgccagctccacagtcggattatcttcacgtagagccagtgagggtgaagaagaagagtggctctcctgacatcattaaagatgatcttgctgtgcgttcattgagaaaggatcctcctggtcccaaatccagctttgtctacccaatgcaaaagaagcaacgggctattcgaacccaatcggccaacatatacaatctgatccaaagagacgctgccaagccatctggtggagatcttaagagctacatggagctgactcgcaacctggaaagagctggcagcatgtccaatctgcagggtgaggatggcagtgataccaaagatgtacccgccacactggatcttctccgaaagttgaaagctcaggatgaggaactggatttggctagaaagcatcaccccataccgtttagacatcccagtcagggaggagctattgcccaactgccagaacggttgtccaaagaggaaatacccaaggcagcgcctgtgccagctccccgaaagagtctgactcctgaacccatgctagatgatgctctcaacaagattgcccaggatgcgcaggccagcagcattaagctgagtcaggaactccatgaacttcgcaaggaggcattgattacagctgcgagaccaaagttgaatgccgaacaacagagattagaggatgaactgcagcagatagaagctgtctccgaggcagccaaacgttgtggccaaatgctgctcgaaactctgccagatgcgggacaggagggtcaggaacctcaggataagcccctcaggaagctacataaggagggcaaactcatacgagctatcgatgaggtgtccgaagctgctaatgcggtctgtgagaagatcctcaaggacattgtgaccacagaaccaccggtggtagttcaggaggccctccaagtgaggcagaccacaaagactggaccaggcggagaacagctggtgatgccgcatcttatcaagaaactagatcccatacaatccgacaagatcgagcacattgccagacgatgcatgcggcagttgagcgaactggccaataatccggactacgacaacctggccacctgtaatatgagcaacagcaccaccaacgcaacgggtggagcagccgctgatgccactctcgtttgtcccgttccagagacccaagccaagagccagacgctcgaggagattgacaagatcatgcaggagtgcgagcgtcaggcgaagagcagcagctcaaccacgaccaccgatgatcagcgcaccactgcccccagtctgacgagtggaagtggcagcgggagcttcccacccaatgtgagcaccaccgccagttcgttcagctcaagcagcgactgtttggccaagtcgtcgagtccttcgcgcgccagccgtccgctctcctcgagcatcacctctttcaatccatattcctccagcgactacatcaagtcgcagagcagtgattgccatgcaccaagcaccgatccgatcaagacctttagcaccacctcgtacgaggtgcagtccacaccgcagagcaccaccattagcaccaatacgatgagcacgagccagagcaacacgatcagtagcactactaatccgagtgtggagtccaagccatccgccccgtcggtatcgccaccacccctccagttgacgccagtgggtgatcggaggggcaggaaccgggagcggggagcttcctgctcctccacatcctcaccttcacagtacaactcgagcgaggagctggccgccatttttggcatcgaggagcaaccgaaacagcagcgtcgcagtcggcagacgcataatgccacaggtaacggagatgatcccgccaccactgaggccccgagttcgcctgattccgattccgccaacgccaatgatactgccaatgccaatgccaatactactaatcccgcccagctcgattcagctaattgcgctactaatcccgttatgaatgttcaacttgatgttactactagcacctccacctcagcctcaaccacccatccaacctctaacgataatgctagcacttgtagtagccatagttataagctagagacgattccggagcaggatcacgaggaggtggagtccacgctaaagttgtcgccgaacttcaataggatttatgccagcaagattcgcatagtaatggatcgcaatgaagaggcaagtctcctgccggaaggagcagctaatgttgctttaactcaattcgattctttgagttctctggaagagacctcgtccaatccggactctgggaatgttagtctcacggattatcccctggctaaccatgcgaattcctccctggaactgcagaccgcttacaatagtcgatttcaagtgagggagcattacgtatccgaggtttccattagtgcttcggaatcaacggatgaggagcagacggacacggagtgcttaagagatgctgatcgtttgaacacagaagactttccacctttacccacagaagaagagctagaggagagtctacgggaagaaatagaacttaacgatagtcttagtgggggcactttaaatattgctagagagagtagcggagaattggtatctgtagttcaagaattgaacctgaatgaaactgttagtctgagtcaagaggtttacaatgtaaccactgaggcgctgcaacgaatagcgacagatgaaatagatggcttaagttccgctataattgaggttaacgaaagcttacttaacgaatctgcatttgatgagatgcactttaaactagacgaaacggaactggacgaatcggaaatcatagacagaatgcttgaggcttcatttgacgagttagacgaattagaacttgagaacacagaacttgacgaaagtcgacttgacgacgaacaaaagagcgaatgccaatttaacgaaacctataacgagttggacagcatagatcttgatgccacagaacttaacgccactggacttaacgaaatttcatatgaccagctggaggaactagaacttgacgatagcgactccgtaatgccgttcacacggcgcaagagcatcgtttacgaaacgccacaacttaacctgagcatttccgaactaaaagtgaattacgaaacgcaagtggagccagtaattaaatcagagtcactcaacgaagccattaaatcgatgaacaacgacgatgaaggcgacgaggagatgcaggcaggcagtgaagagaaggtagatgaagaggaaaacagtgtaactgagacccagacacatcgtcgtcggtgcaaaggacttccggcgaatcccgctaatgatgatgaacggccgtccaccagctgcaaggctctttccgtttttggcgaggtgcgaactgtggcaccacaggcggcggcggcagaggcagctgcagcagttggtggtgcaacgcggggcggttggactacactcgagcacgtatttgtcgcctgcactgtgggcctgattacaccgaacgatttgctcactttgtgcctgatcgtaattggtgtgattatcattattgcaattgctctcacctgagtgcgccgtttatggcccgactgttgttgctgttatattgtttgttgtaattatggttgaaactggaaagagagaaaattatgattttttataaattagccacaaagtgcacttaaaatttccacttacagtaattagtctaggttatatacaattgtgtacatttatgtttaaactagcttttatttcgcagaaccaaaagtattctcaacttttatgctaagtgcaatttacatatactatacgaatcgaaagttatgcatattatattttttttaaaacccactgtgcaattgcaaacgaaaattataccattcatcaatgctatctaaccgtggtaaaaacaaattagttctttaacacagtttcctcgttttccttcttaattaattgttaatttgactgcaacttgtgccaatgatttttatacgtttacttaataatgctctattaattattcaattaaatacttaatccaccatatgtactctccaaaataatgttaagcacatgaacgagaaattcgaaaataatttaccaatgaactaagacaaatgaaatttaccatctactaatgataacatattttctaaaatctctttgtatattttcagctcaaaatttaatagtttaagtttgacagcgaaccatttcttacgtagcattcattatttcgctataatttaaatgtttatataatttaccagacaaatggaagcaggagccatgaagcaaatgcaaaatattaataaaatgttatttaaaaaaacaatctacgattctgacaactttttgttttagtttccattactgcgttgctaatgcttttgatttatttatatttgtgtgtagtttgagtttcctattcctgccccatttaatttttcatgattgactaacacatttcgtaataaaaaatcaaaattcgccaatcgtaaggaatatgttatttaaatgttgttgccgccgctaaaatggattatcgctaatatattattgcaaatttgctcaaatatttttacagaattttcagatgttactttaagttcaatcaaaatcatttactttcagagaagcgttaattatttgaaagaaaagctgtttctgttggcttgtgtctttgctagttgtttgtgctttttcagagataggtggcgctttacaaaatgtagaatcccgtgttaaatttttgtagaagagtacgtcaaataagtgtgggatactaaatacttttgagctaaataaataaattgcaccagggattaatgtggagtataaagttacaatattaaagttaaattagtgggcaatcacagaaagaattttttattattttaggaattttcaaaagcacagccctaattctttctgaaaacttttcatgaacgaaatacctaattttaaatagaaatgcaaaccagacagagtgaataaaaaactttttagtgggcaaagtagaaaccaaaaaacttgcctagctcaaacttagttgcaagtgtaaaaacaaataaaaaagttaggcatgttgggaaaaaatttggacgtatagataaatgtgtatgaaattctgtttacaatttgtctgtctcgtgggttcagagcctaagccccattcaaaatagaaaagttagagcttaaagccgaaagtcttctcacggcaataggagcaacaaaaagggaaagtcgtggccgcataatgaaaccaattcaaggagctgctcaaacttttc

SEQ ID NO: 32660 - DNA, 5735 bp, DROSOPHILA
atgtacaagtactgtgtgggagccactgttcaaaccacttggcggccacaattgccgctgcccagggagcttcagctgaccaatgaccggaatagcgccgacgaccaccacgattcaaaggtgataacgaccaccacaaccacagcggacatccatcaccacaaccagcaggaggagaacgaggaagaggatatggatcggctaaggggcaatcacagcattggaggatcctcgcagcagctttctggcaaacagaaatggtccttcgggcgactttttcgcaagaaaaaggaggcggagagtgcatcctccagcgaagaagatcgcaaggcgggatttgtgcctgcccagcgccagtcagccagcaagccgaagggaaaacatggcaaaggatcgcgaggttgcagcaaattcgatcacattgtggtgagtcagcggcaagagcaggctccaccacatccaccccaaccgcaaatcgacaatgagttcttcttgcccttggaggccatacaaccggagccctactatcaaaatcaaccgggctactatcaacgatcgagtaactcgctggacaggagattactaatgcagcctggagttcagggaaatggttaccagcagcccaaatctcgatcggcgcagcgaggtcccaagccaccaggagctcactccagcgaggaggaactgatctcgctgaactcctccacgttctccaaataccgcagcgatgagagtattcatttgggttccgctgctggacaaagtcgacgcagtcgagcggcccgcaatgagcgttactacaagagattgtcccgggatggcgaaccgagtcatggcggagcacccgttgtagcccagcagcgatacaaaacccagccactgcctttatccatttaccagccaacgaacgcgtccactggctatgtccagtggcaaccgcagccccagaagaacctgcagaatgcgatgcagaacgatggaaagcgaagcatcagctacgacagtcaaatacacctgcagaacatgaatgggaggatgcagagtaagccattgccaccgccaccgcctccaagggatccactgaggagagtgcatgttggaggttccgggaagattggatccagctctggagacttgcgtcccgtgtcctatgccttcgatcacaatagtcgctgtgcgtcggatgatcgcatttggcagccaccccactaccagtcggtgcattcgctcaactcccagcccagttcgtcaatagtcagtgcaccagtgagtcaacagcaaccgcaccacaggagattcataactcgatccgagaggaacgcaaatcctggcaagcaatccctgccgaatggtattgatttccattatgtggcagatgcaacgccacgctccaggaagcccatacacatgatggatgcaggcaggatggacaatacaggagtgccagcatccagtggtatattgcgaacctctaagactcgcgacttagtgagctgcgaacctatcccatgcccatgtactccgaggtgcagaaacctaagaggaatgcgccaccagtcaatccctcgccgaatcaggataacatagtgtgtgggagtctgcacataaaacccacacaagagcatggaaatcaaaactatgtggagattcgtcatcgggatgtgcacaagaccaactcaatgccgcaccattatcagaataggcgatctggcgaggatttacccaacaaatatgaggagtacgtggcagaaaagagggagcagcatcaacaggcaccacccccagtttatccggagcgcaaaatgagcttgacaccagcagtggcgccaccgcctcctgtttacttccctcgcaagaagcctgccaatttggaggaggccatcaacgaactggaggccatttacaagtctctaggactcactgaaccagccgagcccaaacaggaaccaaagctggatatttcctccaagatgcgtgtgccaactcccagtgattttgaaaagttcgccttggcgcatgctgatgactacgaggatgaagattcgccaaccggagaaccagatccaatcagagatgatgtggccttcaggaacctacagttggccaatctgcaacatcggccatcggagaagcagcctccattcggcatcccagtgggacccattgtgccagctccacagtcggattatcttcacgtagagccagtgagggtgaagaagaagagtggctctcctgacatcattaaagatgatcttgctgtgcgttcattgagaaaggatcctcctggtcccaaatccagctttgtctacccaatgcaaaagaagcaacgggctattcgaacccaatcggccaacatatacaatctgatccaaagagacgctgccaagccatctggtggagatcttaagagctacatggagctgactcgcaacctggaaagagctggcagcatgtccaatctgcagggtgaggatggcagtgataccaaagatgtacccgccacactggatcttctccgaaagttgaaagctcaggatgaggaactggatttggctagaaagcatcaccccataccgtttagacatcccagtcagggaggagctattgcccaactgccagaacggttgtccaaagaggaaatacccaaggcagcgcctgtgccagctccccgaaagagtctgactcctgaacccatgctagatgatgctctcaacaagattgcccaggatgcgcaggccagcagcattaagctgagtcaggaactccatgaacttcgcaaggaggcattgattacagctgcgagaccaaagttgaatgccgaacaacagagattagaggatgaactgcagcagatagaagctgtctccgaggcagccaaacgttgtggccaaatgctgctcgaaactctgccagatgcgggacaggagggtcaggaacctcaggataagcccctcaggaagctacataaggagggcaaactcatacgagctatcgatgaggtgtccgaagctgctaatgcggtctgtgagaagatcctcaaggacattgtgaccacagaaccaccggtggtagttcaggaggccctccaagtgaggcagaccacaaagactggaccaggcggagaacagctggtgatgccgcatcttatcaagaaactagatcccatacaatccgacaagatcgagcacattgccagacgatgcatgcggcagttgagcgaactggccaataatccggactacgacaacctggccacctgtaatatgagcaacagcaccaccaacgcaacgggtggagcagccgctgatgccactctcgtttgtcccgttccagagacccaagccaagagccagacgctcgaggagattgacaagatcatgcaggagtgcgagcgtcaggcgaagagcagcagctcaaccacgaccaccgatgatcagcgcaccactgcccccagtctgacgagtggaagtggcagcgggagcttcccacccaatgtgagcaccaccgccagttcgttcagctcaagcagcgactgtttggccaagtcgtcgagtccttcgcgcgccagccgtccgctctcctcgagcatcacctctttcaatccatattcctccagcgactacatcaagtcgcagagcagtgattgccatgcaccaagcaccgatccgatcaagacctttagcaccacctcgtacgaggtgcagtccacaccgcagagcaccaccattagcaccaatacgatgagcacgagccagagcaacacgatcagtagcactactaatccgagtgtggagtccaagccatccgccccgtcggtatcgccaccacccctccagttgacgccagtgggtgatcggaggggcaggaaccgggagcggggagcttcctgctcctccacatcctcaccttcacagtacaactcgagcgaggagctggccgccatttttggcatcgaggagcaaccgaaacagcagcgtcgcagtcggcagacgcataatgccacaggtaacggagatgatcccgccaccactgaggccccgagttcgcctgattccgattccgccaacgccaatgatactgccaatgccaatgccaatactactaatcccgcccagctcgattcagctaattgcgctactaatcccgttatgaatgttcaacttgatgttactactagcacctccacctcagcctcaaccacccatccaacctctaacgataatgctagcacttgtagtagccatagttataagctagagacgattccggagcaggatcacgaggaggtggagtccacgctaaagttgtcgccgaacttcaataggatttatgccagcaagattcgcatagtaatggatcgcaatgaagaggcaagtctcctgccggaaggagcagctaatgttgctttaactcaattcgattctttgagttctctggaagagacctcgtccaatccggactctgggaatgttagtctcacggattatcccctggctaaccatgcgaattcctccctggaactgcagaccgcttacaatagtcgatttcaagtgagggagcattacgtatccgaggtttccattagtgcttcggaatcaacggatgaggagcagacggacacggagtgcttaagagatgctgatcgtttgaacacagaagactttccacctttacccacagaagaagagctagaggagagtctacgggaagaaatagaacttaacgatagtcttagtgggggcactttaaatattgctagagagagtagcggagaattggtatctgtagttcaagaattgaacctgaatgaaactgttagtctgagtcaagaggtttacaatgtaaccactgaggcgctgcaacgaatagcgacagatgaaatagatggcttaagttccgctataattgaggttaacgaaagcttacttaacgaatctgcatttgatgagatgcactttaaactagacgaaacggaactggacgaatcggaaatcatagacagaatgcttgaggcttcatttgacgagttagacgaattagaacttgagaacacagaacttgacgaaagtcgacttgacgacgaacaaaagagcgaatgccaatttaacgaaacctataacgagttggacagcatagatcttgatgccacagaacttaacgccactggacttaacgaaatttcatatgaccagctggaggaactagaacttgacgatagcgactccgtaatgccgttcacacggcgcaagagcatcgtttacgaaacgccacaacttaacctgagcatttccgaactaaaagtgaattacgaaacgcaagtggagccagtaattaaatcagagtcactcaacgaagccattaaatcgatgaacaacgacgatgaaggcgacgaggagatgcaggcaggcagtgaagagaaggtagatgaagaggaaaacagtgtaactgagacccagacacatcgtcgtcggtgcaaaggacttccggcgaatcccgctaatgatgatgaacggccgtccaccagctgcaaggctctttccgtttttggcgaggtgcgaactgtggcaccacaggcggcggcggcagaggcagctgcagcagttggtggtgcaacgcggggcggttggactacactcgagcacgtatttgtcgcctgcactgtgggcctgattacaccgaacgatttgctcactttgtgcctgatcgtaattgacaaatggaagcaggagccatga

SEQ ID NO: 32661 - protein, 528 aa, DROSOPHILA
MYKYCVGATVQTTWRPQLPLPRELQLTNDRNSADDHHDSKVITTTTTTADIHHHNQQEENEEEDMDRLRGNHSIGGSSQQLSGKQKWSFGRLFRKKKEAESASSSEEDRKAGFVPAQRQSASKPKGKHGKGSRGCSKFDHIVVSQRQEQAPPHPPQPQIDNEFFLPLEAIQPEPYYQNQPGYYQRSSNSLDRRLLMQPGVQGNGYQQPKSRSAQRGPKPPGAHSSEEELISLNSSTFSKYRSDESIHLGSAAGQSRRSRAARNERYYKRLSRDGEPSHGGAPVVAQQRYKTQPLPLSIYQPTNASTGYVQWQPQPQKNLQNAMQNDGKRSISYDSQIHLQNMNGRMQSKPLPPPPPPRDPLRRVHVGGSGKIGSSSGDLRPVSYAFDHNSRCASDDRIWQPPHYQSVHSLNSQPSSSIVSAPVSQQQPHHRRFITRSERNANPGKQSLPNGIDFHYVADATPRSRKPIHMMDAGRMDNTGVPASSGILRTSKTRDLVSCEPIPCPCTPRCRNLRGMRHQSIPRRIRIT

SEQ ID NO: 32662 - DNA, 4073 bp, DROSOPHILA
gatgtcaggccacttgtgggaattaaaaaatggaaatacaaaccgaatgaagtgggcaaattgttgcagattgccgggggatctgggatgtgaaatctcacacatctgcggcacgtgcagcgaccagattgaaagaactgatttagattaacgtgcatggcgacaaattgtggggcaaactaaagtggattatatgcaccgtcggggacagggaaaatcgaaaaattacccagcttgaggcgaaagatgcaagtaaagttgctgaatgtattgaagatacttttcgcccaactcatgggtataatatctatattttcagaacttttgccgcctgagtaattctcttgaatgacacccattgtttgtttggccagcaaagttactctacatatacatggaaacaaacagcaggaaagaatagcaacaattttcccagatttgtcatgcatcaaatactgttttgtccatttccatatggcaatcccatgctactgctttatgtcggattttccattctccgtccattttgcggcgttattaaaaagtttgcaatggaacattttctgcttttccacacatcacggctacaattttgatggtcagctgggaaaatggctttcacctactttggcctacttacactgaactcaagttttccctttgcatttttccaagtttgtggctacacattacccacatgctgacgggttggaaagtaaccataatgggttcgagttcccttattaagttagccagaccacatttcaactgatgttgccacagcatcttgaacggaaaagtgctgaaaactcaaagggaaaaatctgtggtgccttaacttgggtttctaatcaaatggatttaaattactttaactggtatttttaatattttttttttattatttcgtagctcgaagcttaaactggtgcgcttgacttatccttcaaatgttcatattaatgcattcccaaagtaactttgatccatatgaacgaccatgaatccaattatcaagaaatatcgcctgaggctaaggagaactgaacgggactcgaccattggctatgtgtttcgcatcatccgaattgtcattctattgtctctctggaccggatccacgatcatcctgtttctccacaagcctgaagagctcgccacgtcgatggtgaccgtgatgcccaacaagacggccttccggaatgttaagatgaagcaggattccgtggagatacgcctgaatggtgccataaatgcgtatctgactaaccacagggttaggacatccaacttttcggctgttggagttcgattggagtggcgggatcgaggaatgaatcgtagcctttggcgcactggcatgtggatggtgtacatgtacaaggataagaagaagtacctgcaggttaatagggtctttcagttctccatttcaggatggcaacaggagaggtccctgatccagcgtactttgccaactgatcgtagtcttgagaactccgtctatgactgggcctttgcgcagacggtgatctcattcgagagcatgagcaaggatccggtgggtctgctcatgacggtgaacagcactccgttggagcacggactgggtatactgtatgccgcccttctgctaatcggtctatatgccattattatctgggaattttcggaccgtattctaagcactttgctcataacagctatgtccctcgccctgctcaccgttttggggagcaggcccactctggaaacgattgtgagttgggtggactgggagaccatgatgctcctgctgggcaatatgattataacatcgcgcatggcagatacaggcttctttgactacctggccgtggtcgcctatcgcatctccaagggccatgcctggctgctgatcggtcttttgggattcttcgtgggattgacctcgactgttgtggacaatgccaccgtggtgcttctcttctgcccacccgtcattcgattgtgcgaggtaatggacttgaggaccaccttggtgctcatcattgtagcaatctatgcaaatatcggtgggtccattaccccagtgagtgggccacccaataccatcatagcgaccaataagatggtggagtccgcaggtattaattttgttcgtttctcgctactcatgcttccgactgctttgatttgcctggcgtctacctttggcctaatctactggaccatgggtaagaagatctacattctggacgaagatcaggtgaacctagcagagaagcggcgagaaaataccagaacctcttttgatatccagctgagggtcgccgaactgcgaagacagccaaggagcaaggtaatccctccagctgagagctacttcataacactggcaaccttggaggcgagcaattttgtccgcaagaaggtgctgctggtggaatcccttctggccctgagctttgccgccttctgcttcattctgcaatcggttccatgggccattcccggagcctctctgggctggatatcaattctgtccgcctttctgctgctcatcctgatcgaccagaaggatatcatcaaggtcatggccagcgtcgagtggggcatcatgctgctgctcgcttctctcttcattttcaccatggtcgtcgatgaactgggcctcatccactggttgggctctcaggtggtgtctgtgatcctccgagtggacgaatcataccagaccatggtcggtatgctcctgatcctctggctttcggccctgctctccgcctttattcacaatgcggcggtggcacccatcatggtgaaactctgcactgacatggtcgtatatgaccaggtccagatgcccctactgccgctcatctgggccacaagcatgggcaccagctacggtgccaatggcactctcttgggctccctggccaacgagttcgccgcggtggtgggcaaagctcatggctacaagatcaccttcaggtcattctttgtggttggtttcctaatcatgctattcaccgttgtcatctgctcgattttcctaattattgcccactcaatttttgattggcattagattaggttaggccttcatttgtttataataatatgtatactacattttaaagattgttttgtatttcgctaaaattttctaccgtatgtatgagtttatacgaaatttgttggccggtaactgctggcccaccaaatatttgctgaaaccattgcaattgccgtttagggcacaacaccattttccgaccagcgggggaaaatgcaaatgagtttcattgttttccagtcggaggggccatcagtttttggcgcctggaaaacgcgtgcatgcaggacatacacacaggcactgagagaaaacagtgctatgcagccatattcctttcttagctgtattatctctgaatgaatactcatgcaggatttaggtactaaataaaatcctatactgtatattactatattactatattattacatcagggctggcatatttttcacagtgcataaatgcgtatcgatgcattttctcacacatatgggcgcatgtatattaaatcgcgttttcgctggcgtcttttgtttaccaaattgaatttttcattaccgcctgaccaagtgctgttgttgggtttttgcaatgcagttggcgttgttgtgtcctttggacacccgtgaaggacaccccttgcccctctcaacactcggctaacacacacgctctcggtttataattggattttgattcgttttgcataaaaagtatgctaacatccagacgccagacaattcggcgaaatagcgctatgtgcgttcgaattttatggcttccacagaggcgtcgctttgtccaggactcaaaagcgagcaaaaagtgcgtgacccagtcgcaataatagcgaaaaacatctggagtccttattgagctgctccccccttctcgacccgattggcatataatttgactgcattcctactcacagttgtgtgtgtgtgtatggcttttgtatttattgcatgccaaacaaaaaattcattcgagtgctatatttgtgaat

SEQ ID NO: 32663 - DNA, 2073 bp, DROSOPHILA
atgaatccaattatcaagaaatatcgcctgaggctaaggagaactgaacgggactcgaccattggctatgtgtttcgcatcatccgaattgtcattctattgtctctctggaccggatccacgatcatcctgtttctccacaagcctgaagagctcgccacgtcgatggtgaccgtgatgcccaacaagacggccttccggaatgttaagatgaagcaggattccgtggagatacgcctgaatggtgccataaatgcgtatctgactaaccacagggttaggacatccaacttttcggctgttggagttcgattggagtggcgggatcgaggaatgaatcgtagcctttggcgcactggcatgtggatggtgtacatgtacaaggataagaagaagtacctgcaggttaatagggtctttcagttctccatttcaggatggcaacaggagaggtccctgatccagcgtactttgccaactgatcgtagtcttgagaactccgtctatgactgggcctttgcgcagacggtgatctcattcgagagcatgagcaaggatccggtgggtctgctcatgacggtgaacagcactccgttggagcacggactgggtatactgtatgccgcccttctgctaatcggtctatatgccattattatctgggaattttcggaccgtattctaagcactttgctcataacagctatgtccctcgccctgctcaccgttttggggagcaggcccactctggaaacgattgtgagttgggtggactgggagaccatgatgctcctgctgggcaatatgattataacatcgcgcatggcagatacaggcttctttgactacctggccgtggtcgcctatcgcatctccaagggccatgcctggctgctgatcggtcttttgggattcttcgtgggattgacctcgactgttgtggacaatgccaccgtggtgcttctcttctgcccacccgtcattcgattgtgcgaggtaatggacttgaggaccaccttggtgctcatcattgtagcaatctatgcaaatatcggtgggtccattaccccagtgagtgggccacccaataccatcatagcgaccaataagatggtggagtccgcaggtattaattttgttcgtttctcgctactcatgcttccgactgctttgatttgcctggcgtctacctttggcctaatctactggaccatgggtaagaagatctacattctggacgaagatcaggtgaacctagcagagaagcggcgagaaaataccagaacctcttttgatatccagctgagggtcgccgaactgcgaagacagccaaggagcaaggtaatccctccagctgagagctacttcataacactggcaaccttggaggcgagcaattttgtccgcaagaaggtgctgctggtggaatcccttctggccctgagctttgccgccttctgcttcattctgcaatcggttccatgggccattcccggagcctctctgggctggatatcaattctgtccgcctttctgctgctcatcctgatcgaccagaaggatatcatcaaggtcatggccagcgtcgagtggggcatcatgctgctgctcgcttctctcttcattttcaccatggtcgtcgatgaactgggcctcatccactggttgggctctcaggtggtgtctgtgatcctccgagtggacgaatcataccagaccatggtcggtatgctcctgatcctctggctttcggccctgctctccgcctttattcacaatgcggcggtggcacccatcatggtgaaactctgcactgacatggtcgtatatgaccaggtccagatgcccctactgccgctcatctgggccacaagcatgggcaccagctacggtgccaatggcactctcttgggctccctggccaacgagttcgccgcggtggtgggcaaagctcatggctacaagatcaccttcaggtcattctttgtggttggtttcctaatcatgctattcaccgttgtcatctgctcgattttcctaattattgcccactcaatttttgattggcattag

SEQ ID NO: 32664 - protein, 690 aa, DROSOPHILA
MNPIIKKYRLRLRRTERDSTIGYVFRIIRIVILLSLWTGSTIILFLHKPEELATSMVTVMPNKTAFRNVKMKQDSVEIRLNGAINAYLTNHRVRTSNFSAVGVRLEWRDRGMNRSLWRTGMWMVYMYKDKKKYLQVNRVFQFSISGWQQERSLIQRTLPTDRSLENSVYDWAFAQTVISFESMSKDPVGLLMTVNSTPLEHGLGILYAALLLIGLYAIIIWEFSDRILSTLLITAMSLALLTVLGSRPTLETIVSWVDWETMMLLLGNMIITSRMADTGFFDYLAVVAYRISKGHAWLLIGLLGFFVGLTSTVVDNATVVLLFCPPVIRLCEVMDLRTTLVLIIVAIYANIGGSITPVSGPPNTIIATNKMVESAGINFVRFSLLMLPTALICLASTFGLIYWTMGKKIYILDEDQVNLAEKRRENTRTSFDIQLRVAELRRQPRSKVIPPAESYFITLATLEASNFVRKKVLLVESLLALSFAAFCFILQSVPWAIPGASLGWISILSAFLLLILIDQKDIIKVMASVEWGIMLLLASLFIFTMVVDELGLIHWLGSQVVSVILRVDESYQTMVGMLLILWLSALLSAFIHNAAVAPIMVKLCTDMVVYDQVQMPLLPLIWATSMGTSYGANGTLLGSLANEFAAVVGKAHGYKITFRSFFVVGFLIMLFTVVICSIFLIIAHSIFDWH

SEQ ID NO: 32665 - DNA, 2453 bp, DROSOPHILA
aattgtcaatggaaaggtggtgattccgacgcaacccaagagctgtaaactgctggagaaggagaagcagaccgatcgcaccacgaggatgcttctggcggtactgctgctcttcctggtcaccgagtttccacagggcattatgggtctgctgaatgtgctcctgggcgatgccttctttctgcaatgttacctaaagctgagtaagtattttaggattaagacacccactcctccgctgtctgtaacccgtaattgctttattggctatgataattgactgaatttatggttggtgtttaggtgggcccagtttggcacattcatcaatcatacgcaccgttggctgccataattgcaccacaaatttgaggcttcaatgaaggcctggcattgacgtgttcaataagtgtacattttgtttatctcgtacacccaaaataaagtagtcttacatttaaaacttcgcagatactattaaattgagagatttttttctttaatttgagtaaaagtataaaattgaaaaaaaaatattttaaacatttaatatgtagtttttagctagcatatgttttttcaagtgtaggaggtataaaatctaatcgcccttgaactttatgaaagccctgcccatagatggcgtgttggtggaacccgacatttatggcatttcgattttttcgtttcaggtgaccttatggacatcttggcgcttattaattcgagcatcaacttcatcctgtactgttcgatgagccgccagttccggagcacgttcgcgctcctcttccgtccgcgctggctggacaaatggctgccgctgtcgcagcacgacggcgaagggagggtgggcggaagtggcggcctgggcggctacggcggatatggacggcagcggttgctgcacacggatgccgttagcaagagcatggccatcgatctcgggctgacgacccaagtgacaaatgtgtagcaggagagcagcggccgggcggcgatgtcagccgcagccggcggagcagctgcatcggtggctctggccctggcagccactgatgttgatggatgtccgcctgccaccgatgctgctgtttccactaacgacatcagcctggtcgagaagctacatttgcagcccagtccaagggggactgcgatatccagtggccagcatcgaaggcggcgcagtgggagtggcaccaagtgcatctggcccacgacggactggctgagaaagctgcgtaaccagaaggctagagaaacggagcaatcctccgaacaggacatagagctgggcaagagctccatcaacaggcgcagcagtgttcttctaatggtattactaagcagctccgatgaggttaaagccaaggcggttttggtcagtgaacagccgccgagtccagcggacgaggatgtggaagacgccattgacgccctctggctgtgagacgacccctcacttccattttgtacgccctgtaaattatccaagtacccactaatatttaactaccgtgtacagaccaattattgagacaaattgttatgcgctgattccattattttcccgccagtgttgtcttggcgaatcgagagcccctttcgctgagactttgctttgctggaaaatgagtggattttccttgaaaggactccctggaagcagcctgcaacattttgtgaccacatttgataagtgatatacttgactaagtttccccccttaatagttgtgtaagtgctaagcgcgtctctagatataaacgaattagtcatagtctaactattaattaagatatattgatgaaataattcggaagctaagagattaaatttctttttatattgaataaatgttttttcgaagtaaacttgattcaattcacttattgtaagtgttattgcgacactttgttttaattaaacggaatttatattgaactttgataaacgaatgcttttgaatgcatttggctgcggcgaatggctgtttaattttgtcgttgaatttcattttcgggagatttactgccgacaaaaacccagtgattggcactcaaacatcaagcacccgtattgccttggtccttcaggcaatcctgctggcataaggacgaataatataaacgcacaactgacagtaaaaagtgactgagcgcaaatggcaacgttgagaacgtcaagggcgttgattaattgtaattttaatcaaagggcgaggcgaatttgtcaacagcgttcgagtgggagtggaacacgcacagaaacaaataaaaggactaaaactgatgacccaattcgtagctgctaatggccagcagtttcaaggacaaagatctagctatagatatgatgtataacttgaatcgaaggggctacaaactcaggaagtacgcggcatcgattgcgacgtcaaaagttaaatttaaaattacaaaatgctaagt

SEQ ID NO: 32666 - DNA, 453 bp, DROSOPHILA
atgtcagccgcagccggcggagcagctgcatcggtggctctggccctggcagccactgatgttgatggatgtccgcctgccaccgatgctgctgtttccactaacgacatcagcctggtcgagaagctacatttgcagcccagtccaagggggactgcgatatccagtggccagcatcgaaggcggcgcagtgggagtggcaccaagtgcatctggcccacgacggactggctgagaaagctgcgtaaccagaaggctagagaaacggagcaatcctccgaacaggacatagagctgggcaagagctccatcaacaggcgcagcagtgttcttctaatggtattactaagcagctccgatgaggttaaagccaaggcggttttggtcagtgaacagccgccgagtccagcggacgaggatgtggaagacgccattgacgccctctggctgtga

SEQ ID NO: 32667 - protein, 150 aa, DROSOPHILA
MSAAAGGAAASVALALAATDVDGCPPATDAAVSTNDISLVEKLHLQPSPRGTAISSGQHRRRRSGSGTKCIWPTTDWLRKLRNQKARETEQSSEQDIELGKSSINRRSSVLLMVLLSSSDEVKAKAVLVSEQPPSPADEDVEDAIDALWL

SEQ ID NO: 32668 - DNA, 4385 bp, DROSOPHILA
gcttacaaaaccaaaaaccagattttgtgcttcaaatcacaaacataacgaaagaaatatgaatggaaaacagaggattttatcatcacttgaaggctgacaaaacatttggcacaatttacattgtccggcgatttattgccgtctagagacaaaaaacactccggaaaattgtcactttgcttgcagtaagaaagtaacttttaattagaggttactgcagctatgcagctgctactgcggttgctactaaaagcaaaagtgaagatatatcctttgaatctcagcacaaattgcattctccgtattttctcatttgtctaatggagttatgtcaccaagaaatgcgtgagtgttacactcacaaaatatgttctattcccaagaaattcttctctgtaagtaagtgtaaaagtgtgtacactaactctgtttgtattaaagacaaatgcataagaatgccttaaattcgtctacgtgtaacatgtaagccagaatttttgttgcatgttacacgttttcccacaaattgccaaaatcatctgcttctgccggcccactagtcgtatgcgtattattgattacggaacgaggccttgttttcttaccatttcggacaaatggtaatgacatttcattgttgattcgtttgaaatcgtacctttgacctgccctgaacttggacatcgttctttgcatgtggcatgcaatgccattgtatttggggaatttcgaagcttaaattctggtaaaattcaaaccacaacactgaattcgttttttattcacctaacgcctgatgtttatttgcaggtagcaggtagcactttcgccacgcagcctgcatatttgagtgttggaatttccgaaaagggaatttaaatgaaacgccagaggagcagcggggcgcactgagttggcagccggacaccgcggtcaatcaaacggagtccttgcaggacatcccaccaccgactaccatctggccttcattgacaccatggtcacgaacatgtcgcagccgcattattgcggcaccggcatcgatgatttccacacaaagtgagtagaacgaggacgtggacttaggcctgggcacatagcccctgggtatgtctgcatattaattagttttttaagtgtaatttacataatgatttgccagccggggggcgcataatgaaatcatgtgtgtaattgcctacggccgtggtggcaaaaaggctaacgaagtgtgcctaatgtggatgggcccctttcggattaaactgaacaaatactcgcataaatccataaagcagatgttaaaggtcggagatgaacattttgaaaaatatattgagttcaatctaaccaaccatgttgtttattcggtttctttctctacataagctctaattactttaagaatttaatcatacccaattttgtgctcaagtgaaactggttttaaatatttatcccaattttttttgtctttctccccaacagctacaaatactttcacggttacttctcgctgattgtctgtatcctgggaaccattgcgaataccctaaatatcatagtgctgacccgacgggagatgcgctcccccacaaatgccatactcacgggtctggctgtcgccgatctggctgtgatgctggaatacataccctatacggtgcacgactatatcctcagtgtaaggctgccgcgagaggagcagctcagctacagctgggcgtgcttcatcaagtttcactcggtatttccccaggtgctgcacaccatctccatttggctaacggtgacgctggcagtttggcggtacatagcggtaagctatccgcaaaggaatcgcatctggtgtggaatgcgaactactctgatcaccatagccacggcctatgttgtctgtgtcctggtagtgtcaccttggctgtacctagtcacagccattgccaagttcctagagactttggatgccaatggcaagacgattgcctcagtgccattgagtcaatacattctggactacaatcggcaggatgaggtgaccatgcaggtcatgtcgagtacaacgccagatgtttcctgggcgataccaagtgattcggccaatggaactgcagttagcttgctaagtctaaccacagtgatacccctaaccacattaagcactggagtaaccacatcctcgtcgttgggtgagcgcaatgtgactgtctataagctgtatcacagcgcactggcgctgcgtgatcggcagttcaggaatgcgaccttccttatatacagtgtcctgatcaagctgataccctgcttcgcactgaccattctgtctgtgcggctcatcggtgctctgttggaggccaaaaggaggaggaagatcctggcctgtcatgcagccaacgatatgcagccaattgtcaatggaaaggtggtgattccgacgcaacccaagagctgtaaactgctggagaaggagaagcagaccgatcgcaccacgaggatgcttctggcggtactgctgctcttcctggtcaccgagtttccacagggcattatgggtctgctgaatgtgctcctgggcgatgccttctttctgcaatgttacctaaagctgagtaagtattttaggattaagacacccactcctccgctgtctgtaacccgtaattgctttattggctatgataattgactgaatttatggttggtgtttaggtgggcccagtttggcacattcatcaatcatacgcaccgttggctgccataattgcaccacaaatttgaggcttcaatgaaggcctggcattgacgtgttcaataagtgtacattttgtttatctcgtacacccaaaataaagtagtcttacatttaaaacttcgcagatactattaaattgagagatttttttctttaatttgagtaaaagtataaaattgaaaaaaaaatattttaaacatttaatatgtagtttttagctagcatatgttttttcaagtgtaggaggtataaaatctaatcgcccttgaactttatgaaagccctgcccatagatggcgtgttggtggaacccgacatttatggcatttcgattttttcgtttcaggtgaccttatggacatcttggcgcttattaattcgagcatcaacttcatcctgtactgttcgatgagccgccagttccggagcacgttcgcgctcctcttccgtccgcgctggctggacaaatggctgccgctgtcgcagcacgacggcgaagggagggtgggcggaagtggcggcctgggcggctacggcggatatggacggcagcggttgctgcacacggatgccgttagcaagagcatggccatcgatctcgggctgacgacccaagtgacaaatgtgtagcaggagagcagcggccgggcggcgatgtcagccgcagccggcggagcagctgcatcggtggctctggccctggcagccactgatgttgatggatgtccgcctgccaccgatgctgctgtttccactaacgacatcagcctggtcgagaagctacatttgcagcccagtccaagggggactgcgatatccagtggccagcatcgaaggcggcgcagtgggagtggcaccaagtgcatctggcccacgacggactggctgagaaagctgcgtaaccagaaggctagagaaacggagcaatcctccgaacaggacatagagctgggcaagagctccatcaacaggcgcagcagtgttcttctaatggtattactaagcagctccgatgaggttaaagccaaggcggttttggtcagtgaacagccgccgagtccagcggacgaggatgtggaagacgccattgacgccctctggctgtgagacgacccctcacttccattttgtacgccctgtaaattatccaagtacccactaatatttaactaccgtgtacagaccaattattgagacaaattgttatgcgctgattccattattttcccgccagtgttgtcttggcgaatcgagagcccctttcgctgagactttgctttgctggaaaatgagtggattttccttgaaaggactccctggaagcagcctgcaacattttgtgaccacatttgataagtgatatacttgactaagtttccccccttaatagttgtgtaagtgctaagcgcgtctctagatataaacgaattagtcatagtctaactattaattaagatatattgatgaaataattcggaagctaagagattaaatttctttttatattgaataaatgttttttcgaagtaaacttgattcaattcacttattgtaagtgttattgcgacactttgttttaattaaacggaatttatattgaactttgataaacgaatgcttttgaatgcat

SEQ ID NO: 32669 - DNA, 1389 bp, DROSOPHILA
atggtcacgaacatgtcgcagccgcattattgcggcaccggcatcgatgatttccacacaaactacaaatactttcacggttacttctcgctgattgtctgtatcctgggaaccattgcgaataccctaaatatcatagtgctgacccgacgggagatgcgctcccccacaaatgccatactcacgggtctggctgtcgccgatctggctgtgatgctggaatacataccctatacggtgcacgactatatcctcagtgtaaggctgccgcgagaggagcagctcagctacagctgggcgtgcttcatcaagtttcactcggtatttccccaggtgctgcacaccatctccatttggctaacggtgacgctggcagtttggcggtacatagcggtaagctatccgcaaaggaatcgcatctggtgtggaatgcgaactactctgatcaccatagccacggcctatgttgtctgtgtcctggtagtgtcaccttggctgtacctagtcacagccattgccaagttcctagagactttggatgccaatggcaagacgattgcctcagtgccattgagtcaatacattctggactacaatcggcaggatgaggtgaccatgcaggtcatgtcgagtacaacgccagatgtttcctgggcgataccaataaccacatcctcgtcgttgggtgagcgcaatgtgactgtctataagctgtatcacagcgcactggcgctgcgtgatcggcagttcaggaatgcgaccttccttatatacagtgtcctgatcaagctgataccctgcttcgcactgaccattctgtctgtgcggctcatcggtgctctgttggaggccaaaaggaggaggaagatcctggcctgtcatgcagccaacgatatgcagccaattgtcaatggaaaggtggtgattccgacgcaacccaagagctgtaaactgctggagaaggagaagcagaccgatcgcaccacgaggatgcttctggcggtactgctgctcttcctggtcaccgagtttccacagggcattatgggtctgctgaatgtgctcctgggcgatgccttctttctgcaatgttacctaaagctgagtgaccttatggacatcttggcgcttattaattcgagcatcaacttcatcctgtactgttcgatgagccgccagttccggagcacgttcgcgctcctcttccgtccgcgctggctggacaaatggctgccgctgtcgcagcacgacggcgaagggagggtgggcggaagtggcggcctgggcggctacggcggatatggacggcagcggttgctgcacacggatgccgttagcaagagcatggccatcgatctcgggctgacgacccaagtgacaaatgtgtag

SEQ ID NO: 32670 - protein, 462 aa, DROSOPHILA
MVTNMSQPHYCGTGIDDFHTNYKYFHGYFSLIVCILGTIANTLNIIVLTRREMRSPTNAILTGLAVADLAVMLEYIPYTVHDYILSVRLPREEQLSYSWACFIKFHSVFPQVLHTISIWLTVTLAVWRYIAVSYPQRNRIWCGMRTTLITIATAYVVCVLVVSPWLYLVTAIAKFLETLDANGKTIASVPLSQYILDYNRQDEVTMQVMSSTTPDVSWAIPITTSSSLGERNVTVYKLYHSALALRDRQFRNATFLIYSVLIKLIPCFALTILSVRLIGALLEAKRRRKILACHAANDMQPIVNGKVVIPTQPKSCKLLEKEKQTDRTTRMLLAVLLLFLVTEFPQGIMGLLNVLLGDAFFLQCYLKLSDLMDILALINSSINFILYCSMSRQFRSTFALLFRPRWLDKWLPLSQHDGEGRVGGSGGLGGYGGYGRQRLLHTDAVSKSMAIDLGLTTQVTNV

SEQ ID NO: 32671 - DNA, 3207 bp, DROSOPHILA
gccatggttttgccgagcagtgagtggagtttccccagctaatgggggtcagtcggcagtcgtccggcagtctcttatctaccccccaaaacttttttgttgctgggaggtaagtgtttacataaattatgtcagatgagcagcccggaaatgcttgtcatcaattttttgcgctccatctatgtatgtatatgtatatatgtgcgcttgtctcgtataaatcattctggtgggtggggaaaaagccaaccggaatgcgggtttcggctgacaatttaacatgccaaacacgttggttttggtttggggcgattccgggttgtctgcccgtatcgagggccttaacctatttaggggcaattatggtgatggaaatggcgaaatggcccaggaattctgcagggaaatcccggggatgctgagatttttctttcactccttcaatcactctttatgggccaacttatggctggcaaaatctcagattgaggtcattttgttgcccgcaattaattagctaaaaatatcgccaccaatctggagacacttgttggggttccgttttcaattgactgcaataattgcaatgccatttttatggtcgattggataattgcgggaggaatgtgtccttcgccttggtcctttggctccattcgaaaacttccctggcttctgtcctgggaatggctggcttttagttatgtaatggaattgaaactattcaattaatgtatacaagttcatattaatagcacaagttaatgatttaatttcagtcataaatgtcattagtttttaccatcgtttactggttaactcttgccaaggtcataaagttcgcaaaaaatcagtttaaaagctaagaattgggtgcgaggcacgttgccgtcttgtggtcaaattctatgggctgttgggttatataagcacgccacttggccaatttggggagcagaacgcgcacgtcgctgccgcaccattaacaattgcttccacgatgagactgcacttggccctgatccttggattttgcctagttggctgggcccgctcgcagggcaccaagtacggactgtggactccggatcgggcgcactccgattctcagcccatccagtggacgggcgggcaattcgagttcccatgcgccagtaccaagtcgctcttcaagagctccggaaagtttatacccaagaatgtgattgccacgcgggcgcagctcattggagacaccatctatctggctctgccgcgctacaggaagggagttccggccacgctggtgaagaccagtatcaagccgggcacctgctccaccacctttaagccctatccctgctgggacctccaggaggagggcaactgcaaggctctgcaatcggtggtggatctggtggtagaccaaaacgaggtgctctgggtcttggacacgggcatagtgaacactctggagactccggtgcgcaagtgcccaccaaaagtggtggccatgtcggtgaagactggcaaggttctgaagaccgtctcgctggagggcctgacttccagcaattcccgtctccaatatctggtagtggactatgctccggatggcggctgctttgtctacgtcagcgatgccgccaatcgggccatcatcgtgtacaatctccaggcggatcggggattcagggtggtgctgcccaaggccgttaccgccggctgtcggtcgagggatgtcctctacatagccctcatccgccgggactgcggctcaacggaactgtacttcacctacctgagcaccaacaaactgttctccctgaagtcagagtatctgaggagtggagtggccgatggacgcatcttgggtgagttatatatttcgaatttcaaagaaaacatttattaagttatcataatattcagatctcggcaagaagcccagtcgcatggtcatcatcggcacggacaacggctcggcgatcttcttccgcaacgagggcgacgcggaggtgtaccgctgggacacgaactccacattcgtggaggccaacttcaagccggtttaccgcagtcagacctgccagctggtgacccatgctgtgcccgattacaagcggaacacgatgcgagtcctgcagagcaattttccggattacatgcagaaccgcgttggatgcggagccattcagcagctgggtctgatgcagggctgttggtaaccatgttaacaccccattttggccaccactcgtcctccacaagccaatccgaattgaaagctgaaaaactgaatatgccattgcagttagattggcaataaccgagaatgggtcgctctttggaccctcgagtgctcttcgtatttggtattggtgttttgtacataaactaacgactttggtcgctattgttgttatctaagctaagcaaataaacgtttcatattcatacagaaggagaggctaaataattggggctactgtcgctgataaatggaatatttcaatatgtaaattggtagtccacatacactgtatatgcatggatagcagtttttctcttttaatagctttttgcattgcttttattgcactttattttacctcttaaaaacttaattttatttgttactgtttctggcaactttactctgccataaaacttgggaacaacagcgacattaattaagctaattggaactggtcctcgtgttaaagtagtcagtaaagtgcacagattatactgccattcccatatctcttcgcccctcactgacggaaaatcgagaggatcgaacttcgtaacctggagacgttgggtgtggaaaaggccaggcaagtgttaattggaagttggctgataaattgcacggcatcccttgcagtggcttccgattccgtatatttcgtcgactcaatcggaaaaacagccacaaggcgccgcgggaaattgcgctcgatataaaatcaattaatcagcaactcttgtctgtgcgctgcgagtgtgacctttgccccggggggctgcgctatggcttcgtggcgtgttgactacgcccactcgcagtctgaagcggatcacgctgcagcccatggagccccaataaatgtgccaatgccacccagctgagctccaaaaataccaaacggaataaaagtcaccggaatcagctccaaccgatgggagtggaagcagctgccaccgaaaaggccgtgataa

SEQ ID NO: 32672 - DNA, 1149 bp, DROSOPHILA
atgagactgcacttggccctgatccttggattttgcctagttggctgggcccgctcgcagggcaccaagtacggactgtggactccggatcgggcgcactccgattctcagcccatccagtggacgggcgggcaattcgagttcccatgcgccagtaccaagtcgctcttcaagagctccggaaagtttatacccaagaatgtgattgccacgcgggcgcagctcattggagacaccatctatctggctctgccgcgctacaggaagggagttccggccacgctggtgaagaccagtatcaagccgggcacctgctccaccacctttaagccctatccctgctgggacctccaggaggagggcaactgcaaggctctgcaatcggtggtggatctggtggtagaccaaaacgaggtgctctgggtcttggacacgggcatagtgaacactctggagactccggtgcgcaagtgcccaccaaaagtggtggccatgtcggtgaagactggcaaggttctgaagaccgtctcgctggagggcctgacttccagcaattcccgtctccaatatctggtagtggactatgctccggatggcggctgctttgtctacgtcagcgatgccgccaatcgggccatcatcgtgtacaatctccaggcggatcggggattcagggtggtgctgcccaaggccgttaccgccggctgtcggtcgagggatgtcctctacatagccctcatccgccgggactgcggctcaacggaactgtacttcacctacctgagcaccaacaaactgttctccctgaagtcagagtatctgaggagtggagtggccgatggacgcatcttggatctcggcaagaagcccagtcgcatggtcatcatcggcacggacaacggctcggcgatcttcttccgcaacgagggcgacgcggaggtgtaccgctgggacacgaactccacattcgtggaggccaacttcaagccggtttaccgcagtcagacctgccagctggtgacccatgctgtgcccgattacaagcggaacacgatgcgagtcctgcagagcaattttccggattacatgcagaaccgcgttggatgcggagccattcagcagctgggtctgatgcagggctgttggtaa

SEQ ID NO: 32673 - protein, 382 aa, DROSOPHILA
MRLHLALILGFCLVGWARSQGTKYGLWTPDRAHSDSQPIQWTGGQFEFPCASTKSLFKSSGKFIPKNVIATRAQLIGDTIYLALPRYRKGVPATLVKTSIKPGTCSTTFKPYPCWDLQEEGNCKALQSVVDLVVDQNEVLWVLDTGIVNTLETPVRKCPPKVVAMSVKTGKVLKTVSLEGLTSSNSRLQYLVVDYAPDGGCFVYVSDAANRAIIVYNLQADRGFRVVLPKAVTAGCRSRDVLYIALIRRDCGSTELYFTYLSTNKLFSLKSEYLRSGVADGRILDLGKKPSRMVIIGTDNGSAIFFRNEGDAEVYRWDTNSTFVEANFKPVYRSQTCQLVTHAVPDYKRNTMRVLQSNFPDYMQNRVGCGAIQQLGLMQGCW

SEQ ID NO: 32674 - DNA, 3761 bp, DROSOPHILA
cggacacgtggccgcctggcccaccaatcccaatatcttctacgtgtgcaagtcgacggttaaccagaacctgaacgacaccatcgtcatctacccctcgctgcacaggtgcaacgatggcgagaccttcgtggactacgtctgccgcagcggatcgaatgtcctgccgcccagcaccgatgatccttcggtgatcatcgaggatcccaacgacgacgacttttcggtgctgcccaacacctgtcagcacgtgggcttgatggccgatggaaacgactgccggaagtactactactgctcggctctaaatggcaccctgcggcacatggactgccccaatgggacttactaccgaccggagctatcctcctgcgtcctgggaagctgctgaggaagatgcattcctgcactttatttattcctcttcaatggattacatttaataaacaactcatgtttaccctggaataacaatctatttgacatgaatttatgaattcccatttcaaaaggtatcagtttgataataaagattcaaccaccatgtccgtgggtaattaaaccagaatgagttctttgtttttttccaataaaagtgcaatagaaatggactagtactgtcttggttctttcttgctaagagtgctgtgactaggtcataaatgttccatagaatgtttttttcgtgacaacattgcagtttatctattaattataccgaaacattctgcgtttggttgtgaggtactatataaggcggagtgtgaagaggtctacttagaaagtttgcaacatggattcatctcgcctgattatctgcctcctaacttttctgttgtttcaaacgggaaaagggttggggaacggcagttatctggagctcagattggatgcagctgctgaatcctgtccagatgattactactttaacgaaactatccaagcctgcgtatctacagacactaccagctgtaccaatcaccaaatcggcaaatgtccgatggccacagaaatggacgagttttgcgtgtgcaaagataagcaccttcagatctggaaatgccctgaaggaacctacttcgatgccaaccgattggtctgccgggtgggaagcgttgagtgccaggacgattatactccatccccatgtcctaacagcacggcaagcgatgtcttctgcctctgcatcgatggcaaatggcatcttaactactgtccaacgggctttacctttgatgacgagctgcagatttgcctgaacacaggatctgatgacgacgagttgcccagttcgtctggaaagtgccagcggcttggattgtttggtgatcccgctgactgctctgggtactatcattgtcgcgaaaagggcagtgatattgagtatttcagatgctcggtaggaaccatcttcaatctaatttcctttgcgtgcgttactggaacttgttgacccaacatattatagttattgtagctagcctatcttggaataaaactgattaaaactgattaaactattttcaatgaattccggatttatcagttcgcagtttcgatgatactcttcgaataattacaattttagctacgcttagtaagttttctaaatttattattacgtcgtaaaattttggttctttatcaaatcgataatacctagagaagcttatctgtttaattaagaaaaagacacttgcctggctgattaggtggtgctataaaagctagtcccgcagatgacccagccaacagtcttcaagatgaggtcttcagtaccggtttgtctaatcctgctcgctctggcgttgggatcggcgtgggctaatgataatccctgccaggatgtgcgcattcccggcttcgtttgcatgaactgcaccaccttgggctactgcatccgcgatgccaccggcagctgggaaacgatttcgatgctgggctgccaatcggagtacaatttctattgcagcgacgagggtaccttcggatgcaccttccagtcgcagtgccaggtgcccaagagaggtcccttcagctgtcagcaggcgggcctgttcccggatccgtacgactgtaggcggtaccacgagtgcagcgatcagagtgtggacacccctcgcatctgctccaacggagcgggctactccacactcacgggcacttgtgttctgccacgggagagtgagcagtgcatccaggagcagttcacctgcagtcggtcgggacaagtgggtggatgggcgcccgacaatcggtacttctacgtctgcgtcaatgacacggccaattcgctgtatccgctgatgatgaagtgccacgagggattcgttttcaacagctacagctgtgtgcccgacaccaggagcatgaggagcattcaggcgatggagtcccacacgtgcatgaacaacgataggtaccaatgccccttccgaacctctgagatcgagtactgcaagtgcgtcgatggagaactggaggtgatgacctgtcccgccggcttccaaattgatcctaagatcctgacctgcgtgactgataggatctatcagtgctcggactttgagatcctcagctgtcccaatgtctccaccaaggatgagtactgcatatgcatcgatcaccagctgcagatctacagctgtccaatgggacagtatttcaatgctgagactcgaaagtgccaatcagagtcagagtaatgaattgttttcatggtaccaatattgattcaagtaaatgcctatttaaaaaattgaaatcattctgaacattttaagataaactacaaataactataaatattcaccaaaattttaatgagacccagtaacgacaacaaatcagtttgaatcttaagcctaagaaagtggagggatacggactcaatcgtcacattcccgcaccacaggatgcaggacgatcgaggctccgttgcagcccgtgcgatccgagatgaaatcgtggaagttgctctccagcgcccacatgaatcgcttgtgacccgggagcacttgggtggacagccggcagtcgcctccccgctgcacctcctgcagattggcggccttgaagcaggtctccgagtcccacaggtaaatgtcgttctcgcccttgtagcggaagaagagcgaggtgccgccgtcggcgcccagcagcaccgcctgtttgccatagggcttggggcccacgtcgatgatggagcccgctccctggccaacgcgcaggtactcgcccttgatggagtacagacggggggagctcaggtagctgaagaacagggtggaggtgccgtccggcttcgaggtgagcgccacgtacagcacatcgctggtgggggcggtggccttcggcaggacgatgcggtaggacttgttgccggtgatgtcgtataccaggatactacgtgctccagcatcggccacatagctatggttgaaagtgaaggaaatataatgtggaatgagattagatatcatgtatgcaatacaaatcgattttatttggtatatgatgagccacacttctgagaactaccttgagcagataagatatgagcctcaaagtggctaatgcccttttgattggctcaatgatcgctgattgaaagcatgattgaaagtgtgtggtaaaagtactccaaactcttgattcagttcgatgatttcaacgaatattttatgactgcaatatgaatctctgaatatcattgtgctgataaataatggttagtaataatggttaataataatgtaatg

SEQ ID NO: 32675 - DNA, 1421 bp, DROSOPHILA
atggccacagaaatggacgagttttgcgtgtgcaaagataagcaccttcagatctggaaatgccctgaaggaacctacttcgatgccaaccgattggtctgccgggtgggaagcgttgagtgccaggacgattatactccatccccatgtcctaacagcacggcaagcgatgtcttctgcctctgcatcgatggcaaatggcatcttaactactgtccaacgggctttacctttgatgacgagctgcagatttgcctgaacacaggatctgatgacgacgagttgcccagttcgtctggaaagtgccagcggcttggattgtttggtgatcccgctgactgctctgggtactatcattgtcgcgaaaagggcagtgatattgagtatttcagatgctcgatgacccagccaacagtcttcaagatgaggtcttcagtaccggtttgtctaatcctgctcgctctggcgttgggatcggcgtgggctaatgataatccctgccaggatgtgcgcattcccggcttcgtttgcatgaactgcaccaccttgggctactgcatccgcgatgccaccggcagctgggaaacgatttcgatgctgggctgccaatcggagtacaatttctattgcagcgacgagggtaccttcggatgcaccttccagtcgcagtgccaggtgcccaagagaggtcccttcagctgtcagcaggcgggcctgttcccggatccgtacgactgtaggcggtaccacgagtgcagcgatcagagtgtggacacccctcgcatctgctccaacggagcgggctactccacactcacgggcacttgtgttctgccacgggagagtgagcagtgcatccaggagcagttcacctgcagtcggtcgggacaagtgggtggatgggcgcccgacaatcggtacttctacgtctgcgtcaatgacacggccaattcgctgtatccgctgatgatgaagtgccacgagggattcgttttcaacagctacagctgtgtgcccgacaccaggagcatgaggagcattcaggcgatggagtcccacacgtgcatgaacaacgataggtaccaatgccccttccgaacctctgagatcgagtactgcaagtgcgtcgatggagaactggaggtgatgacctgtcccgccggcttccaaattgatcctaagatcctgacctgcgtgactgataggatctatcagtgctcggactttgagatcctcagctgtcccaatgtctccaccaaggatgagtactgcatatgcatcgatcaccagctgcagatctacagctgtccaatgggacagtatttcaatgctgagactcgaaagtgccaatcagagtcagagtaatgaattgttttcatggtaccaatattgattcaagtaaatgcctatttaaaaaattg

SEQ ID NO: 32676 - protein, 454 aa, DROSOPHILA
MATEMDEFCVCKDKHLQIWKCPEGTYFDANRLVCRVGSVECQDDYTPSPCPNSTASDVFCLCIDGKWHLNYCPTGFTFDDELQICLNTGSDDDELPSSSGKCQRLGLFGDPADCSGYYHCREKGSDIEYFRCSMTQPTVFKMRSSVPVCLILLALALGSAWANDNPCQDVRIPGFVCMNCTTLGYCIRDATGSWETISMLGCQSEYNFYCSDEGTFGCTFQSQCQVPKRGPFSCQQAGLFPDPYDCRRYHECSDQSVDTPRICSNGAGYSTLTGTCVLPRESEQCIQEQFTCSRSGQVGGWAPDNRYFYVCVNDTANSLYPLMMKCHEGFVFNSYSCVPDTRSMRSIQAMESHTCMNNDRYQCPFRTSEIEYCKCVDGELEVMTCPAGFQIDPKILTCVTDRIYQCSDFEILSCPNVSTKDEYCICIDHQLQIYSCPMGQYFNAETRKCQSESE

SEQ ID NO: 32677 - DNA, 2900 bp, DROSOPHILA
gaagctgaaactcgtccttgtgccacagatagctgcgctctaaggacttttcccttacaatggccgagatctcgttgcggatctgaagcatcagtttgcgcagcgcgccctcatcctgtacgttgtcggggatcttgggaaagatgtagtactccacgaagtcctcctcgcggacgaactccagattgctgcctggaatcttgctcatcctttgtccttttgctcctcctccttttttttatttgttagggcgttcgaggtgacactatcgacatgagtgcgtgcttccgaactgactatcgttcaaagaagttcgttcacactggtcgcgcagcagggttccgcttcagcagagcggtggaggacgtggctaagcgcttagcggtgacccaacccattcccgttatttctctcagcgattttttatgattgaagattaggtatgaaccgaagattaggcattaaattcctttactaaaagtgcatatttacaaaagctagcggtcagttttattgaaagaaatggtatttaaatatttactcgagagcactttaaagtgctctgaataagtcggccaaacaaaatcccgacttgtttacacattaaacacccactccacttgacactccagctagttggaccaatttttagtaaatgtcgttcactcacccatcattgcggcattccgatccgcgtagttgttgtaattagaaacgccgctgcgtttgccactttgcccaactcccatcgccttttcaaagttgatagatagacaaacagacacccaaaagatataaaacgctatctaaagtctgctatttcgggacttttattgctgtcaccatatgagtctgaatcagacaatcgaagattctcgtggaagttggacctaaactaaccagaaacaaagtccaaaaggggaaatacatcgtcatgttcttggaaagaatactagtgagcgtggtaggtagtttttcagaataggataaacttaagtgaatggcatttgatttttatgtccccaccgcccaacagttactgctcaacctggtggctctgcttatgggagccactgttaccacccggcgcatccagccgcgggagacaaactcctgcgagggccgtcagagtcccgggcccatctgcgagtcctgcgagctgctggccacctgcgtgcgtcactccaacggatgggtgaacattcccgtggaatcgtgcgacgtggctaatggatactactgcaacgcccggctggggagctgcaccaacgagacgggcccgtgtcatccgttcggcatcgagggcaactttcagtgcacctcgcaaggcatctttccagatccgtacgactgccagaagtaccacatgtgctacttcgtgggggccactctggtggctgctgccgttgattgcggcaacgacaaggccttcgatgcgacgactggccagtgcactttgaccctgactgactccgtctgcctgcagcgacagtactactgccccaatgccggacacgtggccgcctggcccaccaatcccaatatcttctacgtgtgcaagtcgacggttaaccagaacctgaacgacaccatcgtcatctacccctcgctgcacaggtgcaacgatggcgagaccttcgtggactacgtctgccgcagcggatcgaatgtcctgccgcccagcaccgatgatccttcggtgatcatcgaggatcccaacgacgacgacttttcggtgctgcccaacacctgtcagcacgtgggcttgatggccgatggaaacgactgccggaagtactactactgctcggctctaaatggcaccctgcggcacatggactgccccaatgggacttactaccgaccggagctatcctcctgcgtcctgggaagctgctgaggaagatgcattcctgcactttatttattcctcttcaatggattacatttaataaacaactcatgtttaccctggaataacaatctatttgacatgaatttatgaattcccatttcaaaaggtatcagtttgataataaagattcaaccaccatgtccgtgggtaattaaaccagaatgagttctttgtttttttccaataaaagtgcaatagaaatggactagtactgtcttggttctttcttgctaagagtgctgtgactaggtcataaatgttccatagaatgtttttttcgtgacaacattgcagtttatctattaattataccgaaacattctgcgtttggttgtgaggtactatataaggcggagtgtgaagaggtctacttagaaagtttgcaacatggattcatctcgcctgattatctgcctcctaacttttctgttgtttcaaacgggaaaagggttggggaacggcagttatctggagctcagattggatgcagctgctgaatcctgtccagatgattactactttaacgaaactatccaagcctgcgtatctacagacactaccagctgtaccaatcaccaaatcggcaaatgtccgatggccacagaaatggacgagttttgcgtgtgcaaagataagcaccttcagatctggaaatgccctgaaggaacctacttcgatgccaaccgattggtctgccgggtgggaagcgttgagtgccaggacgattatactccatccccatgtcctaacagcacggcaagcgatgtcttctgcctctgcatcgatggcaaatggcatcttaactactgtccaacgggctttacctttgatgacgagctgcagatttgcctgaacacaggatctgatgacgacgagttgcccagttcgtctggaaagtgccagcggcttggattgtttggtgatcccgctgactgctctgggtactatcattgtcgcgaaaagggcagtgatattgagtatttca

SEQ ID NO: 32678 - DNA, 900 bp, DROSOPHILA
atggcatttgatttttatgtccccaccgcccaacagttactgctcaacctggtggctctgcttatgggagccactgttaccacccggcgcatccagccgcgggagacaaactcctgcgagggccgtcagagtcccgggcccatctgcgagtcctgcgagctgctggccacctgcgtgcgtcactccaacggatgggtgaacattcccgtggaatcgtgcgacgtggctaatggatactactgcaacgcccggctggggagctgcaccaacgagacgggcccgtgtcatccgttcggcatcgagggcaactttcagtgcacctcgcaaggcatctttccagatccgtacgactgccagaagtaccacatgtgctacttcgtgggggccactctggtggctgctgccgttgattgcggcaacgacaaggccttcgatgcgacgactggccagtgcactttgaccctgactgactccgtctgcctgcagcgacagtactactgccccaatgccggacacgtggccgcctggcccaccaatcccaatatcttctacgtgtgcaagtcgacggttaaccagaacctgaacgacaccatcgtcatctacccctcgctgcacaggtgcaacgatggcgagaccttcgtggactacgtctgccgcagcggatcgaatgtcctgccgcccagcaccgatgatccttcggtgatcatcgaggatcccaacgacgacgacttttcggtgctgcccaacacctgtcagcacgtgggcttgatggccgatggaaacgactgccggaagtactactactgctcggctctaaatggcaccctgcggcacatggactgccccaatgggacttactaccgaccggagctatcctcctgcgtcctgggaagctgctga

SEQ ID NO: 32679 - protein, 299 aa, DROSOPHILA
MAFDFYVPTAQQLLLNLVALLMGATVTTRRIQPRETNSCEGRQSPGPICESCELLATCVRHSNGWVNIPVESCDVANGYYCNARLGSCTNETGPCHPFGIEGNFQCTSQGIFPDPYDCQKYHMCYFVGATLVAAAVDCGNDKAFDATTGQCTLTLTDSVCLQRQYYCPNAGHVAAWPTNPNIFYVCKSTVNQNLNDTIVIYPSLHRCNDGETFVDYVCRSGSNVLPPSTDDPSVIIEDPNDDDFSVLPNTCQHVGLMADGNDCRKYYYCSALNGTLRHMDCPNGTYYRPELSSCVLGSC

SEQ ID NO: 32680 - DNA, 2574 bp, DROSOPHILA
tctcatccttgaagcatcccaaagaaacgttcgccgtgtgattaccagctggacagctgctccggagctgcggcgcatagaagcgtccggcttggattgcgcaggcgatctgcgcgatatgttctcgacagtctttcgttttggcgcgctgcagggcggagatggcctctctggcgagaatgtcgcactctggctggaagcccagttgctgggcagtaagcttggtcctggcgggcggttggacccgtgcctgagcatgcggaggcggaggactggcaggcgcttcagccgcatcaaatccggaaccggaaccgccgcctacgatgtccagggacttgtaggccaggaacaactggatggccacgataagcagcaggatgaggaagaatgcgcgatagcgcttcagccagcgggcggacacagactgctccatggctagttgtatctccaggggcttttgctccaacctccgctgccaaagacgagatgctgctcctctggaatctggacgtgcgtgtgggctgtgatccgtgatgagctgtggagacgaggcggggacatgttttgctctctagtgctggcgggcaaagcatttggactggttcgtctggctaattaataacatttttccacggaaaagtctccccgctcgagcagtgtgaccgtactacggcgggaggctaaatactgcacccacatcgcagcgatgggcgccttcagcagtgatttgattcagtgatttcaagtttgtaaggcggtgcaaggaattaataaaattaatttgtagtcaccattaatatattataatttaataactctcttaacctgaattgattccgatatatgtgtgtgcttatgtgaggtgtatttatttcgatagcgtgacttgaccaaatcactgttacttcagaattgcagctgaacacataaacagctgtcgcagctgagctgtgttgaaaaattcagtcgaagggagtttatttgtataaataccgaaacaatggtggatcccaaccgaaagataaaccgtctggtcgaaagggacctgaacttcctggagtcctgcgagcttgagttcgcagaccgcttcactgacgacgacccagagttcatggcgcactgcagcaagcctgtgccggagccgccaattgtggagaactggatgggaggtggcggaggaggaggcggcttccagggcggaggaggcggtggtcatccctaccacaatcgctacaacggacatcgcagaggaggcggcgacaggggctggcagcgacgaggaggagctggctaccacaacaaccaggacaggggattcaggggtaatacccgggaagaagctcagtttctatttatagcttaccaacgcatttgttcccacagacaaccggcgcaacaacagatacgatcacatcgatcgccggaatcggtacgaaggaggcggagggtccggaggatctggaggctacaagcgctcccatgatcataaccagagaaatgatactcccaataacgaaccacccatgaaggtcagacgcgactatggaaactttgtgcctgcatccaaggattagttatcgaatatatcaaataagaatactctgcattacattgaaatattcacattgacgtttatttaatggacttaagactatactaattcctgtaatcccgcttaaacggccgactcagatatatccttttgttccttgtcctcgacagccgacatgcccacgcccatggcgctaaacagattggatacaggacctgcgccgccaacctgcgattggtagctatccatcatgttgcgcagcgtgtttacgtttatattgatgggctcaaagtcctcaatgtcatcgaaatcgtcctcgtccgcctgtggagctgtcttcttcttgccgtggaaggacttgcccacgctggtctgagccaactcgcggtccatctgctccatatacgattgaatctgtcgatcgagtgggaacacactgccgcctccagaaagtgcatttagattactctccatgtcgtcctcgtccgcgtagtcgctcatctccgaggtggagtcccagttgtcctcgggtattacgaaatccaggaaattccgcacatgggtgctgtccggttcctccggctggatgacggaattgcgctggcacgccttgcgcatggagggattcttcttgacctttgctgtcagtcctgtggaaccgtttgcctgcggcggcggctcgtcatcgtctgagtccagttctggctcctcgagccctcggtgctcaatgccctcgtagttggactgccgatctaagaactccgccagctgcttggtgaactcctcggcattcatttgtccgttcggcttgtagagcttcttgggtccgtagcgatcctgcagcatggagtctagatcctcagcgctgatattcaaccactcatccgagtcgctgggctgcaggttgttctcctcatcgcgcagctcctcggaagcagcctccgctggatggagcaacaggtcgaggatctcggcacccgctctggaggctgtgcggaaacgctcctggttgccacgaaagt

SEQ ID NO: 32681 - DNA, 513 bp, DROSOPHILA
atggtggatcccaaccgaaagataaaccgtctggtcgaaagggacctgaacttcctggagtcctgcgagcttgagttcgcagaccgcttcactgacgacgacccagagttcatggcgcactgcagcaagcctgtgccggagccgccaattgtggagaactggatgggaggtggcggaggaggaggcggcttccagggcggaggaggcggtggtcatccctaccacaatcgctacaacggacatcgcagaggaggcggcgacaggggctggcagcgacgaggaggagctggctaccacaacaaccaggacaggggattcagggacaaccggcgcaacaacagatacgatcacatcgatcgccggaatcggtacgaaggaggcggagggtccggaggatctggaggctacaagcgctcccatgatcataaccagagaaatgatactcccaataacgaaccacccatgaaggtcagacgcgactatggaaactttgtgcctgcatccaaggattag

SEQ ID NO: 32682 - protein, 170 aa, DROSOPHILA
MVDPNRKINRLVERDLNFLESCELEFADRFTDDDPEFMAHCSKPVPEPPIVENWMGGGGGGGGFQGGGGGGHPYHNRYNGHRRGGGDRGWQRRGGAGYHNNQDRGFRDNRRNNRYDHIDRRNRYEGGGGSGGSGGYKRSHDHNQRNDTPNNEPPMKVRRDYGNFVPASKD

SEQ ID NO: 32683 - DNA, 7525 bp, DROSOPHILA
gagagaactgggagaggattagcttggctgagagtcattctggggaaatggtggtgaaagttcatatagcactccgaaaatcgtcccttaaaaagggggtgatagcagttaatcgtaaaactgtaagcagtttactgcaaacgaaaaacagcatgcgaaagcagtgcaagcaagtggtgctatagcaagccagcagttaatctagcaagggtatggtaacacataagctgaaatgctaaaaatggttccctcaacagaatcaaattataaaaaaaataattataataaaaatatatctagtatttatacagtaagaaaacatatataacaataattatagaatcggattgcttttgccataagactgttatactttatagtaatcttacatgttttgtaaaaaatccgatagagggctgatttagaccagacaggacttagcctcccccgaaacccaccctcaaggtcatgcgctctcgcaacacagcacacctgtatgaattggcctcccacctgcgactcgctctctccgcagagcgtgcgccgtggacagaggactctccgctgctcgttaaaaggactaggacaactcacagaggactgcgctgtctgcagagcaagcaacagcttcgtgccagggggtgggacgcccaaccacccccaacagcgtggcagaggcacatcctggcccatcctgtggcagccccggcacctgctgcatctcaaaacaaaggccatttatttagaatggcagcgcaaagcggaagcgccaagaaaatagacaacaccacagcacacgacaccacaaaggggtggatgtgtggatgtggaagtggaaatggaagtgggtggcgcagggcaggttgcctggctcccggttgccacaacaactaactcggaccacaacaacggcaaatactgcgtcggaaaattaacgaattcgtgttcgatttaatattttaagagaagtaatagaaaactgaaggaataacttggtgaaatgcagttgaaatatctgcgaactttgctggagggccaggtaatcagtaaacgaatagaaaacgttaaaaatattcaattatatcatttgaaaatgtattcggattttcaagtttgatttctcctatttcatcattgtatgcaagaaatctttggaaatcgcatagaatagcttgatggctctctatataacaattaaaactgctttcttttccaggagcaaatccaacgaatagcaggactcgcctggtcccccaatcagcagaggttggcgatagccaccgcagatcgtcatattctactgtacgatgatgctggcgaaagacgcgataagttcagcaccaagccagcgaatcccgcgaatggtaagaactcctatgtcatccggggactggccttcagtccggactccaccaaactggcggttggccagagcgacagcatcgtctatgtgtacaagttgggggagtcgtggaacgacaagaaggtcatatgcaacaagtttcctcaggccagtgcagtgactgctctgatttggctcacctcgggatccataatagcaggtaaatcaccgtttccaaatgaaatgaacatatttcatcaggtatttaccacaggactcgaggacggcaaagtgcgtgccctgcacagcaagagcaataaatcgcagagtctctacggcggcgacagcatctgcatatccctggcggccaataccaagggaacgggttttctgagcggccacaacgatggcaccatcatacgctacttcatgacggatgaggccaccgaaccgctgggcagagtagtgcaacatccagttccaccgtttgccttagcctggccacagggtggcttctgtgccggtggctgtgatcagagaatagtgttctatgacagtatggtatgtgcttaacgagataacgtcctctggagatttcttaagccaccacttccagggtcgtcaactacgcacctttgatcattcccggacggaaggcgaacgggagttcacggtggccgcttgtagtccgaatggacaggcggtggcctttggcagcttcgacaggatacgcatcttcgcgtggagtcctcgtcaaggagcttggagcgaaagcgcaaccaaggaggtggcctgcctgtacacgctaagcagcctcctctggcgaagagatggagcccgactcgccctgggatccgtgagtggagctgtgctcctctttgagtccgtacttcgacgcaccgtgtggcaggacaagttcgagctgatcttcgtggcgcccagtcagctcttggtccgatccttgacagagccctcgcaagctctcactattgaatcgcagctgggtctagagatcgatgacgttaggattatgggtcgggataattacctggtagcccgaacggaggagtctcttatcctttgtgatttgaccagaaatttgagcagtgaggttccctggactgcctctggtcaccatgaacgcttctacttcgagaatccaaccgtttgcctgatcttcaatgtgggcgaattgagcctggtggagtacggtgagaactccatcctgggatcggtacgcacggaattcgtgaatccccacgtgatctcagtgcgtctgaacgagcgaggaaatgcaaaggaaaacaagaaactggccttcctcttggatgccaagaccatatgtgtggtggatctgattagcaggatgaccagtggacagatcagtcatgagacgaaaatcgactggctggaattgagtgagactgcccataagctcctgttccgcgataagaaactgcgcttgatcctagtggataattacactggcaagaagcagaccttgctcagcaacatatcctttgtacagtgggtcccccagagcgatgttgtggtggcccagagcaactcaaacctggccatctggtacaacattgatcttccggagcatgtgaccatgcaaagcgtgcgaggtgaagccatcgaggttctccgtgaaaatgtaggttatgctggagatactccaaatccttcaatatatccttctgaacttccatagggccgcacagtggttcgctcccaagacggacccagcgagcacaactaccagctggatgaggggctagtggagttcggcactgccgtaaatgacagtgatttcggaagagccgtgcacttcctggagtccctgggtgacaaaccggcagcaaaagccatgtggcacaatctggctttaatcgccttggaagatggaaaccttcgcgtggcccagcgctgctatgctgcattgggtaacgtatcaaaagcgtactacctggctggaatgatccagcaggcagatgagttcgaggaatcctctggctctcctggcatcctctgcccggaagtccgcgccaagctggctctgctcggctcggacttgcgcactgctgagcgtatatatctggagcaaggtgacatagagtcagctctgaagatgtaccaacagctgggcatgtgggatgaggcagtggctctggccgagaggcgtggatataacaggatcgccgagctgaagcaacagcacatggactacttgctgagtagcgagcagcaggagaaggctggtcaggtgctcgaggagcaaggtgatctccagcaggcgatgtccctgtacatgaaggccaacaaaccggcgagggctgctcgtttggctctgaagacaccgcacatcctgcaggatgagcaggtaatgctgcaagtgactgagggacttgttcgctccgagctctatgaactggctggagacatagcccatcggctatcccggcccgaagcggcactagctctttacagaaagggcggagcatatgccagagcactggaaataggacgagtggtggccccacaggaggtaacggcgctggaggaggagtggggcgactggttggtgagccgcaaacaactggatgcctcgataaaccactacatcgaggcgggagccacgcaaaaggccttggaagccgccgtgggcgcgaagcaatggcgcaaagcagtccagatagccaaagtcctggatgaaccggagctaatacagcgttatgctgtggatctagccaagcatctggccttcgcgggagatctggatggagcagaggatatgttggtgcgagccaacctgcacaaggatgccatagagctactcaatcgtcatggcaaatgggagcgtgcctatttgattggcgagaaacaccttaaggcggagcaagtccgtgagctcttcgttcaactggctggaacgctggaggagcagggcaagtttagggatgccgagaaggtcctgatagcggtcaacgaacccgacctggccatagctatgtacaagcggcgggaattgtacgactccatgatccgattggtggagcgttatcacaaggatctgctggatagcacccacttgcatttggctcgccaactggaatcccgtggtaagctgaagaacgccgagatgcatttcgtagcctccggggactggaagtccgccgtgcatatgtactgctcctctggtcgctgggaggatggctacagggtggcaaagctgaagggcaccgagggagccagccagcaagtggcctacatgtgggccaagtcaatgcccacagagggtgcagttaggttgctgagtaaactgggtctgctggacacagcagtgggattcgcctgtgattccggacaattcgaattcgccatggagctgtgcaagttcgctgggaagccaacggatgaggtgcacctgaagatcgccatgtcgttggaggatgaggggaagtttgaggcggcggaggcggaattcctgaaggccaataagcccagggaggctattttgatgtaccagcatgcaggcgattggcaggcggccctaaatgtggccgaaaatcatctgcccgatgctgtgggagaagtactgataggacaagcttcggctgccctggaaaccagtaactataaggactacgaagctctccttttgagggcccatcgtccggacttaatcatagagcactacaagcaggaatccctctacgaagatgcccttcgcatcgccgaggaacattatccatcggcactgaacgacctgcggcgtcttcaagcccaacttcaacggggacaggcgcaggcacaagctggcgaggatgccgcctccatttcgcgatcttatctgcaaaaggcagcagagtttgccaagaaggagcagtttcgtaaggcggccgagtgcctcatgcagatagattcctccaatgccgaggatgcatccacgttggaaagagctctgctacgagccgctgagatttgcaatcagtttttggagggtcaggatgcccaggagttggcccagtcgctgggaccgcggttactggccataaagcagataggacctgcagctcagctttacttggcggcggatatgcccaagcaggcggtggacgtgttcatcaagacggagcaatggagcaaggctcgtcggctggccaaggagatcgatccagatctacagcttctggcctatgtggagcagcagcagaaggctagcctcaagcacgagggcaacattgagcagctggcggacatagacatagtgtccgccctagatctcctggcggagcatggtgagtggcagcgctgcttggagaaggccaaagggctgaatcccgctctgctgcagaaatacgtggccgtctatgcagcccaacttattcgggaaggcaactgcaccacagccctggggctctacttaagctacggagcgccaccgatcgaagctcactttaatatatacaccaggatagcactggactgtttggctctgagggaggagcaaacggagagaggcaccacttggcgccagttgagggactttctcttccgcttgctgcagtctcttaaggccactccggcgcagtcccagacgaaatttgcagccagcatggagcagttcctgttaatagcccactactacgccaccagagccgcatgcaaggaggtacaggcgcttcaaccggtggctctgcgcttatccttggctctgcttcgccacacggatctgctgccggtggacaagggtttctacgaagctgggatggatctccgccaggcaggtcgcgaagccgaggccttcgttatgctcaaccactatctggacgtgtgcgaggccattgaggagggttccggtcagttggtagaccactccgacctggctagcaccgattttcccagttccgtgcccttgccggaggatatccacctgaagaacgatcccagtcttcacgaggaggtgcgtgaatgggttctcgccgtgagcatggaccagcaagtggaccaacagctgcccaccgatgatcgcggcttgtacgagtccagtttggggcccaacgatctgccctgcatgctgagtggattcccggtaagaggccgtcaaccggtgacctttcaaggatcgagcaaccaggtaaaccgcgacgtgtggagcaagttctcggtcgccttgaagatgtcaccgggcagcggaattgccgacatcatttcgttcaccgaaaaatggcagggagcagccaactacgtgatgcattgaagatgtacagaagaagaagtccaagaatgtaagttgcttgcaattagatgctatattgaaatcgtcattcttgtgtgtgcttggattacagtcaggggatttgtgggcgcggtgcgattagggggacaattgcaaatatatatgtaatcttaaagtgactccttcgtttccttcaatgcagggcgttgaagagatcgccagcggagggcaggggcgcaagtccgccagtcacatccggcaatcgggtcaggtcgggcaggttggagaggtggtcgtggatctccttctgcaggcccaacatcttggccagcttctttttgtgttcctgcaaagacacaaagaattagccgacgatgttcaagacgtgcaattaaaggggactgcattagattagcttcggtttcttttttaatatgcaaataaaatattaatacaaaatgtggatagccgacaaacgactagactaggtaacataaaatagaggcagtgacgaacaacatcccatagtttttggataacgatctttatctaacaaccccaaggaccatgcattgcctagaccatgaagaacgtacatcgaggcgttgctcagcctgggagagaagttccttctgctccgcttgaaaatctcgcagcatggtcgccaacttggagcgctcctccatctccgccgccaaccgagcattgtagtcgttcagcagatccacagcttcgttcacctaagaggaaattgattaatagtatccaatcaagattattttgaccacatcttagtgcatttggattttgaccccacctgtatggccagttccttggccttgtccttatcctccagcttgctgatgcagctaatctcggatatttcctggggcagcttggcgatacgttcgcgcaccacagcatcgctggatgcggag

SEQ ID NO: 32684 - DNA, 5073 bp, DROSOPHILA
atgcagttgaaatatctgcgaactttgctggagggccaggagcaaatccaacgaatagcaggactcgcctggtcccccaatcagcagaggttggcgatagccaccgcagatcgtcatattctactgtacgatgatgctggcgaaagacgcgataagttcagcaccaagccagcgaatcccgcgaatggtaagaactcctatgtcatccggggactggccttcagtccggactccaccaaactggcggttggccagagcgacagcatcgtctatgtgtacaagttgggggagtcgtggaacgacaagaaggtcatatgcaacaagtttcctcaggccagtgcagtgactgctctgatttggctcacctcgggatccataatagcaggtaaatcaccgtttccaaatgaaatgaacatatttcatcaggtatttaccacaggactcgaggacggcaaagtgcgtgccctgcacagcaagagcaataaatcgcagagtctctacggcggcgacagcatctgcatatccctggcggccaataccaagggaacgggttttctgagcggccacaacgatggcaccatcatacgctacttcatgacggatgaggccaccgaaccgctgggcagagtagtgcaacatccagttccaccgtttgccttagcctggccacagggtggcttctgtgccggtggctgtgatcagagaatagtgttctatgacagtatgggtcgtcaactacgcacctttgatcattcccggacggaaggcgaacgggagttcacggtggccgcttgtagtccgaatggacaggcggtggcctttggcagcttcgacaggatacgcatcttcgcgtggagtcctcgtcaaggagcttggagcgaaagcgcaaccaaggaggtggcctgcctgtacacgctaagcagcctcctctggcgaagagatggagcccgactcgccctgggatccgtgagtggagctgtgctcctctttgagtccgtacttcgacgcaccgtgtggcaggacaagttcgagctgatcttcgtggcgcccagtcagctcttggtccgatccttgacagagccctcgcaagctctcactattgaatcgcagctgggtctagagatcgatgacgttaggattatgggtcgggataattacctggtagcccgaacggaggagtctcttatcctttgtgatttgaccagaaatttgagcagtgaggttccctggactgcctctggtcaccatgaacgcttctacttcgagaatccaaccgtttgcctgatcttcaatgtgggcgaattgagcctggtggagtacggtgagaactccatcctgggatcggtacgcacggaattcgtgaatccccacgtgatctcagtgcgtctgaacgagcgaggaaatgcaaaggaaaacaagaaactggccttcctcttggatgccaagaccatatgtgtggtggatctgattagcaggatgaccagtggacagatcagtcatgagacgaaaatcgactggctggaattgagtgagactgcccataagctcctgttccgcgataagaaactgcgcttgatcctagtggataattacactggcaagaagcagaccttgctcagcaacatatcctttgtacagtgggtcccccagagcgatgttgtggtggcccagagcaactcaaacctggccatctggtacaacattgatcttccggagcatgtgaccatgcaaagcgtgcgaggtgaagccatcgaggttctccgtgaaaatggccgcacagtggttcgctcccaagacggacccagcgagcacaactaccagctggatgaggggctagtggagttcggcactgccgtaaatgacagtgatttcggaagagccgtgcacttcctggagtccctgggtgacaaaccggcagcaaaagccatgtggcacaatctggctttaatcgccttggaagatggaaaccttcgcgtggcccagcgctgctatgctgcattgggtaacgtatcaaaagcgtactacctggctggaatgatccagcaggcagatgagttcgaggaatcctctggctctcctggcatcctctgcccggaagtccgcgccaagctggctctgctcggctcggacttgcgcactgctgagcgtatatatctggagcaaggtgacatagagtcagctctgaagatgtaccaacagctgggcatgtgggatgaggcagtggctctggccgagaggcgtggatataacaggatcgccgagctgaagcaacagcacatggactacttgctgagtagcgagcagcaggagaaggctggtcaggtgctcgaggagcaaggtgatctccagcaggcgatgtccctgtacatgaaggccaacaaaccggcgagggctgctcgtttggctctgaagacaccgcacatcctgcaggatgagcagaaagggcggagcatatgccagagcactggaaataggacgagtggtggccccacaggaggtaacggcgctggaggaggagtggggcgactggttggtgagccgcaaacaactggatgcctcgataaaccactacatcgaggcgggagccacgcaaaaggccttggaagccgccgtgggcgcgaagcaatggcgcaaagcagtccagatagccaaagtcctggatgaaccggagctaatacagcgttatgctgtggatctagccaagcatctggccttcgcgggagatctggatggagcagaggatatgttggtgcgagccaacctgcacaaggatgccatagagctactcaatcgtcatggcaaatgggagcgtgcctatttgattggcgagaaacaccttaaggcggagcaagtccgtgagctcttcgttcaactggctggaacgctggaggagcagggcaagtttagggatgccgagaaggtcctgatagcggtcaacgaacccgacctggccatagctatgtacaagcggcgggaattgtacgactccatgatccgattggtggagcgttatcacaaggatctgctggatagcacccacttgcatttggctcgccaactggaatcccgtggtaagctgaagaacgccgagatgcatttcgtagcctccggggactggaagtccgccgtgcatatgtactgctcctctggtcgctgggaggatggctacagggtggcaaagctgaagggcaccgagggagccagccagcaagtggcctacatgtgggccaagtcaatgcccacagagggtgcagttaggttgctgagtaaactgggtctgctggacacagcagtgggattcgcctgtgattccggacaattcgaattcgccatggagctgtgcaagttcgctgggaagccaacggatgaggtgcacctgaagatcgccatgtcgttggaggatgaggggaagtttgaggcggcggaggcggaattcctgaaggccaataagcccagggaggctattttgatgtaccagcatgcaggcgattggcaggcggccctaaatgtggccgaaaatcatctgcccgatgctgtgggagaagtactgataggacaagcttcggctgccctggaaaccagtaactataaggactacgaagctctccttttgagggcccatcgtccggacttaatcatagagcactacaagcaggaatccctctacgaagatgcccttcgcatcgccgaggaacattatccatcggcactgaacgacctgcggcgtcttcaagcccaacttcaacggggacaggcgcaggcacaagctggcgaggatgccgcctccatttcgcgatcttatctgcaaaaggcagcagagtttgccaagaaggagcagtttcgtaaggcggccgagtgcctcatgcagatagattcctccaatgccgaggatgcatccacgttggaaagagctctgctacgagccgctgagatttgcaatcagtttttggagggtcaggatgcccaggagttggcccagtcgctgggaccgcggttactggccataaagcagataggacctgcagctcagctttacttggcggcggatatgcccaagcaggcggtggacgtgttcatcaagacggagcaatggagcaaggctcgtcggctggccaaggagatcgatccagatctacagcttctggcctatgtggagcagcagcagaaggctagcctcaagcacgagggcaacattgagcagctggcggacatagacatagtgtccgccctagatctcctggcggagcatgaaatacgtggccgtctatgcagcccaacttattcgggaaggcaactgcaccacagccctggggctctacttaagctacggagcgccaccgatcgaagctcactttaatatatacaccaggatagcactggactgtttggctctgagggaggagcaaacggagagaggcaccacttggcgccagttgagggactttctcttccgcttgctgcagtctcttaaggccactccggcgcagtcccagacgaaatttgcagccagcatggagcagttcctgttaatagcccactactacgccaccagagccgcatgcaaggaggtacaggcgcttcaaccggtggctctgcgcttatccttggctctgcttcgccacacggatctgctgccggtggacaagggtttctacgaagctgggatggatctccgccaggcaggtcgcgaagccgaggccttcgttatgctcaaccactatctggacgtgtgcgaggccattgaggagggttccggtcagttggtagaccactccgacctggctagcaccgattttcccagttccgtgcccttgccggaggatatccacctgaagaacgatcccagtcttcacgaggaggtgcgtgaatgggttctcgccgtgagcatggaccagcaagtggaccaacagctgcccaccgatgatcgcggcttgtacgagtccagtttggggcccaacgatctgccctgcatgctgagtggattcccggtaagaggccgtcaaccggtgacctttcaaggatcgagcaaccaggtaaaccgcgacgtgtggagcaagttctcggtcgccttga

SEQ ID NO: 32685 - protein, 887 aa, DROSOPHILA
MQLKYLRTLLEGQEQIQRIAGLAWSPNQQRLAIATADRHILLYDDAGERRDKFSTKPANPANGKNSYVIRGLAFSPDSTKLAVGQSDSIVYVYKLGESWNDKKVICNKFPQASAVTALIWLTSGSIIAGKSPFPNEMNIFHQVFTTGLEDGKVRALHSKSNKSQSLYGGDSICISLAANTKGTGFLSGHNDGTIIRYFMTDEATEPLGRVVQHPVPPFALAWPQGGFCAGGCDQRIVFYDSMGRQLRTFDHSRTEGEREFTVAACSPNGQAVAFGSFDRIRIFAWSPRQGAWSESATKEVACLYTLSSLLWRRDGARLALGSVSGAVLLFESVLRRTVWQDKFELIFVAPSQLLVRSLTEPSQALTIESQLGLEIDDVRIMGRDNYLVARTEESLILCDLTRNLSSEVPWTASGHHERFYFENPTVCLIFNVGELSLVEYGENSILGSVRTEFVNPHVISVRLNERGNAKENKKLAFLLDAKTICVVDLISRMTSGQISHETKIDWLELSETAHKLLFRDKKLRLILVDNYTGKKQTLLSNISFVQWVPQSDVVVAQSNSNLAIWYNIDLPEHVTMQSVRGEAIEVLRENGRTVVRSQDGPSEHNYQLDEGLVEFGTAVNDSDFGRAVHFLESLGDKPAAKAMWHNLALIALEDGNLRVAQRCYAALGNVSKAYYLAGMIQQADEFEESSGSPGILCPEVRAKLALLGSDLRTAERIYLEQGDIESALKMYQQLGMWDEAVALAERRGYNRIAELKQQHMDYLLSSEQQEKAGQVLEEQGDLQQAMSLYMKANKPARAARLALKTPHILQDEQKGRSICQSTGNRTSGGPTGGNGAGGGVGRLVGEPQTTGCLDKPLHRGGSHAKGLGSRRGREAMAQSSPDSQSPG

SEQ ID NO: 32686 - DNA, 3653 bp, DROSOPHILA
ggcttgtggtaaataagaatgcacttagcgtcgggtttcagatgagcttgcttagacgggcgaatgggtccttttttgaaggggagcaccggactttaggagatggaaagatggaaagtatgtcatgatgggaggagaggttaatttgggttagttgtggccaacagggaatattatttacctctgggaagctgtaagaacgaggatagagaatatatttcggcaaaaccaattatgcagccatattgagcaattatgaaatgcatataataaatatctcatttacaagatttatcgacaacttaattaagtcattacttgaataaaagttatgatacctcatttaaaatagctatcaaagctaatatactaaatcataaaaggattgtttttggctttaaatggctttgtgtttcactactcccgctcttatcattcctatgcgaaccctcggggatattcgatgttataaattatgtcaataaattggaatgaggaatagagtcatagtgataagagcacgattaaacaaagtgattcaagcagtgcttgaattaatcaggaacatatgatattaatttgtagtcatcatgatttataacattgttatcgagaccgccgctgacgtagaacttatagatacatttcggaccccctgctgcagttcaattgtatctgttagctatatatagccatacttccccagccaaaactataaatattcgcttgtgaaacttcattcactctgctcccatactttgctggcgtttctatggccaatcatcatcatcatctgcatttaattagggtgtcgcttgttccgaacaccttatcttatccactcccttggagacattcccaagaagatgtgctatcgggtatcgagtgatgataaccacctggcggcagtaccaaaacttcgaatgcatctccatttcgaactcgcgttccgcttggagtagatgtgctgtaaatttccaaccgaatgaggctgccatcgatggtggataacgtgtggaagcgtttcatggccatgttgtcacttccggatttgttgggtaagacccttgcaggctctattacccgaagctcttattttccatttggccatctggccacttcccagtcctcggctgtctgtgggccagtggcttctccttgggttactacgccaagtcggcttatgtgtacgacaacctgtggcctcactggtacgccctggtgggcgggttggtggccttggctctaaccctgggctggaccctcagaaagcacaagaaacagcagtacagctacgatcactactatattattttctatgggcttctctgctcgttgatggggagctgcttcatgctgactagacagctgggtgagtaatcgatggaattcgtttcccgataaaatcagagagatgtttacgaatgtgctagggttgacatataaaaaacagagacatctgcaaaccttttggttaagttttccattcttgttgccagctgttagttattacttcagcttcgtgggattgagtgtgcagtacttggccggatttagttacgtgagcctgcgttgtgatgcctcaggatcacgaccgtccagaatcgctttggccaactcactgtatgccggaggaatggccacaggatttgtgattttcaacgagatggaaccgcagcgtagcggattgattgctctgggaattaatctgctcttactctgcctggtttgtctaaacgagctgctgcaccatactggctgcattaactacaaagaatcaagggatttggtgtttaatctactcaacgaggagaagatggtctttctgccgcgccaggcgattttggcgcagtttgtggacagaacggattacgaactgaaggaaagccggcagtggctggtgctgatcctgggaggatcgctggtgtgcctccagaagagctgccttctcttctcacccacctacatgcagctaacgtggagcagcacggtgggctatttgcagcaaacccagctctatataccctttgtcctgtactcggctggcaccagttttggagcactgctcctgatgagatacacccccaagttggtgtacctactcttcggacttattcagataacttcgattgtggctctgctgtgcatctacagcgatgagcagtcggaacactgtttcctgttcctctgcctcatatacatcacaatgggtgtgctttcgagccagggaatccactggctcctggagtgctcaccctttctccacacagagttggccctggccgcaggattcattctgcaactgtgcgttatggagggctccaaatacgagtcctacgccacggacacatggattgccctgataatagtgagtgtaatcactcagggactcactgccctggccattcctgtggtgcagtggctccagccgcactccgccagccttgtcgatgtacgcaaccgcctgctgggcatccgacggaagtcgctgcccccggagcagacccagttctggcacaccaaccactttctggcccacaacaagcccgccaaccagctggaatccgtgcagctgggcaggagcagggtctttcagcagtatccgatcagcgggagtgacaccgcggagaaccacaaaggcgacaagttctgataataaagtgttgcactttaaaccgccaagcgattgtgttttatatatcccaatcattactcaatctcggtagtgctgtcattggatttgctctgttatttatattcatcgccagtgtacagtggcatctaaagtcattgtcagatattctctatttaatacataaacctaaacatttttcgaagaagcaatttctttacgtaccacaaatacacttaatccatctgccaactaattccaccatataattttgctttttataaagcatttttaagcttcaggcgctcagaaatccattgctttgtaataagccgttctcggagattattaattatttatgagtcgggcattatgatttcgacagctcaatagaaataaagtccgtcggaaaaaaggctttgaaagacgaacttgtgcagtcgggtgggccagcgacgttaatgatttttattgatttttaagcaaattaaattgtgcgtaaaccgcaaactgaatttatcataaagtcgctttatcagccctcttcctccgctgcggcttcttcgctctgcatttttattgccgaaacattaaacatttatatccgctatcaattccgtaacgacggaaagagcgtaatcgcatctcgactgttgccggctgaaattttccggttctacctaatttaattttcgtagagaatcgaaccggagcccaagaaccggagcggagcaacgtgcattggcaataaaagcgttaaatttgtttatttttcccagcctcgcaagtccgccgggtattctgcctccccgcaggcttcaccgcctacccacccagctatccagctatccagccagtgggttttcgattcgatttccctgtttttccatccatccgctccaatgtttagagtgcggcataccttccggacccgctggaaatccgcccacacgaaggatgtccatacccatatatacgtatgtacaccatataacctccgctccgggcggcgctccacgtt

SEQ ID NO: 32687 - DNA, 1458 bp, DROSOPHILA
atggtggataacgtgtggaagcgtttcatggccatgttgtcacttccggatttgttggtcctcggctgtctgtgggccagtggcttctccttgggttactacgccaagtcggcttatgtgtacgacaacctgtggcctcactggtacgccctggtgggcgggttggtggccttggctctaaccctgggctggaccctcagaaagcacaagaaacagcagtacagctacgatcactactatattattttctatgggcttctctgctcgttgatggggagctgcttcatgctgactagacagctggctgttagttattacttcagcttcgtgggattgagtgtgcagtacttggccggatttagttacgtgagcctgcgttgtgatgcctcaggatcacgaccgtccagaatcgctttggccaactcactgtatgccggaggaatggccacaggatttgtgattttcaacgagatggaaccgcagcgtagcggattgattgctctgggaattaatctgctcttactctgcctggtttgtctaaacgagctgctgcaccatactggctgcattaactacaaagaatcaagggatttggtgtttaatctactcaacgaggagaagatggtctttctgccgcgccaggcgattttggcgcagtttgtggacagaacggattacgaactgaaggaaagccggcagtggctggtgctgatcctgggaggatcgctggtgtgcctccagaagagctgccttctcttctcacccacctacatgcagctaacgtggagcagcacggtgggctatttgcagcaaacccagctctatataccctttgtcctgtactcggctggcaccagttttggagcactgctcctgatgagatacacccccaagttggtgtacctactcttcggacttattcagataacttcgattgtggctctgctgtgcatctacagcgatgagcagtcggaacactgtttcctgttcctctgcctcatatacatcacaatgggtgtgctttcgagccagggaatccactggctcctggagtgctcaccctttctccacacagagttggccctggccgcaggattcattctgcaactgtgcgttatggagggctccaaatacgagtcctacgccacggacacatggattgccctgataatagtgagtgtaatcactcagggactcactgccctggccattcctgtggtgcagtggctccagccgcactccgccagccttgtcgatgtacgcaaccgcctgctgggcatccgacggaagtcgctgcccccggagcagacccagttctggcacaccaaccactttctggcccacaacaagcccgccaaccagctggaatccgtgcagctgggcaggagcagggtctttcagcagtatccgatcagcgggagtgacaccgcggagaaccacaaaggcgacaagttctga

SEQ ID NO: 32688 - protein, 485 aa, DROSOPHILA
MVDNVWKRFMAMLSLPDLLVLGCLWASGFSLGYYAKSAYVYDNLWPHWYALVGGLVALALTLGWTLRKHKKQQYSYDHYYIIFYGLLCSLMGSCFMLTRQLAVSYYFSFVGLSVQYLAGFSYVSLRCDASGSRPSRIALANSLYAGGMATGFVIFNEMEPQRSGLIALGINLLLLCLVCLNELLHHTGCINYKESRDLVFNLLNEEKMVFLPRQAILAQFVDRTDYELKESRQWLVLILGGSLVCLQKSCLLFSPTYMQLTWSSTVGYLQQTQLYIPFVLYSAGTSFGALLLMRYTPKLVYLLFGLIQITSIVALLCIYSDEQSEHCFLFLCLIYITMGVLSSQGIHWLLECSPFLHTELALAAGFILQLCVMEGSKYESYATDTWIALIIVSVITQGLTALAIPVVQWLQPHSASLVDVRNRLLGIRRKSLPPEQTQFWHTNHFLAHNKPANQLESVQLGRSRVFQQYPISGSDTAENHKGDKF

SEQ ID NO: 32689 - DNA, 3812 bp, DROSOPHILA
tagaaaaatcgaagtcgaaccccaatcgggaaaatgaatttgtaaatatttaatatttatttatatttttaataggcacctcctatttatacatttttttttagtggcttgtgcttaggacttcttacagcgttatttaagtattccgatggaactgcatcaccaccattgagctttgactcgccaaattggtttcgattcgggctgattaattcagttttgccaatcggttgacagcaaaatatgcacattgattaaacttttcgtactttccatcgattgccaatcgcttttcatccgcatccgcaaccaggattcggaaaatgatgtgaaaaaccccgcggggctaactcgccgtctcatttgaaatgctaacacgttttcccaatttccataacaaccgaaaactttaaaggttgcatacacaaatcgaagggcgaaaaatagcaataacgttgggggattatgaatgaatggattatcctaaattgatttgctcaggaagtggttatttgcattactcatttttgggttgctctcgaaggaggtatgtatgtttcttaaaaatattcaaacagctacttagtactacaattgctaataaataagtcaaataatgcatttaaagattagagcatagagctttctatgcacacgcacgcactcctcgatcgatatcaaagttgaaaagtgaaatgtagcataactaaccatttttcgattccgttctttaatttcagcaagccaacaaaagctaaaataatagaataagcaatacgagcatactacttattacgaaatcgctttaaacgcacctagtgttagtcaaactaaaagggaaacacatctcggtgtgtatcttggggaaatcaacgcttcataaattaacgaactagtgaataaaaaaagacggaccagctaatttaaagaacaccccttgcggggtgaaccaccgattcggagtaagaaggatcaaccaccacggcgaagggcgaccgtaatgggtggtggctttgcggcgccaccgattacactagccagcaaccagcgaccagtggctttggaccaggtcgagatacccattccggcgacggatatgcacgagaaactcctggagaaggaaggcaagactgagaggaccaatctgctgggcaggtccaaggacaaaccgcccaaggacaagccgcccaagcagtcgaagttcgcggagcgcttgcggcgctccttccgccgcggcgatcatcgatccttagagatcaaacgacaggaaccgactccggaggaactgaaggctaagagtcgggccactccaccgccgccgagtactctgcgctcggacaacaataaccgcctgccatttgccctgagccacttgaatttgccgggtctgggattgggagtgggcgtgggtgtcggtggacacatcaatcccgccctgctgctggacagtccggacgagtgcacgccgccggagtacgcctatcagcacctgagcagcgttgccacaaccaattcgagcacatctttggagagcagttgcgaactgggcgagctaagtggctcccagaatagcgtttactactgggcctccatgggtggcgaggtgagcacatcagcgggcgcagctggagccgatggaactgcaggaactggagcaggaacaggtgcaggtgcaggagcagcagtgcccatcgaaggccaagatagacgtcgtctggagacgcaaaacagcagtcggagcgaccagcagcccatcaccacaaacgcttcctcagcgcctgggaacagcagtaggagctgcagcctgaccagcgatagcagctccatccggctgacccggctgcaaaacttcctcttcaagagcagcaatgagagctccaggagctgccagggtcactcgaacgagggattcacggtgtcctcgcacaactcctcctccggggagtgggagcaactgggtgcctatctctccagcagcagtggcgtgggtggtggccatgacttccagggcggatcctttcccgaggagagcacgccggatgagacggatggcacgctgccggtggagacaagtagcagtggcggcggcggtggctactatcagtacaccctgacgtcccccaacaatccctttctgccagagatcacggcgcgcacctatcacagcacctacggcgaggatggagccgtggagggcggcgagccaacgacggatgatctgcagctggacgggaagtatggctgtgcgggcagtaggtccgcccagctaccaacgccgtcgtacagtcgagcaggatcgcaggagtcgacgcacagcgagggaggagggccgcctgggccaacacccagtcccgcttccagttcctcctccacgccaggtcggcatcgaaggaagctgttcagcctgaactcacccacccgactgcttcaccaccagcagcagcagcctccaccgagtggagccacctcggcgtcgcctccatccggcggaagtagcaatgatggcggcggcggcaaattcaactcggccagtctggtgcggagtcttaatccgttcctgcccagcgttacgtcgccgaagaaggcgccgcacaagcagtcggcggtgacctcgcccggttgcttgacccctgaccttagcacaaaacgcgaggagttcctccgggccactatgaagatctgcttggtcgtctctccgcccaacagcaagctgcaggtgagtcgcgaaataactgctggattacccggtgatcaggaaggaggaggcggtggtcatcaaattatgcgcgggcctaatcaaatgtttacttagcgaaatgagaataaacatatttccactcttatgtacgctcgtatttttgttttatttccctctgttttttcactttgcttcgttctcctgttttcctgtttgcgttttaagttggggcattaaattacacaattacttgtgagcaacagcaaaagtatatttacggacattacgttatttgaggattcataagaccagcatccccaaagatcctttagcacctatcaattatttaacgaactctcaaacgtgttaataaaacgttatttttattacatcaagacttcgtcttcatttcagtaattcaaacaaaattaaaaaaaaaaaaaacagttgtatttttatatacaattaatattgttttgggcgaactaaaacaaaagtcagttcatgtttgcatatattttcgtgcgaaaagtgcattaatagagttacaattttgatttaagtgactgcaaatccaacattttaattttgcaaagaggcatttaacatatgaaagataaatgagatcatgttgttattaactaaattattcttaaacgagttctggcaaagtgcacataaattctgtttggcaatggagttaatgcctcaatggaatggccataacgactgtgaccttcatggatttcataaatattttaacatcgataatatgcacattacgtatacgcaatgtggtcgcagcgaaaccatatgtgcgtgctcatgtgcgcggggaattcaattgtcgccggaagatatttagaggcattagcgctagtgcagccaagcaataaattgcatcagcgatttgaccatcccgcattaggacttccaaatgccgaatgaaatccccatgaaagccttagcaaaacgcagcgagtactactatgcttttatttcttgggtcaatgtcctgttttgccatctgattatcatcatttcatcactgagttaggaaaatatttttgtaggagcttcatggacaaatgttgggcatctaaaaataggtcac

SEQ ID NO: 32690 - DNA, 1812 bp, DROSOPHILA
atgggtggtggctttgcggcgccaccgattacactagccagcaaccagcgaccagtggctttggaccaggtcgagatacccattccggcgacggatatgcacgagaaactcctggagaaggaaggcaagactgagaggaccaatctgctgggcaggtccaaggacaaaccgcccaaggacaagccgcccaagcagtcgaagttcgcggagcgcttgcggcgctccttccgccgcggcgatcatcgatccttagagatcaaacgacaggaaccgactccggaggaactgaaggctaagagtcgggccactccaccgccgccgagtactctgcgctcggacaacaataaccgcctgccatttgccctgagccacttgaatttgccgggtctgggattgggagtgggcgtgggtgtcggtggacacatcaatcccgccctgctgctggacagtccggacgagtgcacgccgccggagtacgcctatcagcacctgagcagcgttgccacaaccaattcgagcacatctttggagagcagttgcgaactgggcgagctaagtggctcccagaatagcgtttactactgggcctccatgggtggcgaggtgagcacatcagcgggcgcagctggagccgatggaactgcaggaactggagcaggaacaggtgcaggtgcaggagcagcagtgcccatcgaaggccaagatagacgtcgtctggagacgcaaaacagcagtcggagcgaccagcagcccatcaccacaaacgcttcctcagcgcctgggaacagcagtaggagctgcagcctgaccagcgatagcagctccatccggctgacccggctgcaaaacttcctcttcaagagcagcaatgagagctccaggagctgccagggtcactcgaacgagggattcacggtgtcctcgcacaactcctcctccggggagtgggagcaactgggtgcctatctctccagcagcagtggcgtgggtggtggccatgacttccagggcggatcctttcccgaggagagcacgccggatgagacggatggcacgctgccggtggagacaagtagcagtggcggcggcggtggctactatcagtacaccctgacgtcccccaacaatccctttctgccagagatcacggcgcgcacctatcacagcacctacggcgaggatggagccgtggagggcggcgagccaacgacggatgatctgcagctggacgggaagtatggctgtgcgggcagtaggtccgcccagctaccaacgccgtcgtacagtcgagcaggatcgcaggagtcgacgcacagcgagggaggagggccgcctgggccaacacccagtcccgcttccagttcctcctccacgccaggtcggcatcgaaggaagctgttcagcctgaactcacccacccgactgcttcaccaccagcagcagcagcctccaccgagtggagccacctcggcgtcgcctccatccggcggaagtagcaatgatggcggcggcggcaaattcaactcggccagtctggtgcggagtcttaatccgttcctgcccagcgttacgtcgccgaagaaggcgccgcacaagcagtcggcggtgacctcgcccggttgcttgacccctgaccttagcacaaaacgcgaggagttcctccgggccactatgaagatctgcttggtcgtctctccgcccaacagcaagctgcaggtgagtcgcgaaataactgctggattacccggtgatcaggaaggaggaggcggtggtcatcaaattatgcgcgggcctaatcaaatgtttacttag

SEQ ID NO: 32691 - protein, 603 aa, DROSOPHILA
MGGGFAAPPITLASNQRPVALDQVEIPIPATDMHEKLLEKEGKTERTNLLGRSKDKPPKDKPPKQSKFAERLRRSFRRGDHRSLEIKRQEPTPEELKAKSRATPPPPSTLRSDNNNRLPFALSHLNLPGLGLGVGVGVGGHINPALLLDSPDECTPPEYAYQHLSSVATTNSSTSLESSCELGELSGSQNSVYYWASMGGEVSTSAGAAGADGTAGTGAGTGAGAGAAVPIEGQDRRRLETQNSSRSDQQPITTNASSAPGNSSRSCSLTSDSSSIRLTRLQNFLFKSSNESSRSCQGHSNEGFTVSSHNSSSGEWEQLGAYLSSSSGVGGGHDFQGGSFPEESTPDETDGTLPVETSSSGGGGGYYQYTLTSPNNPFLPEITARTYHSTYGEDGAVEGGEPTTDDLQLDGKYGCAGSRSAQLPTPSYSRAGSQESTHSEGGGPPGPTPSPASSSSSTPGRHRRKLFSLNSPTRLLHHQQQQPPPSGATSASPPSGGSSNDGGGGKFNSASLVRSLNPFLPSVTSPKKAPHKQSAVTSPGCLTPDLSTKREEFLRATMKICLVVSPPNSKLQVSREITAGLPGDQEGGGGGHQIMRGPNQMFT

SEQ ID NO: 32692 - DNA, 9056 bp, DROSOPHILA
acaacaacacttcttgctttcaagctaacggcgcaaatttaaatttccatttcagtccaacttcgtttctgatgtgtcactctcttccggctcttaatttagtcttgagtcttaaacgattgcttaatttatttctaagttcgtaaagacatctgttaattattattaaggtagcacactactgataccctttaatagctgttaatagcttatttttgatactctgcctgcagcacgagtatcagctgatggtgcgcggcaacatacacacacacacgcacgcacgaagttgaagagagcggttaggtgaactaacttagttcctctctttcccgctctctttgcgccaacgagattaagctttttgtaccggcgatcgcttcagctttttcagttgaaaacaagtcacccgcgagcggtgttctttttgcgcgccgttctgcgaatagttttattttgattttagcccaacttaattcgttccatgcgacttttccttttcgcgagcggtagtgacgtcgccgttttttggacaattgcgcacatattaaaatcgcgaagaaataggggttgttgttattgttgtttggccggagacacgcgtcgcttttccgcgtgtcttttatttttgtggatcagcggccacctgaaaggcgccatttgaaaagccaacagctgtgaggcaaaaaaaaaacaaatatatgcatatacgtacatatatattcaagtgcaaaaagctggcgttgctaatagaaataaataaatataaaaggcagaataaacgtgcaaagcggtgcgtaagtgtgtgtgttttatgtattgcgcaagcaaaagagagcgcgttctgtgtgtgtgcgtgcgtacctgaaaatatacatataacttaacttgattattttcagttttgttagcaacaacaacaaagaaaccgctcgctgaataagtctaatttgaagtgcatttcctttgtgattgaaaagatcgctccaaactccaaaaatcgaaatcgagcaaggccatacgtatatatactgatatatacgcatatatacacatttattcgtgtggattcagagcgcaagcgtcgcgtcgccatgcaaatgttaatgaaaaacacaaacccctaaaaatcgacttatcagcttaaaaaacatcactagattgtcactcaaaataaaacactattaaaaaaccaacaaatcagcaaagagcaaggaaatcaggcaagttccttaaaaataatgcagtttatacgtacatatgtaaatatagcgaagagcgaccttcgtcacgaaactaatttaacttaaaaactgataagaccacttgattcgccaactcttcctcttcgcgattcgccctctccttctcgcgcagtatcagctgcgatccaaaacagtggacggggacgttccgacattgcataccctgcagtaagctataaacttcctgcagacttgctttaaatgtattgctaaagtgatactcttaattcgggaattcttgattttgttggtgtccactatcaacaccctttttttttttcttataattgtttgctaactgctaattatgaatcgaccggaaacgaaccatcagaaacatacaataaagaatttatgttggtttttataaaagtggttattcttttgcttactgtttagttccgattctatacaaccttttaaataacattattatgacactcctctttgtatttatgttttcataagcaaaggtgcgattcagtctaaaggtgttcccattttcaattttctttaaaattgtttgttataggtagtgtgtgtgctatgtttcacaaaagtagccaaatacattttttgacgaatttgtgaagttaatggatttaaacgacgtgcaagctcaaacctgtcgaattgcacggcaactttccaaagttcatgttactaaactttcgagaaaggacatttgaattaaaatgttttatctttgggcctagtaattacaagttatacatatatatttaacgcattctgtacagaccgcttttgtgaaaagagctctttctgcgaatcattcattttatcattcgtatgtacagttgtgttgttgagataccattcgaactaacctagtacacctaatacacactctatgtctgtcagataaagagctgtacacgtgctggagatggcatatctgtcgttatcaaaggcggctaatctaacgagtacgtgcggaggctacgagcttcgcttggatttatgtaacattcaaagatccaaaatcagggggctggggacagttttcactatccagctttcgttatcaaatggtgctgcacaatgcaccgagaaatattttgtactcatccatttggtggcgtaattggctttggggccgaaccactcggttcgattcgtttcacaaccggtttgggttcctgcagttaacactcatctcaaactgaaagcggcatcgggggtacacctcacaggaactccatgcacccagccatcaatcacctatacagtctagcttttataactcgaaccaaactgaagcttgagtggtttgtcgaagatcttgagtccacagaatcgctttacaggaagatatcaggaaattccaaaagctagagaacattgtcattcatcattccaccaaataaaatgtatttcatatttttcgatagttcaagctagggaagcttgcctgtacgcgtatgtgcactcggacaacaatgcgttgtcaatgaaagccgcaaactggttttggcctaggagaagcaacgcaaacggtagtgcaaagtttgctaaggaaaacgatgtgatctcgagcaacatatacccagagtgtcttaggtatcgcggtattaattaccatagtaaacaaaaagaatcgcgccagaagggcacccaaaataatatttacaaattttgttttcagctacatgataacttaacgcgttgctcactattcaatttcaggcagctcatgtataaccgaataataataataacatataatgttaccttaccatcacgtgttcagcaaagttgcttaggcaaagcaataattatgttgattctgttgctaaaatgatataattggttattcataatggttgtatgacaattatctgcactttcgagtaccatctttttccaagtgccaccaagtgtgtgcaactctctcgttccgctatcatatcaattgtttgcaaggtaaatttgatcagtcaattgaaaagttgagtctgcactcataatggggtttggtccaccccgaggtggactcttcgcaccgcagcgattggcatgtggtaacgcaatactcgatcggagagacaaataactcgaactagcgtcgaacgagaatcaataccaagtgaatcatagcatcaaatctggttagtgctcctccgctcacaatgaaatttgaaatcgccaacggagcacaaccgacatcgatatccgtatcgaaaagctgatcaagtgcaagtgcaagggcagaaatgatttcgaaacaattgacaggacagtgaagactcggttaaaattaacctcaacaacgctggcggctaattgaagcttcgcaggaggaactcgcatcttcatggcgatcagcgtttgagggtactgagtgttattgatattctgatcagggcttcccgtgcggttacgatcattgaagtgtgcggttgctcaaatcctacaccgaaagtaaatccaaatggcaaaatattggttgatcagaacagagagtataggcgtgttaaagttatctgtacacggaaaattatatcaatatttagaaatgtaatgaaatatggaaatatggtttcgtacgcacctctggtttcttccggtgtaacactggctacagacagacgtagagaacaaatatttcagtcatttctgttgttttgtaccaaagctggcgcaatatattttcgcagacggattcataagccattcagttcacgttccgccatgaatgttaagttacaatggtcaacacaatttaaaacagcccatttgcagctgacgagctattcagtgttaggagcaaagaggtctcaatgacacgaccacatcactatcatggctgcttggactttttgcttaaaagttattaacaactgtgaagaatcgtagatacatgcgcttttgaaaaggcccagaaaatgagacatacggtcacgtaagcagctaatcagttttaaaacaaaatgtatcaaagcattgcaattactcactagtgtgcaataactttgttgatagttgggtaatatgtgtaagtaattgtaataaaactactactataactgccgaaatgcgccgcatctatcaactgattaagaaaatacacgaaaataataatgaagtggataatatcaaatgattgatttccttttatatcgctggctgttgatagcaatgcaaacgaatcggctcgttcttcgagagttttgtttgttgtttgtggatctctttaggatataattaacttcgacttattgtatgtacatatatgttttatataaaaatccaacattttgggtaacttaaagtcgcaatataattctagaacttgtttcccaattcagctcccagctcaaacataattggcctcgactactagaaacgaatcgcactagctgtgagtcatggagtacaatttttgtttgctttcgggaagttctactgaagtggcaatgacattgataaagacaagggtacaagtgaataaatattaatgggttgataagatcgttcttttaacacatgcgaagcaatagatgatgtttctccataaaaatgtcacaagaagtcttcaaatgataacgacataattggacgattacaaaaaacattgatttgagagtggacaatggagtgtaactcgcattcgggcaagtcatccaactataaatacggattactgtgccgaataaacccacaccactccacgaaaagactgccctgggcaatgcaatctctcggatacgtatggccgatgggaacggaaccaaaacaatctgccagagccccgaccaaaatggcaacccaaccgacgggaacttatacaagtgcgttcgtctgggcttttttggttcgaaatcttatcacaacacgttggctgtcgactgttgtttttgagctttgctggaaataaaaattgctggcgataacatttaggcaattccactgctgtgtccctcttttctggcccggttcagttctccgggagcagctagctcatcccgtccacatatgtcagtcgttcgagtgtcagtcgtaaattggaattgtgtcgaatagtggagatggacttctgatgccgctcgctgccagtatctccaagtgttggctttgtatctttggctatatgggccacgtagttaccagtgcatgtacggcaagaatgcactcagagaaaattatcgaaagtattccagaaaactgatctcgaagaatatggagtactatattatatgcatatcttgataattctaaatgttccattccaagtttctgaatataaatcttctgctgtaagatggaagcccatttgctcaatgatttgtttggagtatgtaagatcaattaaatattgtcatattataacgaattggaacgagtgcttacgatattcaatcgaatattgatttgtgacgagaacgaagcattattacatagaactcgtacaagtagagtgaagtttcacttgtgcgatatccactgtacgagataatggctcctccaactcaaactgatactaacccatacaaacgcttgatatatgccagcattttcgctcttttttttgccgtattgggtcgtgtttatcaatgtaacgattcgcagccatcctatggcgatgataaatggacagaatgcacttgtccagcgctttcgatttggtaccctgcccttttccgatactgctggggtcactgtcatttcgaatggggaaaatgtcagagtcgattgatcgcagaccagtcaaatactttcagttttatggactgcatgacagatgggaaatgtgttttgcgaactttaagataccaatctgtgcagaatgaaaatattatattttccaaatcgattgtcagaaattagtaacattagtaaaatgtagagccacattagtctgagcttctcttctttattctctcgtaaaacacaagtgttgaaataagtgttggacacagattttcgtgttattaggaaatccaatttggaaatccaatattatccaatattaggaaatccaaccgcaggttgccaaagtagtgagtttaggcgtactgatagcaagccgaataatagcaataaaaaccaatcggctacgagttagtcgatttttaatcagtctattaatgcctgtgtttactctttccattttttgcaggggtttaaagtccgttggcctgggaatgtattccagcaaggagacaaagagcgcggcaaaagcgctaaaaaagacgaaaaaagttaacaaaaagcagcaggaatcgttgtcaaatggtaacaaagtgaaatcaacgccgaatgccaagaatatccaaccgaataataacaacaaacaaaccaacttcaacaacaataatagcagtaacaataacaacaacaacaacaacaacaacaacaacaacaacaacaacaacaacaacaacaacaacaataatagcagtatagtgtccaataacaatagcaagaataatacgttgccaattaacgtggcccagaaaaccaaacaacactttgaggcggaaaagaggatccagagtatatcaatgggcgccaccacattgccgggctacgaaaatgtgcccaaaatggagcgatccaatagcttcttacgcaccaagctgaataaactgattaaccacctgacgggcagcaaggagaatctgtcgaggaccgacagcgatggggactccagccgcacaccgtacatattcacccgaagtcgttcgatgatccagatgagacgaccgaatcgccgcagtttcatcgagccccagctggagcaactgagcgaggagacggagaaatcgggggatctcacctcaccgacatcgccgcggaagacatcggtggccgatctgcaggccagttcgccggtgctcctgcgaaggagtgagctcagctcatcggtgaggactccaaaacgtcgacaatccgcacagcccttcacgtcgactcctttggaggaggtgcagtcgccggcccaacggaagggctcactgatgtcgctcaatcaaacggaacccgccaatccccagcttaatttccaaaagagacgatccaacacgctgattgcctccttcaagagcaccttcagtggattcactggcagtgggagcggagccgagaaaaaggagaagatgaatcccaaatggagtgcctcgttgcaatccctgcaggctatcgataatatggttagctacgccaacatgtccttcatcgactacgacaagttcaatggctacgagaagcaactggagcgccagcaatcgctgatgagtctggcggaacagccggtgaccatcgccacccagctgccgctgccgccttcggcgctggcccactcgcattcgccctctccgctgggcgacaactcgcgcacctccgtccaccttggctcatctatggatgagtcggtcaggacggtggtgatgcgccgcaggaggagcaagacctcgttggagggcagaagcaagacctcgctggagggtaggagcagcatggccagcctgaacagtgccttcaatttggacaccgcctacgagcacaatctggaccgcgtacataatgtctatcgagagagcttggactcgcgaaccctggatctgctgaatcagcgcacgcggaactccttcatccatgatcaggcggtgctcttcgatgccctcaatctggaggacggctcggtggacctgcggtgcctcttccgtatgacgggcgtttggaggagcagaagcatgcggcagcagcagcagcagcgggaacgggatgcagtggacgggcgggggaagccaggaaaacaggtgagttgagctcagctcttgttaatttatacgcaagatttgatcttattgaaagattttaaaaaagatgatcatattcaaatattataagttcttcagttgcaaagttaagggtgactaaccttttttttttatttatttatacaccatatgcatttacgtaatgtgtgtagttttgactgtaccgtttaatctttgactcattgccataaagacttctgcgtatagctgaccgataaatatagggctttattccgatttatcaatgcttcgttgaacgctttcgatttgcaccggaagttgcagtttcatggttccagaggaggttcgtcttgaagcgtcatcgatttggttgaacaactcatgaactctgttctcagcaaagaaatgagtgatatataccaaattctgcgaatcgtctgacatttttcctgtgtgcatcagttcctaaacaattagtttagttttccatcaagttctttaaaagaatattaggttcttggagagcaataggttctctagtactagtactaaaaacaaatgaaatatctcaccaattacaatatatcagtatcagatcgcttggaatatgaaatttcgattgggtgttagtttaaagtcgaaaagtttagtcaacaaatctaagttgtcgttttttgacaaaaattagcaaaatgcttacgtatgatgtatgatatatataaataatctttcattaattgcaatgatatcagaaaaaaagaaactgagcaacacgatcaatgggttctgatggtaattagttgatttaggttacaattgatacttactagtaagtggcattccattgcatccccttaattagttcccaaatgcacaaaaacttttatccgtggcgtggtcttaactatttgtatttgccaatttaaggatgttaaacgtgaatgaaaattgtaaacagttagtgtatagtacagcgacaattgacccttacgaacgtatagttgataattgattgcggataataact

SEQ ID NO: 32693 - DNA, 1829 bp, DROSOPHILA
tcgaaatcgagcaaggccatacgtatatatactgatatatacgcatatatacacatttattcgtgtggattcagagcgcaagcgtcgcgtcgccatgcaaatgttaatgaaaaacacaaacccctaaaaatcgacttatcagcttaaaaaacatcactagattgtcactcaaaataaaacactattaaaaaaccaacaaatcagcaaagagcaaggaaatcaggggtttaaagtccgttggcctgggaatgtattccagcaaggagacaaagagcgcggcaaaagcgctaaaaaagacgaaaaaagttaacaaaaagcagcaggaatcgttgtcaaatggtaacaaagtgaaatcaacgccgaatgccaagaatatccaaccgaataataacaacaaacaaaccaacttcaacaacaataatagcagtaacaataacaacaacaacaacaacaacaacagtatagtgtccaataacaatagcaagaataatacgttgccaattaacgtggcccagaaaaccaaacaacactttgaggcggaaaagaggatccagagtatatcaatgggcgccaccacattgccgggctacgaaaatgtgcccaaaatggagcgatccaatagcttcttacgcaccaagctgaataaactgattaaccacctgacgggcagcaaggagaatctgtcgaggaccgacagcgatggggactccagccgcacaccgtacatattcacccgaagtcgttcgatgatccagatgagacgaccgaatcgccgcagtttcatcgagccccagctggagcaactgagcgaggagacggagaaatcgggggatctcacctcaccgacatcgccgcggaagacatcggtggccgatctgcaggccagttcgccggtgctcctgcgaaggagtgagctcagctcatcggtgaggactccaaaacgtcgacaatccgcacagcccttcacgtcgactcctttggaggaggtgcagtcgccggcccaacggaagggctcactgatgtcgctcaatcaaacggaacccgccaatccccagcttaatttccaaaagagacgatccaacacgctgattgcctccttcaagagcaccttcagtggattcactggcagtgggagcggagccgagaaaaaggagaagatgaatcccaaatggagtgcctcgttgcaatccctgcaggctatcgataatatggttagctacgccaacatgtccttcatcgactacgacaagttcaatggctacgagaagcaactggagcgccagcaatcgctgatgagtctggcggaacagccggtgaccatcgccacccagctgccgctgccgccttcggcgctggcccactcgcattcgccctctccgctgggcgacaactcgcgcacctccgtccaccttggctcatctatggatgagtcggtcaggacggtggtgatgcgccgcaggaggagcaagacctcgttggagggcagaagcaagacctcgctggagggtaggagcagcatggccagcctgaacagtgccttcaatttggacaccgcctacgagcacaatctggaccgcgtacataatgtctatcgagagagcttggactcgcgaaccctggatctgctgaatcagcgcacgcggaactccttcatccatgatcaggcggtgctcttcgatgccctcaatctggaggacggctcggtggacctgcggtgcctcttccgtatgacgggcgtttggaggagcagaagcatgcggcagcagcagcagcagcgggaacgggatgcagtggacgggcgggggaagccaggaaaacaggtgagttga

SEQ ID NO: 32694 - protein, 526 aa, DROSOPHILA
MYSSKETKSAAKALKKTKKVNKKQQESLSNGNKVKSTPNAKNIQPNNNNKQTNFNNNNSSNNNNNNNNNNSIVSNNNSKNNTLPINVAQKTKQHFEAEKRIQSISMGATTLPGYENVPKMERSNSFLRTKLNKLINHLTGSKENLSRTDSDGDSSRTPYIFTRSRSMIQMRRPNRRSFIEPQLEQLSEETEKSGDLTSPTSPRKTSVADLQASSPVLLRRSELSSSVRTPKRRQSAQPFTSTPLEEVQSPAQRKGSLMSLNQTEPANPQLNFQKRRSNTLIASFKSTFSGFTGSGSGAEKKEKMNPKWSASLQSLQAIDNMVSYANMSFIDYDKFNGYEKQLERQQSLMSLAEQPVTIATQLPLPPSALAHSHSPSPLGDNSRTSVHLGSSMDESVRTVVMRRRRSKTSLEGRSKTSLEGRSSMASLNSAFNLDTAYEHNLDRVHNVYRESLDSRTLDLLNQRTRNSFIHDQAVLFDALNLEDGSVDLRCLFRMTGVWRSRSMRQQQQQRERDAVDGRGKPGKQVS

SEQ ID NO: 32695 - DNA, 3784 bp, DROSOPHILA
ggaagaatcttatattaactaggagtcattatcgttgccactgcttctgctgataccagcgctttattgcctctcttatgagcaaatcttatcaatgttgtgcgaaaggaggtaaaacccttcaagtaggtcgtaattggtgattgaaatcgattgaaatcgagacagctgactgcagattccttaacgactcactttcatagtaaattttggcaacttcagtcgaaaaggaaagtgccactagttaatgaggtatacccacggtagttacgagtcaaatgaaccttctgttggccgttaattaattgaactataaatatatttatcgctgatgcgattaaacggtcagcagttattgtgccgtaaatatgacaaccttttaaaatatactgccttgctatttcactgtcgctttcgataggtttttgtttggaaaatcagaacttttgaaaacattgattgtaaccaacgaataggacagtgattatcatttatggtctcctcggtgaggccatgctattccatcgttaccacctgcaagaaaagtttccatgattgagtgaattcttaaaattctatttgttcatttacctagttttcagctgaattgttccaggaatattaaacaaaatacaggtgttcttcactcacccatcagatattatttattcgaatttcgaactagaacttgtttaagattattgttctttttggtagctaatcttaagcattagagcaacgaaaacaatctacgttcttataaaaacgggtaaaaaaacaatatatctcaactacgatcctcgagttacagcaaagatactggcttacagcagaaacttgtcattgtgcataaacacgaactcgctagagagccgcgtatctatatctatgacaatccaggttccacagtccccgaaagaatccaaactagtgcacttcattacaacacttccttaaccaaatatcacattgcattctgagctttattggaaatacatgcctacgtcttgcacgcggtgtaggtctggacacttggagtgcaggcgccctgctggtcgtcgaagaagtagttgccgcaggacctctcgctcacggttaccccgtcggagcagctcagatagttgcgacagcccttggtggcactaacgacaaaactagcagtccgaccgtcgcaacgatcgtgggagcaatagaccgaactgggggttatgcacatctggctgctcgcatcgaagaatctgtcctggggacactggttccacaccggattggggtccggggtgccatccttctgcttggcgcagtagaagtagccgcgacaggtggcttcatccgcgacgaacttgttctcgtagggcttactggccttgccgcagacatccgtgggcaacggatgggcatcgcagtccaccagagccttggacacacactcgcccgtgctggcctgataataggttttcgagcatgtcttgtccttcaggacgcccttctcacagacgtgatacatattgcagccctgcagattgtcgaagtttacgccgttcttaacaatgctgcagtactcgaaggtgctggtggtgcaatccgattcgtgttggcgggagcacatctgggtggtggcattgaagtgcgtctcctgcggacaggtgccgtacaaggccgtctcctcgtccgcacagtaatagtagccgtagcaggacttggggtcggccacgaattgcttggcccgatccgcgcaggatatcgagcagctggacgtggaagtggacagtgacttaacgcatttgcccgtgtccttgtcgaaaaacggagtagatcccgtgcatgtactgtagtagctgacggaatcgatgcacgtgatcgattgactgcaggattcgggatctcggatcaccgtattattggagaacaagcggcagatgtcctcattccggccattaaccacatctaggccttgaagcagtagcaccagtgccacgcccagtatggcaccaaattctgcaatttgaaaaaacaataaagttagatttacaccactggcagtttgcaatccactcactttccattacagctcaactttggacaaagcataaactcgtactgaatctgaacgtcgacctgcgattacttataaatatcagaggataagcagcaatcactatttgctggcaagataagcggattggtttttgaggggtattcaactgggtaagatgggttaaataaagatgaatagaagtcatttgttaaaagctcgaagattacaatcaaatgtattgattttgcttagggatttgctatataatatttttgaaaaggtaaatgatagagcacaaaaaatgggaatgtttgataaaattgtatttataaatttaatgtttttaaggagcattcataaaattttacttcagaaaaaattaattatatttttcgttgctaaagtactgggtgatttctagtcgtagtgaatggtgattttataaacaagttggagattgccaattggctaccggtaaattaaataggaagtagataagttatcatttcggccaaaaaatagtaataaaatgaagagcaagatcagctggtttaattcataaggcttagtgggttaatagagagcttcccttctttattataaaaaaaaaaacatttttagtactctaccaattaaatataaaaagtaaataagcacgtagcttgaactattttttaagaatttaaattacttcgaaaatgccttgtgatttggaaaaagtatcgagtaaagtgtttaaatgtcattgcatacttatgggcgaatttctaaacggacaaaactcgcttttaggcgaaacaataaaataaggcggatagatttaaaatagtttaacggaaaataaaactgactaaaaaaatggggtttttgttattaaacattaacatcaattatttttatagattatatagatagataataaaatttcaaaatacttgcatataattgtactatttaattatgcatacaaataaataaatatatataactcataatttcataatttcatagtgcgatttatttattttgtatttcagttcaaacggttcttttggacaagttattaatataaacatttgtagttcggtaatttttccccagaacctgataaccttcagaggaaagtctagtcaagtcaagtcaagagtcgcagtgcgattcaaattgagatatctaactaatgtcgtgttgctgaaatgagtgccgagataccagggaaacaccactgagtgatcaataagagccgtgacactttcccgcctcctcgagcttcttcgaaattaaaaaacaattatagacaaagagggttcgcaatcagcagctgataatccaaattccggcgcggctgtcaacgtataaaaatatatataaactatatatacatactaaactaagtatgtatggtgtccgctggccaagaatcgatttgagcttataagccagtccattttggccgggtccgctagtttcactttcgtcgtccaacgccttcgaaccgccttcaagctaacccaacaacttcggagggatgcaaggtgcgtggtttaccccagaccttagaatcttatctagcattaatttcgatactaacgccctactggcggctggcttatctggctgacaattttttaattacccacccagttcgcgccgcgaattgtcaactataaaaacgcaaaggctgcaattgattgagttagtaacgaaatcggaacgttcgcttcggtcgtctgtctatcaagtgaa

SEQ ID NO: 32696 - DNA, 1053 bp, DROSOPHILA
atgacatttaaacactttactcgatactttttccaaatcacaaggcattttcgaaaatttggtgccatactgggcgtggcactggtgctactgcttcaaggcctagatgtggttaatggccggaatgaggacatctgccgcttgttctccaataatacggtgatccgagatcccgaatcctgcagtcaatcgatcacgtgcatcgattccgtcagctactacagtacatgcacgggatctactccgtttttcgacaaggacacgggcaaatgcgttaagtcactgtccacttccacgtccagctgctcgatatcctgcgcggatcgggccaagcaattcgtggccgaccccaagtcctgctacggctactattactgtgcggacgaggagacggccttgtacggcacctgtccgcaggagacgcacttcaatgccaccacccagatgtgctcccgccaacacgaatcggattgcaccaccagcaccttcgagtactgcagcattgttaagaacggcgtaaacttcgacaatctgcagggctgcaatatgtatcacgtctgtgagaagggcgtcctgaaggacaagacatgctcgaaaacctattatcaggccagcacgggcgagtgtgtgtccaaggctctggtggactgcgatgcccatccgttgcccacggatgtctgcggcaaggccagtaagccctacgagaacaagttcgtcgcggatgaagccacctgtcgcggctacttctactgcgccaagcagaaggatggcaccccggaccccaatccggtgtggaaccagtgtccccaggacagattcttcgatgcgagcagccagatgtgcataacccccagttcggtctattgctcccacgatcgttgcgacggtcggactgctagttttgtcgttagtgccaccaagggctgtcgcaactatctgagctgctccgacggggtaaccgtgagcgagaggtcctgcggcaactacttcttcgacgaccagcagggcgcctgcactccaagtgtccagacctacaccgcgtgcaagacgtag

SEQ ID NO: 32697 - protein, 350 aa, DROSOPHILA
MTFKHFTRYFFQITRHFRKFGAILGVALVLLLQGLDVVNGRNEDICRLFSNNTVIRDPESCSQSITCIDSVSYYSTCTGSTPFFDKDTGKCVKSLSTSTSSCSISCADRAKQFVADPKSCYGYYYCADEETALYGTCPQETHFNATTQMCSRQHESDCTTSTFEYCSIVKNGVNFDNLQGCNMYHVCEKGVLKDKTCSKTYYQASTGECVSKALVDCDAHPLPTDVCGKASKPYENKFVADEATCRGYFYCAKQKDGTPDPNPVWNQCPQDRFFDASSQMCITPSSVYCSHDRCDGRTASFVVSATKGCRNYLSCSDGVTVSERSCGNYFFDDQQGACTPSVQTYTACKT

SEQ ID NO: 32698 - DNA, 3405 bp, DROSOPHILA
aagcattaaaagacatcgtggagctaagttgtataagttatttgaggaattattattaggtacaacttaaagtacaacaacacgcaaggcgcagtgctgcgacttaaattctctgtgcgggtgtatttatcgataacagccgaaaccgaatcggtaaaattttaattacgaatgtaacggtcgttgatgatttcaaaaatgcaacaacaaagcggcaacttcgtatggaaaacgcaaaactaattgagttttctaaaaaaaaactgcggatttattttttacttcccattgtcctacgcatacatataaaaaagttcttattttcctgagcataagctctcgttttattgcaaattaactcaactacgttttgtagataaacaaatagaaacagttaacaagacggtactattaatcttggtattttcatgtggatgttgttctacattttggtaactgatcaacagaacgataaaactaattgatttctaaatttagaaagattagaaatgtgttgtctaattttaatgcgtaccatacgggcaattacctgaattttaaatgtgtgctattaatggattgctcataaagcacatagtatatgtttgtattgtacccaaaaaaactgaaatttcaagccaaatcgtaaatataattgttttgaaaacaaaataaaaacaaaaaaaaatgctatagtcgaagtccccgatatttttgaatattagtagaaattaaaaaccaaaccataatttaaaaattgttcgaaagtgtggtcgtgacagttttgggtggtttgtggaatattgatcctgatcaagaatatatactccatatggtcgaaaacgcttccctctgcttgttacatacttctcaacgaatctagtatacccttttaacctgtgtacctttctagtgtctttgcttttaacggatatattgatcgccaataaaaatcaactacctctttttctttgcacttttagttaaatttattttttgtttagtcccggccatcgcaacacttatcgtagatgatcttggaggagcacgcttccactgtctcgtcgaagaagtgatcccagtggcaggtttcctccgtcacctccttgttgtccacacaccggatgtagttgtgacagttattgctgctgctggtcaccagcatcgtgccgcgtccgtcgcatctgttgtgggtgcacaccactgtggtgggattggcgcagagctgccgatcctcgtcgaagaagtagccctcggggcactgcgtccacagtggatccaggtcggcgacgggatagagggccttgcatacgaagtatccacggcaggtggcttggtcggatttgaatgtcattgttgtgctgctggtgcagacgttctccttcgaatgggcggtgcactccaccttattggcttccacgcaattgccgctctccacatcgaaatactcgcgcttcttggaggtgacagtgcagctcttggacgcatggttaccggtcttgtcacactcatagtagtaggcgcagtccttctcattccggaacttcgtattttccgccaccagctcgcaaatgttgttcacatccacgcacatggagtccacgccgtacaggcaggactgagagcgctcatcgaagtgctggcctacgggacacatccccgccagcggtacgccgttcatgcagtagaagtacttgtggcactcggtcggatcggccacccattcgccatccaatccctcgcagcgattgccgcagtacttgttgctgttggccaacgtgtccacgcaactacccttgctgggattgaaggactggttggaggggcaggtcaggacggtgccgttgccatcgtagcactgaatgtactggtcgcaggtgccgggcttgcgaaccttggtcccgttcttgaaaaggcgacacagctcctcgtattcaccgacactcgccgaaagagctacggtagccaacaagagaacgcatccgagaagcactccaagtttgaggtctacgaatgatatacatatgatcgcgagatattagattgatacagcacaccttttgaaaaacatatagatatgcttaaaaacctttaaagatatacctataaaaatgaatatgaatgaacaaaatatctagattctacattttaattgtatctttaaaaacgcatgcaagctgttacttttcactaaaaataaaggctgaatcagggtgtataagtaaatatctatgacggtaaattaatgggttcataaaactcacttagcatggctgattgctgggaaactttggtttaatttgcaacagaatagatcgagtggtttgatgtggcctcgggaaccaattacgcgcgactaaatggagtttcgtgaatggaagaatcttatattaactaggagtcattatcgttgccactgcttctgctgataccagcgctttattgcctctcttatgagcaaatcttatcaatgttgtgcgaaaggaggtaaaacccttcaagtaggtcgtaattggtgattgaaatcgattgaaatcgagacagctgactgcagattccttaacgactcactttcatagtaaattttggcaacttcagtcgaaaaggaaagtgccactagttaatgaggtatacccacggtagttacgagtcaaatgaaccttctgttggccgttaattaattgaactataaatatatttatcgctgatgcgattaaacggtcagcagttattgtgccgtaaatatgacaaccttttaaaatatactgccttgctatttcactgtcgctttcgataggtttttgtttggaaaatcagaacttttgaaaacattgattgtaaccaacgaataggacagtgattatcatttatggtctcctcggtgaggccatgctattccatcgttaccacctgcaagaaaagtttccatgattgagtgaattcttaaaattctatttgttcatttacctagttttcagctgaattgttccaggaatattaaacaaaatacaggtgttcttcactcacccatcagatattatttattcgaatttcgaactagaacttgtttaagattattgttctttttggtagctaatcttaagcattagagcaacgaaaacaatctacgttcttataaaaacgggtaaaaaaacaatatatctcaactacgatcctcgagttacagcaaagatactggcttacagcagaaacttgtcattgtgcataaacacgaactcgctagagagccgcgtatctatatctatgacaatccaggttccacagtccccgaaagaatccaaactagtgcacttcattacaacacttccttaaccaaatatcacattgcattctgagctttattggaaatacatgcctacgtcttgcacgcggtgtaggtctgga

SEQ ID NO: 32699 - DNA, 1017 bp, DROSOPHILA
atgactcctaacctcaaacttggagtgcttctcggatgcgttctcttgttggctaccgtagctctttcggcgagtgtcggtgaatacgaggagctgtgtcgccttttcaagaacgggaccaaggttcgcaagcccggcacctgcgaccagtacattcagtgctacgatggcaacggcaccgtcctgacctgcccctccaaccagtccttcaatcccagcaagggtagttgcgtggacacgttggccaacagcaacaagtactgcggcaatcgctgcgagggattggatggcgaatgggtggccgatccgaccgagtgccacaagtacttctactgcatgaacggcgtaccgctggcggggatgtgtcccgtaggccagcacttcgatgagcgctctcagtcctgcctgtacggcgtggactccatgtgcgtggatgtgaacaacatttgcgagctggtggcggaaaatacgaagttccggaatgagaaggactgcgcctactactatgagtgtgacaagaccggtaaccatgcgtccaagagctgcactgtcacctccaagaagcgcgagtatttcgatgtggagagcggcaattgcgtggaagccaataaggtggagtgcaccgcccattcgaaggagaacgtctgcaccagcagcacaacaatgacattcaaatccgaccaagccacctgccgtggatacttcgtatgcaaggccctctatcccgtcgccgacctggatccactgtggacgcagtgccccgagggctacttcttcgacgaggatcggcagctctgcgccaatcccaccacagtggtgtgcacccacaacagatgcgacggacgcggcacgatgctggtgaccagcagcagcaataactgtcacaactacatccggtgtgtggacaacaaggaggtgacggaggaaacctgccactgggatcacttcttcgacgagacagtggaagcgtgctcctccaagatcatctacgataagtgttgcgatggccgggactaa

SEQ ID NO: 32700 - protein, 338 aa, DROSOPHILA
MTPNLKLGVLLGCVLLLATVALSASVGEYEELCRLFKNGTKVRKPGTCDQYIQCYDGNGTVLTCPSNQSFNPSKGSCVDTLANSNKYCGNRCEGLDGEWVADPTECHKYFYCMNGVPLAGMCPVGQHFDERSQSCLYGVDSMCVDVNNICELVAENTKFRNEKDCAYYYECDKTGNHASKSCTVTSKKREYFDVESGNCVEANKVECTAHSKENVCTSSTTMTFKSDQATCRGYFVCKALYPVADLDPLWTQCPEGYFFDEDRQLCANPTTVVCTHNRCDGRGTMLVTSSSNNCHNYIRCVDNKEVTEETCHWDHFFDETVEACSSKIIYDKCCDGRD

SEQ ID NO: 32701 - DNA, 5814 bp, DROSOPHILA
caattcgtcaaattacgtagccgataaagagcaacgaacttagaagggaattttttgtactgttttccccaaacgtttttggtagtttaattcaaatcataactaaaatgtttgcagattttactagttgcaccagtaactaagatacattcaaactaaagagcttcaattatttagctttgaaactaggtttttcggtttcgctgcaatactaatatttaccccatgattaatctatttgttttgtttgtaaagcagcaacattgcccaaatccagaagggtttgcacaaaatatttaggccaatcgataggaacgatagtgcacttcttattgtgctctattttcagctctaacgtcagtagcttcggtcgatgacccggctcaaggccattgctaatgcgaacatacactcgcggcggacttactcgtatatgcaagctactatacaagtagttagaaaagaatgcgattcaggaaaacaaaaatcaaacttaactttttgtcataccatcataccataccaaaccaaaccatgcccaccgccgaagctttttgagtattacccgcgaaccgtaaatatcggccattgaacttgacaatcgtggtacatgcacgcccccaagaaagctcgtgcacggtatagcacgatcggatctaacccgttctagcggcacacatgtacgtatgtatgtatacgtttacatatattcacccccaccgatcggctctaaccgagtgcacttccgagcttttcgcccctgagacccaccaatgctaattcgtagaagtttgcaaacaggagcttttaacggctaaggttaagctttcgtttcattgccattgaaagcgaacttgggtggaggtcgttgaactgacacaatttcgaaagaagttgcccaactgcccgagacccaaaacattaccgttttcacttttcgatacccactagtttcggggtataatgaagtacgaactgcctaataaaaagtcgaaggattaagcttacattatattttaaaactcaatttatgccatgatttgcgtacacatttttctacatcgtattttatcaagataacaataagatattaaaaaaattgaaagtgtttttaagttggaagtaatatgaaatttgtacttaaattaaattaacctaattaaaaatatcggcgtcaatttaatttactattttcaaatttaatttacaaaatacttattgaaaacaatcttataggcgataatatacttaaaagatatactcctcattggcgggtaagtggtacggaaagttatgatagatgattgcatttgttgatcaattataggcgcacagaggttggtttactttgatctgaaggaaacactgaagaggatttgctttgttgggtgttattgctttttatcttaatttataattggttgaatgaaagtggtctatgcttagttgaatagtcttaggtatttacagcggcctagcttcgttttaaacagcgagccccagttgtatgatacaaaactaaacgctctaggagtaactgctggggaccaaatccatcacgctaaatacattgttactgtagctccgtagagtcggcagtgtttgagtttgaattctcctccgacttctttgacgacggggaggagtcagatagattgggcgagaggtcgcgcagcttgacaacatttcccacggacaccagattggccgcctcagccaccgagtagccaatgtccggcggtgttccctctggatagccgagatagtaatccgcaatacgtcccgcctcgcgcaatccgctcaagtacgctccatgcacagtggccggataattccgtatcgtatgctcacccgcgaagaatagccgtggcaatccttccgcatccttactggacggcggaatgaccggcgccgccagcagatcgtagtcactgcccgaggaaccaacggatacgtagctgtacgacccacgggcccagggatcgctgcgccaacgcgttaccactgtttccttgggttgtggaacagaggtattcccgaagatgttttttagcaccgacatacaacgcccgattatgatgtcatccgtcacgctctccaccagattcgctgccattccggcgactagagcgagcaacaccggagatgagcttatactccagaacagaaacatttctcctgcaattaatacgttgaacacatttaattaccaatacaatttgggctgttgaaagtctttccaggtctggtaatggatgaataggataagcaaatgccaaaagtcacatcacttacctctactcgccgtcgtgctgcccacgtgtccgaagagattagcgttgggatcccaaaaaatgcgatcgaagcagagcacaaccttattgagattcccaaatcccagccttttgatggcctgctgtttccagtccggcaatggcgggtcgaacttgactgtgttactctgctgtgactccttatgtgctaccgccactttgaggacgcccagagtaagtgtgcagacgacaaggtctgccttgtatgtcatctgcgaattggatgtcttcaagttttcagccactacttccacacctttggtgccgtactttatctccttgacggcgctattgacacggatgtccaggttttcagtaagagctacaggcacacatgaataaccgttccgcacagttgtgtggtggccaataaactcgaagtcatcgtcctgatcccagtgcttcaacgacaggttatttagtcgggtggcattagcaaattccaagttggcaaaatgccagtccaagatcaggcggtcgcgggacgagaggtacacatcgctgaacgaatggagttaattaggccatttaacgtatttcaagctttcaaagactacttgaaaggctacttacctaggtcggttctgctccagttcgtggagtttggctaacatctgcttttcctcggcatggagatcgtgaaacgtactgatcgtttcctccattttgatctgggtgttccgaatgttaaactcttggtaacagtatttcagatcgccatccgtgcctttgggtttccgctggttgatcattgccaagtgctcattctttagtttgccgatggtatctctaagggttttcagtcgacgacgctgttcaatgatcttcgtttgggtggctatgatctcctgcatgtgctgcccccgtttgtgcatcacctgcatctcctgcatactgattatccactccaaggcatcgcccagcgaaactgggcaatcgccggcgtagttaaaatcaaggcggtgggacaggtagctggctgattccagcagtcggttaaattctctctcgatcacgtcatccttctccttgggcacgggctttccatctgggccgtaaagtggacatgtctgctggatgggaactaggtccataccgatctgcttgctgaggatcgtcattggattgccatagacgccggtaaccaccattgctcccacatcggcaatatagctgttcttccgaaacgtagatatccgtccccctacccgatcccgcgcttccaagacgatcacatccatgccgaactgctgcaactggtgtgccactgctaagccggagatccctgccccaatcactatgactttgcccagctttttggcgggtataggcttaagtcgcttaaagatgccgaagttaatgaagccatgacgctccagaaacgagtgtactcgccttaccaaactgggctcgctgtcgaatggcggcggcaggttcttcagggcgatctcgaagctcagctggatcttgggattgtccacccacatgtgcaagaggctgttacgaatgttgaggaatacccgatggccgagaatgcccgagcgactgatgtccggaaagcaggcctcttcgttgggtgtcattttgttaaatggcaggcgagattggaagacggcgccctcttggccagacaaaaccgtgggcgtgccggcatcccggtccttggaatctccgttctgggacggtctggaatttccggcactgggtccggacacggaggaggaggtagcattggcttctgacttgcgggtttggctttggctgcgacgctctgcttgctggttgttaggtcccatggatgccgatcctgacttgtcattggaggcggtgtctccacttccactaggcctgttactataatccacttttggccgattgcgcctacttgtgcgtcgctcatcgctggtggcaggtgcgtcatttgagtcctcatccgggtgcttttgtttctgaccaggattgggtgctgacaatgccgacggcgggtgattgacgtttcttttgggcgtgggctcaccatcggaatcgtcgctaattagcgtcacatactcaattggctcggtcatcttggagctactgcctccgaactgggtgggtttcatctccggattatggaactgccaccgggacactgaaaagttggcccttcaaaagtggaacccgtttaaatttttctcgaactcatttccaattccaataaagctagctcacgttcgaaaatcacgaattctttagtccaccaaaccggaatattgccgcattattctttcgatatttttctgattgttccgtgattttattatcacacgttttgaggatcggactgcgggtgtagtttttttttttggtctaaactccctgcttctctgatgacaatgaagtattattatcaaatgctgtatcagctgatccatgcgtcgcttttcatattaggttggctcacagattgattttccgacatttaaaagtgcaaaatataaaaattgtttataccgttctggcggtgtggcagccgcacaacgccaccaacatctctttaccgggtacacatggtcactctgcgcgcgcattcgttttttgagcatcatacaacgcattattggaaacattaattaattcaatttaagcattaaaagacatcgtggagctaagttgtataagttatttgaggaattattattaggtacaacttaaagtacaacaacacgcaaggcgcagtgctgcgacttaaattctctgtgcgggtgtatttatcgataacagccgaaaccgaatcggtaaaattttaattacgaatgtaacggtcgttgatgatttcaaaaatgcaacaacaaagcggcaacttcgtatggaaaacgcaaaactaattgagttttctaaaaaaaaactgcggatttattttttacttcccattgtcctacgcatacatataaaaaagttcttattttcctgagcataagctctcgttttattgcaaattaactcaactacgttttgtagataaacaaatagaaacagttaacaagacggtactattaatcttggtattttcatgtggatgttgttctacattttggtaactgatcaacagaacgataaaactaattgatttctaaatttagaaagattagaaatgtgttgtctaattttaatgcgtaccatacgggcaattacctgaattttaaatgtgtgctattaatggattgctcataaagcacatagtatatgtttgtattgtacccaaaaaaactgaaatttcaagccaaatcgtaaatataattgttttgaaaacaaaataaaaacaaaaaaaaatgctatagtcgaagtccccgatatttttgaatattagtagaaattaaaaaccaaaccataatttaaaaattgttcgaaagtgtggtcgtgacagttttgggtggtttgtggaatattgatcctgatcaagaatatatactccatatggtcgaaaacgcttccctctgct

SEQ ID NO: 32702 - DNA, 3559 bp, DROSOPHILA
tttatattttgcacttttaaatgtcggaaaatcaatctgtgagccaacctaatatgaaaagcgacgcatggatcagctgatacagcatttgataataatacttcattgtcatcagagaagcagggagtttagaccaaaaaaaaaaactacacccgcagtccgatcctcaaaacgtgtgataataaaatcacggaacaatcagaaaaatatcgaaagaataatgcggcaatattccggtttggtggactaaagaattcgtgattttcgaacggccaacttttcagtgtcccggtggcagttccataatccggagatgaaacccacccagttcggaggcagtagctccaagatgaccgagccaattgagtatgtgacgctaattagcgacgattccgatggtgagcccacgcccaaaagaaacgtcaatcacccgccgtcggcattgtcagcacccaatcctggtcagaaacaaaagcacccggatgaggactcaaatgacgcacctgccaccagcgatgagcgacgcacaagtaggcgcaatcggccaaaagtggattatagtaacaggcctagtggaagtggagacaccgcctccaatgacaagtcaggatcggcatccatgggacctaacaaccagcaagcagagcgtcgcagccaaagccaaacccgcaagtcagaagccaatgctacctcctcctccgtgtccggacccagtgccggaaattccagaccgtcccagaacggagattccaaggaccgggatgccggcacgcccacggttttgtctggccaagagggcgccgtcttccaatctcgcctgccatttaacaaaatgacacccaacgaagaggcctgctttccggacatcagtcgctcgggcattctcggccatcgggtattcctcaacattcgtaacagcctcttgcacatgtgggtggacaatcccaagatccagctgagcttcgagatcgccctgaagaacctgccgccgccattcgacagcgagcccagtttggtaaggcgagtacactcgtttctggagcgtcatggcttcattaacttcggcatctttaagcgacttaagcctatacccgccaaaaagctgggcaaagtcatagtgattggggcagggatctccggcttagcagtggcacaccagttgcagcagttcggcatggatgtgatcgtcttggaagcgcgggatcgggtagggggacggatatctacgtttcggaagaacagctatattgccgatgtgggagcaatggtggttaccggcgtctatggcaatccaatgacgatcctcagcaagcagatcggtatggacctagttcccatccagcagacatgtccactttacggcccagatggaaagcccgtgcccaaggagaaggatgacgtgatcgagagagaatttaaccgactgctggaatcagccagctacctgtcccaccgccttgattttaactacgccggcgattgcccagtttcgctgggcgatgccttggagtggataatcagtatgcaggagatgcaggtgatgcacaaacgggggcagcacatgcaggagatcatagccacccaaacgaagatcattgaacagcgtcgtcgactgaaaacccttagagataccatcggcaaactaaagaatgagcacttggcaatgatcaaccagcggaaacccaaaggcacggatggcgatctgaaatactgttaccaagagtttaacattcggaacacccagatcaaaatggaggaaacgatcagtacgtttcacgatctccatgccgaggaaaagcagatgttagccaaactccacgaactggagcagaaccgacctagcgatgtgtacctctcgtcccgcgaccgcctgatcttggactggcattttgccaacttggaatttgctaatgccacccgactaaataacctgtcgttgaagcactgggatcaggacgatgacttcgagtttattggccaccacacaactgtgcggaacggttattcatgtgtgcctgtagctcttactgaaaacctggacatccgtgtcaatagcgccgtcaaggagataaagtacggcaccaaaggtgtggaagtagtggctgaaaacttgaagacatccaattcgcagatgacatacaaggcagaccttgtcgtctgcacacttactctgggcgtcctcaaagtggcggtagcacataaggagtcacagcagagtaacacagtcaagttcgacccgccattgccggactggaaacagcaggccatcaaaaggctgggatttgggaatctcaataaggttgtgctctgcttcgatcgcattttttgggatcccaacgctaatctcttcggacacgtgggcagcacgacggcgagtagaggagaaatgtttctgttctggagtataagctcatctccggtgttgctcgctctagtcgccggaatggcagcgaatctggtggagagcgtgacggatgacatcataatcgggcgttgtatgtcggtgctaaaaaacatcttcgggaatacctctgttccacaacccaaggaaacagtggtaacgcgttggcgcagcgatccctgggcccgtgggtcgtacagctacgtatccgttggttcctcgggcagtgactacgatctgctggcggcgccggtcattccgccgtccagtaaggatgcggaaggattgccacggctattcttcgcgggtgagcatacgatacggaattatccggccactgtgcatggagcgtacttgagcggattgcgcgaggcgggacgtattgcggattactatctcggctatccagagggaacaccgccggacattggctactcggtggctgaggcggccaatctggtgtccgtgggaaatgttgtcaagctgcgcgacctctcgcccaatctatctgactcctccccgtcgtcaaagaagtcggaggagaattcaaactcaaacactgccgactctacggagctacagtaacaatgtatttagcgtgatggatttggtccccagcagttactcctagagcgtttagttttgtatcatacaactggggctcgctgtttaaaacgaagctaggccgctgtaaatacctaagactattcaactaagcatagaccactttcattcaaccaattataaattaagataaaaagcaataacacccaacaaagcaaatcctcttcagtgtttccttcagatcaaagtaaaccaacctctgtgcgcctataattgatcaacaaatgcaatcatctatcataactttccgtaccacttacccgccaatgaggagtatatcttttaagtatattatcgcctataagattgttttcaataagtattttgtaaattaaatttgaaaatagtaaattaaattgacgccgatatttttaattaggttaatttaatttaagtacaaatttcatattacttccaacttaaaaacactttcaatttttttaatatcttattgttatcttgataaaatacgatgtagaaaaatgtgtacgcaaatcatggcataaattgagttttaaaatataatgtaagctt

SEQ ID NO: 32703 - protein, 890 aa, DROSOPHILA; identical to SEQ ID NO: 25362

SEQ ID NO: 32704 - DNA, 3353 bp, DROSOPHILA
tcccaggaaagacgtcaacagaaatattgaatgatctgctggccgaacacaactggatcgacgaggtacaactcgagattacctacaagtgctactgatatcaacctatatcaattgttttcagctcttccgcaacatgcgcaactgctgggccgaggtggagagtctggagaggcagaagcgcttccgggaggtcatgcagtaaaagccattgttaccaggacccattatcagtatcaggaggtctcctgattgcgtatccaagtgctggacattaggacattaaacgccaagccccacgtaatgctgcaataaactcaatgagttgttattttattatataccagaagacacgcaacagcttagttttagtgcaagacacatattgtactgtgtaggcctttagtttaagatagagtctatagtcttggacaatgcaagtgcatgccatgtaaatagctatacagatagctatagccgcgcattatatcgtacatatatatatatatatatatatcgaacttaaagtactaaataatagagtagtactaacctcatcaagacgaaggaataatatttctgttgcgttgaaattggttaagcattctgttttgctaaatttcaaattaagatttatttggtagcatttcttaagaagataatttaccttaaacacccgcaaacaatcaaattgtgtttttctaccgacgtggtaaggaaaacattatcagcatcaacactatacatacttactaattgtacatacttagtttaaactctagttacacaatccagttgcagacatttagttaactttatttgttatgcggattttaatttaagttgtgaatttttagaatcttagagttccctgaataaatatgaaagaatcacatatgtatactggcagaagctttagttttgcctcgcttacacgcaacatatttacacctttaacttctatgggaaatgttctattaatgttattatctataatactttagcactgctcggagtccattttgaacagcggctccgtcatgttgtattttataagatcctcgacgataccagtgattcgccgcttgaaaattggtaaagtccgggcgttgagcatttcgtattcttcaatgagctccttgtacttgggttcatcagaggatgtcgaaatactttggatggcctcggaaacagtatcgatatcaatcacttcgttggcattggaaatgaaaaagggtagcgaaaatgctcccattatcaagccgtaaacgccgtactgttgcaattgccgattgaagacgctgcgcggatatatgccctcgagggaaagattgcaggacttcaatttctggtccatcgtgttgtagtaagcatccataaagtcggggaagtgctcgtcccgcaatcgtttctccgtgcaggcaaacaggtaatggactatgtccagtaccggcggtgcatagcgagacatttgaaagtcgatcagcttggcctccacaggttgatcagaattaggctggggaatagcaatagtagcttatttagataataacttagaactagaaggattaattacctcatgtctatagagaatattgttattccagaagtcaccgtgacagataacagcatgtggcgcctgcgcctttccatccacacagtaaagagccaaggatttcagctggttttcacacaattgcaggacttcctggaccgcggccacttggtcgccatcggattctttcaggatgattctcgccttgcgcagctgcgcctttccaaactcaattgtgacctcctcaatgtcagatgtaaataggttgtccttctccacgaactccaccaactgcttgaactgcaagggatcggtctgctgcaggatgaaggagcacgcatgcagctccgctaaagctttcagggagcagaccacgatgtcgtaggtaggcataatacagcgtgaattgggccgaaatccactctcagacaggtcctcgaatatcaagaactcatcgggagctttcaagtcattggcctgtagggccggcgccacggtgaaagtgttccgatctggagatagcgcccggaaaacgggaaacaccttctggtacatgaagacttcacgagcatagtagtccacgacgtgcatatgggatcttcgggcctcgttcctaggcgccattttgaccaccacggtggctgcgtccacgatcgtgggccaactcacccggagaacctgtccgtaggcattctccccaactccggccattggttgcgagaccataggtataccatggcgttgatacagctccaaaaggactcgggtaacggcgtatgaaagctcgttatcgctcattttgttacctggcttgaatcttcgtcgttgaatctatatttccaagtgaactacttcaacatttgtttcggcttttatagttcgtcggccgaaaagctccacactagttgcgctgcattgagggtggtgctgatgatagaagccacgtgaccgattgaatggtgaatggttaagtgggcatccttattgcttctaaactaacgaatagatattagagtttgtttttaaatcgatggtactgggtttgtattgcgtggaatattcgtaaaaccatctttactaacatcatcgatatcattgcttatatggatttctcgatatatagaaaatatgcgatttttataaactcatcttctttacaacagcataacacttatttaattgagatcactatagtccatgattttttatatattcatatgtcttatatatttatatttttttatattttatttaagaccatttccaacaattcgtcaaattacgtagccgataaagagcaacgaacttagaagggaattttttgtactgttttccccaaacgtttttggtagtttaattcaaatcataactaaaatgtttgcagattttactagttgcaccagtaactaagatacattcaaactaaagagcttcaattatttagctttgaaactaggtttttcggtttcgctgcaatactaatatttaccccatgattaatctatttgttttgtttgtaaagcagcaacattgcccaaatccagaagggtttgcacaaaatatttaggccaatcgataggaacgatagtgcacttcttattgtgctctattttcagctctaacgtcagtagcttcggtcgatgacccggctcaaggccattgctaatgcgaacatacactcgcggcggacttactcgtatatgcaagctactatacaagtagttagaaaagaatgcgattcaggaaaacaaaaatcaaacttaactttttgtcataccatcataccataccaaaccaa

SEQ ID NO: 32705 - DNA, 1293 bp, DROSOPHILA
atgagcgataacgagctttcatacgccgttacccgagtccttttggagctgtatcaacgccatggtatacctatggtctcgcaaccaatggccggagttggggagaatgcctacggacaggttctccgggtgagttggcccacgatcgtggacgcagccaccgtggtggtcaaaatggcgcctaggaacgaggcccgaagatcccatatgcacgtcgtggactactatgctcgtgaagtcttcatgtaccagaaggtgtttcccgttttccgggcgctatctccagatcggaacactttcaccgtggcgccggccctacaggccaatgacttgaaagctcccgatgagttcttgatattcgaggacctgtctgagagtggatttcggcccaattcacgctgtattatgcctacctacgacatcgtggtctgctccctgaaagctttagcggagctgcatgcgtgctccttcatcctgcagcagaccgatcccttgcagttcaagcagttggtggagttcgtggagaaggacaacctatttacatctgacattgaggaggtcacaattgagtttggaaaggcgcagctgcgcaaggcgagaatcatcctgaaagaatccgatggcgaccaagtggccgcggtccaggaagtcctgcaattgtgtgaaaaccagctgaaatccttggctctttactgtgtggatggaaaggcgcaggcgccacatgctgttatctgtcacggtgacttctggaataacaatattctctatagacatgagcctaattctgatcaacctgtggaggccaagctgatcgactttcaaatgtctcgctatgcaccgccggtactggacatagtccattacctgtttgcctgcacggagaaacgattgcgggacgagcacttccccgactttatggatgcttactacaacacgatggaccagaaattgaagtcctgcaatctttccctcgagggcatatatccgcgcagcgtcttcaatcggcaattgcaacagtacggcgtttacggcttgataatgggagcattttcgctaccctttttcatttccaatgccaacgaagtgattgatatcgatactgtttccgaggccatccaaagtatttcgacatcctctgatgaacccaagtacaaggagctcattgaagaatacgaaatgctcaacgcccggactttaccaattttcaagcggcgaatcactggtatcgtcgaggatcttataaaatacaacatgacggagccgctgttcaaaatggactccgagcagtgctaa

SEQ ID NO: 32706 - protein, 430 aa, DROSOPHILA
MSDNELSYAVTRVLLELYQRHGIPMVSQPMAGVGENAYGQVLRVSWPTIVDAATVVVKMAPRNEARRSHMHVVDYYAREVFMYQKVFPVFRALSPDRNTFTVAPALQANDLKAPDEFLIFEDLSESGFRPNSRCIMPTYDIVVCSLKALAELHACSFILQQTDPLQFKQLVEFVEKDNLFTSDIEEVTIEFGKAQLRKARIILKESDGDQVAAVQEVLQLCENQLKSLALYCVDGKAQAPHAVICHGDFWNNNILYRHEPNSDQPVEAKLIDFQMSRYAPPVLDIVHYLFACTEKRLRDEHFPDFMDAYYNTMDQKLKSCNLSLEGIYPRSVFNRQLQQYGVYGLIMGAFSLPFFISNANEVIDIDTVSEAIQSISTSSDEPKYKELIEEYEMLNARTLPIFKRRITGIVEDLIKYNMTEPLFKMDSEQC

SEQ ID NO: 32707 - DNA, 2315 bp, DROSOPHILA
atcacgatcaaagcaaaaacaaaaacggacatgcgcagatactgaaacgagttggcattcttgccatcttttagatatgcaaaaatgattcatagatggcgcagctaactttgatgatattcattgaaattggcaaaaaaaacagctgatatgatgcacttaagttaaaaaggctgttatctgcgatgcagcaaacgtatgaattttcgtacaaattttctattcacacaaaaaaatggaaaaataatgcagatatcttgccgatgcagctaactatcgatgcagctaagcgaattatacttttaagattcgcgttcttatgcccctgctttaattacaatattaataaagaaaaactcaacggaactgatgttgatttcaactcgaaagtgacaacttttggacactaatggcattttattttgtatttcgttaagtgtgcttttcattacaaattacacttaggcaatccttagcattggagaaacattttgatgccttgaagacttaaaaaaaaaaatttcacaaattctagttcatattttatatgcgatagtgacaatctgtatacatgttaatcgagatttcatttatgtgagggtggttgaacgcaaggtcagttttcactatgagaagtaactggattaggctggtagcaatcgaatgtttcattgacttgcatgcacaaatcctcattaactgaaactagtcaatgaagattgtaggtacactgagagaaacagcgatttcggtgtcaagttagatccgcaaatatattctacgcttcttctttccgagcaagacttacaacgaaaatccgaaattagtgttagcttgaatataatttgcataaatctgtgcgaataaataatttaattactgaagaaagtttaaccaaactgatttctcctgagactataaggtacaagaatctctagttggaatgaccgatagtttttccgtattcaacgatctttaagcccctactatcccatttcttctagccaggatcacccattcgtctggccgagattagatggtactcactcttttcggctcgggaggcgctcatgccccggagcggcttgcggaagtgcttgcaccaacctcgccgctggaagagctgcagcagactggaggccctggtgctcgtctgcgcggcggatgactgcggctgtccatttgggcccagtgtctgcatgctggcgcccacgcgctctatttccgacgagcggcacgaggaggcgtcttccacggaggagctgcgccgcttcccgtcgtcatcggtgcgcaggcacacgcagctgcgtagcattgcggcaatttggtaacccaagacgtgagcccagtacctccgctacctcctccagctcctcctatgcccacttgccacctcactgggatccacacatgggctgagtgggcgcgggcgtggatgtggatgtgagtgtgggtgtgggtgtggggccaagaggtccgccttatgtcactcgcctgacaaggtaatataatttgcccgcccggcagctcatgggccagcgccttgttcgtccttcagatggctgtcagctggtgaatgagagatggtatttggagggtctcgggttctcgagaggtcttcgggggtccaagttgtctgacggctagtcactagtcactcgtctccagttgccctaatgcaaattgattttattttcgcgtaatttattcatttcgctgctgctgattgcgctcctcatatttcaattgtgcaaatccgcgtcttgaatcgctatctatctctcttggctgcaaataaattgtgaagaaaaatggtgatttaaatattgtcgccatttggcttttaataagaatgacaagtgtatacactataagcactatggctttcttaagcaacacccagaaaaattgagaacgaaaaaaaccaagatgggtagtgctcagcgtactcagtgccattaatcattctcataagaagaaaccttcttgatttcgagacgaaaacgatctcaatattgatattttcagttggaatccgcatgccaggatgtcatttgcaatctgagaatggttcaatctcgatctgagtattttgagcatgattcgactagttttttagatccaaattttcaaatcgagatttttctctaagtttgccaacccaattattattattgtttttttttatttgcttgtttttattgtttttgccattatatgttgtaattgcggtggacacgtatctaggctgcaatcttcgcatgccattctcggttaatgacagaggacaattaggaacttagggcttacaagcc

SEQ ID NO: 32708 - DNA, 315 bp, DROSOPHILA
atgctacgcagctgcgtgtgcctgcgcaccgatgacgacgggaagcggcgcagctcctccgtggaagacgcctcctcgtgccgctcgtcggaaatagagcgcgtgggcgccagcatgcagacactgggcccaaatggacagccgcagtcatccgccgcgcagacgagcaccagggcctccagtctgctgcagctcttccagcggcgaggttggtgcaagcacttccgcaagccgctccggggcatgagcgcctcccgagccgaaaagagtgagtaccatctaatctcggccagacgaatgggtgatcctggctag

SEQ ID NO: 32709 - protein, 104 aa, DROSOPHILA
MLRSCVCLRTDDDGKRRSSSVEDASSCRSSEIERVGASMQTLGPNGQPQSSAAQTSTRASSLLQLFQRRGWCKHFRKPLRGMSASRAEKSEYHLISARRMGDPG

SEQ ID NO: 32710 - DNA, 4423 bp, DROSOPHILA
tgaaagctttcaagttgtctgccgccataactataaaaacgaacaatgccaaacactcagatgtccaagtccatgaataaaattccgctacgcttcgcaggctgccccaaaatgacaaagaagcccccactcaatgctccatgccacagggcagtggtgctccgatctggacgcacatcgctggccaaagggggctgaactcaattcatgcataataaatgccccacttggtaggcgttttggccagtccccaaactatcaatgcgtaaggggtccaatgggggtgagctgaacttaatgtactcggtattctcggtaggaaggggtatgctcaacgctatcttgggaaaagaacatccattgtcttttagtaggttaaaaattgcatggaaataaattgttggaaaaaaggcaagaaaagtgaaagaaaaaaattaacaaacaattattggatacaagcagatttattgctggaaaaaataatattgaagagatttttagaatagaaagaatctcgggtagaaaaatgattattgactccgagctatactatcgaatactaggaaacaaagtagataggaggatataaataaatattataatgaagaggaaataaataccatatatatattcgtatataaatatacgaatagaaaaaattaaaaatttaactttaaaaaattatgaatgtattgcaaatgtttttacattttgcttgatacaacaccctcttgacattccaccagatgttgggacccataaagaggcctgaagtccagtatatatatatatattcaatgggtatcagatgaaaggactatcgacttttccatccatacacactttgactcaggcccttttttgttcgatacaattggaatgattagacctgccaattgacacgttcgagggatgaggggaatgtgccaatgggcaggaggcttaatggtgatgaatgcctgacccacttcggcagcatccgcttgccccatgcccgggaatgtggggaaaccccaagccaattgcccgtatgttcacgaacacaaaattccttttctcgcaggtggatggtgaggaaagcatttcactggcactgagtttcctccgcttgccttgtgccacccagtacataaaggtgcgcgatggaccgtcgctttcgtccacccttctcgtggaactcaatggcggtggactgatcctcaagggagccggcgttccggtggtcgtcgattccactggtggccaactcctggtggagttctctgccggcgatggaccggcgggcaatgccactcaggaggcaagtccagcctgcaccgggggattcatggccaatgtgcagcagcggttgggtgagtaaaacttcgataaatattcaacgaatttaataatttaatttaatttaaatgttcaacagctacaaggagcagtaacagtagtatcacacttgtggccgccactcgtttgtctggaaaaactcgctctgttgtccacaagtccatgtcaagacttcgatttaccctggttcatctgagtgccatgatctttgccagcataatcatcataattagttcccttttaggtgggctcttgaaatataagtatagattttatagatggtaatcaccacttctatcgcttctaggtgcccaatatgtggtgcgatatcggaagtatcacctggcagtggctcggcgacaggacgaaggatccagacttcacactcccagagcatcgctgagttccctgcaaggtcctccctcacgggccatgtccacaacaactctgctttcggaggtcatttacatggtgaagatgcggcccaaacaccacttgcgacactccattctccgcgagagcgtggacgccgaaaatctgaccaaagaaacggagttcaaggagtcggattcccagggaatgctggcgaaatggtaaggctaaaagagaggtggaaaaataaagctaactaaactcgttgcagcgcggaaattaaggagctgggaagctcggcctccatggtgactctgcgcaacgagagatcgtcaccagcgcgatctctggatactggaagtatcattggatcaccttcctctgcggaagccgaactggctgcggttcacagcaggtcagagtccaaggattccccctcggatgagccaatagagccgccgagctgcaaggacagcgccagggactcggagtccatcatatcctcaggaatgagttccctgtgcaacagtccaccgatgaacagcaagcgactgagcaagtactctgatcgctacgatgcggtgaccctgaagttactctcctccagattggatgagagcctgcaggatgccagctccctactatcggtgaccgaatccttcagattgggtcgcctgagaacccgtagtgtcagctcttccctgacgaatgtgagttacgaggttacactggaatttcttcagctaaaaattaataaaattagaagagctcactaatagttaactgtttcagggttgctattcaccagctgccagtgtggttagcacggcgaccatcaggacgaccagtaatcccaaggagtccaaggagaagcagaatcgaaggaaactcctggcccgaccaggctcagaattttcgcttggaaatcaagaagaacttgaaatggattactacgattacaatgtgatcaatgcaggatcggcaccgggctcctatcttggaatggatccggcttaccttatctggataccaccattcgaagaggtggcggagcgggaagaggacgacaagactccagaaccggaaccagatcccgagagggatgaacggcagccgctgtacgaggagatccggatgcccaagtacggacactacctaagtccagccagtaacacggagtccagcaagtccacaacggctgacaacacacccagctccgaggagagatccccgccagatagtgggcgtccctcaaaggccacctcaccctgcgatggaaccgaaaggggtggaagatccatgcccaagcaacccactcccttcatgtccagaaaacagagacgccagtccaaacagcagatgcaatccagtttgtccttgagcgctggttcgctggatcatgagcagcgacgcagcagtaaagttccaatcgaaattgctgcagtgcatcagaaggtggaaaccgaactggaacccaacgactccatgactggctcttatgtggagaaggaaactgccgtggagaaatcatcgggggatctgcaggagtttctgtctctcgatgatattcagttcgccgacgagagtggcagtgactacgaggctgtaaacctcaagaaagtacccaaatcggagctccaactaagccaggatgatgctcgatccaaaatcttgcgaagaaaggagccgaagtcaaaggaagtggccgtgtaacaccaagatataattgtacataaaaccagcacaagaatagcagtatatgtttagtatagtttataatacgatcttgtaaaatacgggtaaatataatatatacatatatcagcaccatacgaaacgtagaccacctggagtagtagttgtgtttttaaagctaggattaaagatcgtctcaataatatgtaaacttgaaaatcgaaaagaatatagaatgtagtctccacagctcttctttaagcctaatctgttcaatctctcgttacactgtacatatataagttagctaaggctcactgtagtttaagtatttattcgcactcggctatgtacacaaaccagtttatattgatttaattaatggattttatttggcaattacttgaatttataattagagaattggaattatgaaattttgtgatcttcattttgtgcttgtaagcattggaaaaattctagtcaatacattagtcaaaattaattagcatttaaaatcaaaaatgtttttgtttctaacagttttaaagcctttctatatcaccccgacctgtaagataagaaaataaataataatgaatggaataagatgtttttgttttttattttattttttttttttgagtggggtgtctattgttaaatgtcagctatagtaatgcagcgcaagttcattttgacaaaagatgcatttattatttaattggctttataagcatgcggatctgtcaacaacgattgcactttcttgccaaattcgcatgaaatatagagaaatgcatcaaatgactcattgtttttttttttttggaaacatatattagaactactcttcctgggaaaataaatagatatacaattttggatatgagtaatatgattaagtttcactaggaaaagtaattaaattacttttcttagggaaactagacatactactcgcagtgccgaaaatatttatcctactttccagagtgtaaagttcttttttgctgag

SEQ ID NO: 32711 - DNA, 2163 bp, DROSOPHILA
atgtggggaaaccccaagccaattgcccgtatgttcacgaacacaaaattccttttctcgcaggtggatggtgaggaaagcatttcactggcactgagtttcctccgcttgccttgtgccacccagtacataaaggtgcgcgatggaccgtcgctttcgtccacccttctcgtggaactcaatggcggtggactgatcctcaagggagccggcgttccggtggtcgtcgattccactggtggccaactcctggtggagttctctgccggcgatggaccggcgggcaatgccactcaggaggcaagtccagcctgcaccgggggattcatggccaatgtgcagcagcggttggctacaaggagcagtaacagtagtatcacacttgtggccgccactcgtttgtctggaaaaactcgctctgttgtccacaagtccatgtcaagacttcgatttaccctggttcatctgagtgccatgatctttgccagcataatcatcataattagttcccttttaggtgcccaatatgtggtgcgatatcggaagtatcacctggcagtggctcggcgacaggacgaaggatccagacttcacactcccagagcatcgctgagttccctgcaaggtcctccctcacgggccatgtccacaacaactctgctttcggaggtcatttacatggtgaagatgcggcccaaacaccacttgcgacactccattctccgcgagagcgtggacgccgaaaatctgaccaaagaaacggagttcaaggagtcggattcccagggaatgctggcgaaatgcgcggaaattaaggagctgggaagctcggcctccatggtgactctgcgcaacgagagatcgtcaccagcgcgatctctggatactggaagtatcattggatcaccttcctctgcggaagccgaactggctgcggttcacagcaggtcagagtccaaggattccccctcggatgagccaatagagccgccgagctgcaaggacagcgccagggactcggagtccatcatatcctcaggaatgagttccctgtgcaacagtccaccgatgaacagcaagcgactgagcaagtactctgatcgctacgatgcggtgaccctgaagttactctcctccagattggatgagagcctgcaggatgccagctccctactatcggtgaccgaatccttcagattgggtcgcctgagaacccgtagtgtcagctcttccctgacgaatggttgctattcaccagctgccagtgtggttagcacggcgaccatcaggacgaccagtaatcccaaggagtccaaggagaagcagaatcgaaggaaactcctggcccgaccaggctcagaattttcgcttggaaatcaagaagaacttgaaatggattactacgattacaatgtgatcaatgcaggatcggcaccgggctcctatcttggaatggatccggcttaccttatctggataccaccattcgaagaggtggcggagcgggaagaggacgacaagactccagaaccggaaccagatcccgagagggatgaacggcagccgctgtacgaggagatccggatgcccaagtacggacactacctaagtccagccagtaacacggagtccagcaagtccacaacggctgacaacacacccagctccgaggagagatccccgccagatagtgggcgtccctcaaaggccacctcaccctgcgatggaaccgaaaggggtggaagatccatgcccaagcaacccactcccttcatgtccagaaaacagagacgccagtccaaacagcagatgcaatccagtttgtccttgagcgctggttcgctggatcatgagcagcgacgcagcagtaaagttccaatcgaaattgctgcagtgcatcagaaggtggaaaccgaactggaacccaacgactccatgactggctcttatgtggagaaggaaactgccgtggagaaatcatcgggggatctgcaggagtttctgtctctcgatgatattcagttcgccgacgagagtggcagtgactacgaggctgtaaacctcaagaaagtacccaaatcggagctccaactaagccaggatgatgctcgatccaaaatcttgcgaagaaaggagccgaagtcaaaggaagtggccgtgtaa

SEQ ID NO: 32712 - protein, 720 aa, DROSOPHILA
MWGNPKPIARMFTNTKFLFSQVDGEESISLALSFLRLPCATQYIKVRDGPSLSSTLLVELNGGGLILKGAGVPVVVDSTGGQLLVEFSAGDGPAGNATQEASPACTGGFMANVQQRLATRSSNSSITLVAATRLSGKTRSVVHKSMSRLRFTLVHLSAMIFASIIIIISSLLGAQYVVRYRKYHLAVARRQDEGSRLHTPRASLSSLQGPPSRAMSTTTLLSEVIYMVKMRPKHHLRHSILRESVDAENLTKETEFKESDSQGMLAKCAEIKELGSSASMVTLRNERSSPARSLDTGSIIGSPSSAEAELAAVHSRSESKDSPSDEPIEPPSCKDSARDSESIISSGMSSLCNSPPMNSKRLSKYSDRYDAVTLKLLSSRLDESLQDASSLLSVTESFRLGRLRTRSVSSSLTNGCYSPAASVVSTATIRTTSNPKESKEKQNRRKLLARPGSEFSLGNQEELEMDYYDYNVINAGSAPGSYLGMDPAYLIWIPPFEEVAEREEDDKTPEPEPDPERDERQPLYEEIRMPKYGHYLSPASNTESSKSTTADNTPSSEERSPPDSGRPSKATSPCDGTERGGRSMPKQPTPFMSRKQRRQSKQQMQSSLSLSAGSLDHEQRRSSKVPIEIAAVHQKVETELEPNDSMTGSYVEKETAVEKSSGDLQEFLSLDDIQFADESGSDYEAVNLKKVPKSELQLSQDDARSKILRRKEPKSKEVAV

SEQ ID NO: 32713 - DNA, 3797 bp, DROSOPHILA
aatggattcgccgtgaggcgactacaattgcgtgggcggctgtgtccatgggccggctgctggaggagcacccggtcggtgggtgccacacccacacccacttgcctcgacaatttgcatttgcccccaaaagaaacgcccggaggcgttgccgcccatgtgcgtgtacaaatattgccccacgggctattaatcaaacaaagctcccacacggcaggcactatttgcttttagaaaacacggggaataaccttttgtgaccacagaagcaccacaaactcaaattagtggctttctagtggcgctttaagcattttaaggcagtaaaatgtttaccatattcatgatttaggcagaaaaacacatttaaattaaatttaaatagaatttaaccaaaattgttagtcattctggggagaaaaatttataaaatggagcttaaagttatatatctatttgtaaggggatagctaaaatacctctgaaaaaaaactgatatttttaatggtttttatagaatatatttgtccagtttggtttatttaaggtaatgctgtggttgaactaaaaaatgattcttgttcgctgagtttcactcttttcccaaaaaagccacatctgtaatgatattcaggttcgcttccgaaaacaattggaaataatagtacatgtgtatacatataacaaatggattcactttaaactctttaggtccttggaaaatgctttactaaattaatagtcgagttccttccagaaaataaagctttatggtcaaacagtaaaggatatgggttcagctttgaaaagctttaatttccttgacaacggttcatcaactagttgttataacagagctcattttaattaaacaaagaacgatgggtgtgcaaattcatacttataaacaatgtcactggcgttttgtaattcttaaaatatcaaacactcgtcaaaattcgtagacagtcaattctgataacgaacagcagcctcaaaaatgccgccgaaagtgaagaaggagaagaaggatgtgaacaaggtgacccaggtggacagaaccttctacgagctgaccatcacggatctcaaccagaaactagctcgactgcgatcccacgtgaccaccgtcgatgagtccaacatcacgctgaccgagaaactcaaggaagtggaggccgatggcgtcgacgtggccgctcacttggaacgcaccctggcggagaggaataactcgatcaccgaactggaggagcgcctggtagagatcaccaaggtgcgggatgtggagaaccgcgtggcacaggagaagatcggcgacttggagtcgaaatacaaggccatgcacgaccagttgacctccgaaataaagctgcttaatggcaagctgaattccctcgacgagttccgcatccagagggatgtcctgttggccaagttcgatgagcaggaggcggatctcaatgagcgcgagaaggatcacaaggaggcgctctataatatggaacaacgagctgtggtggagaaggatgcgctaaaaaaggaggtcgaacagaagctgctgcaagtttccgaggacttcacccggtccagtgagatccgcaacgctggctacacccgccgcctgattcgtgagaacatagccctgcaaaaggagatcgatctactggtcatgtcccagataaaactgcagcaggcatataccaaccagaagtccaagcacaaggagatggaggagcagtacagtgccctcgatcaaatcaaaaacgagctggtccgcaactccgtgaacaagatcaaaatcattgagggtctgaccaggaactacgagaaactgaaagccaagtacgtggaggtactgcgctacaagaaggcctatgaatcccttctccaagctgaaaagtgcgagaatgtcaagcaaaaggatgcggccggaaaactccggaccctggccaagcgaatggagattttggatctggacaatcgaaatctggaggtggtccatgcccagcacgagatcgagattactcgactgcgtggagtcattcaagagatcaagtgcactgtgcgggatgcgattgtggcggagcaggcagccaagaaattcccggagagattagtcgaggccaatgtggatgatcccgcaatgataaatgaagttcgggaggaggccatatccctttgcaagctgaaacgcagcgatttgctctcccagcttatgagcatcgtgagctcccattcggaggagcttccgaagactccatcgattgcctccattgtcagtgccacctcatcgctgtatgctccaggtaaaatgggcttcatgcccacgagacccaaagcaacgccattcgacgccttccgcagcgaggtcatcgaacaggagccggatcgcaccgttccggaggatctgcaaaagcagaagatgcaggatcggctaatgacctcgttgcgaggtgacgagaataccataatcgatgtggaattcggcactactctatacgtttcatcatcgcgcgaggacgatctcattgaggtggaggaggagccactggaggagccagagggttccaccagctccatgtctgtgaagaaggccagcagtgagggttcagtggctccgcccgaaaccgtaccgctagccgtttccgcatcctcgaaggacatcaagggtgctcccagcattggggctctggacacactgacggccacatccaaaatgacgggtgttaccaacgaggacgagggcgaggaggaaggcgaggaggaggacttcgatgtgcagttcgtctactagagggatatgaaaattgagtttacttgtagttccaattttgttgagtcttgaataaatatgtgcaaagtcaaaaacgtgttattctttcgtttaaattctttaaatgtttcattaacatagaaagacttcatgataatttccatagctcatacacctctgcagttcgattcgtcactactttcttttcttttgagcgcttttttaaactcttaataatataatttacatatgtatttacagggtccttcggttgagacccaaaagtgtggcaaaagcatcgccgacacgtgggactgcatttacgagacttcgggtacagtcatcaccaaggaaaatagcaccgaggtgagccaggaaattggaccaggatgtcgttgcggctgcattgtacatctgggctcttcgaagcccaaaaggatcattgctggagccacacagagctgtcctggccgctcattctggctaatacaggtacagactattaaccaattccataacaacctctcaacttaccaaaaaaatataaaaaaaaaaatagtagaaaatagggaaagttaagtgacgctgccctttggcatttggtcaagttttgaaagctttcaagttgtctgccgccataactataaaaacgaacaatgccaaacactcagatgtccaagtccatgaataaaattccgctacgcttcgcaggctgccccaaaatgacaaagaagcccccactcaatgctccatgccacagggcagtggtgctccgatctggacgcacatcgctggccaaagggggctgaactcaattcatgcataataaatgccccacttggtaggcgttttggccagtccccaaactatcaatgcgtaaggggtccaatgggggtgagctgaacttaatgtactcggtattctcggtaggaaggggtatgctcaacgctatcttgggaaaagaacatccattgtcttttagtaggttaaaaattgcatggaaataaattgttggaaaaaa

SEQ ID NO: 32714 - DNA, 1797 bp, DROSOPHILA
atgccgccgaaagtgaagaaggagaagaaggatgtgaacaaggtgacccaggtggacagaaccttctacgagctgaccatcacggatctcaaccagaaactagctcgactgcgatcccacgtgaccaccgtcgatgagtccaacatcacgctgaccgagaaactcaaggaagtggaggccgatggcgtcgacgtggccgctcacttggaacgcaccctggcggagaggaataactcgatcaccgaactggaggagcgcctggtagagatcaccaaggtgcgggatgtggagaaccgcgtggcacaggagaagatcggcgacttggagtcgaaatacaaggccatgcacgaccagttgacctccgaaataaagctgcttaatggcaagctgaattccctcgacgagttccgcatccagagggatgtcctgttggccaagttcgatgagcaggaggcggatctcaatgagcgcgagaaggatcacaaggaggcgctctataatatggaacaacgagctgtggtggagaaggatgcgctaaaaaaggaggtcgaacagaagctgctgcaagtttccgaggacttcacccggtccagtgagatccgcaacgctggctacacccgccgcctgattcgtgagaacatagccctgcaaaaggagatcgatctactggtcatgtcccagataaaactgcagcaggcatataccaaccagaagtccaagcacaaggagatggaggagcagtacagtgccctcgatcaaatcaaaaacgagctggtccgcaactccgtgaacaagatcaaaatcattgagggtctgaccaggaactacgagaaactgaaagccaagtacgtggaggtactgcgctacaagaaggcctatgaatcccttctccaagctgaaaagtgcgagaatgtcaagcaaaaggatgcggccggaaaactccggaccctggccaagcgaatggagattttggatctggacaatcgaaatctggaggtggtccatgcccagcacgagatcgagattactcgactgcgtggagtcattcaagagatcaagtgcactgtgcgggatgcgattgtggcggagcaggcagccaagaaattcccggagagattagtcgaggccaatgtggatgatcccgcaatgataaatgaagttcgggaggaggccatatccctttgcaagctgaaacgcagcgatttgctctcccagcttatgagcatcgtgagctcccattcggaggagcttccgaagactccatcgattgcctccattgtcagtgccacctcatcgctgtatgctccaggtaaaatgggcttcatgcccacgagacccaaagcaacgccattcgacgccttccgcagcgaggtcatcgaacaggagccggatcgcaccgttccggaggatctgcaaaagcagaagatgcaggatcggctaatgacctcgttgcgaggtgacgagaataccataatcgatgtggaattcggcactactctatacgtttcatcatcgcgcgaggacgatctcattgaggtggaggaggagccactggaggagccagagggttccaccagctccatgtctgtgaagaaggccagcagtgagggttcagtggctccgcccgaaaccgtaccgctagccgtttccgcatcctcgaaggacatcaagggtgctcccagcattggggctctggacacactgacggccacatccaaaatgacgggtgttaccaacgaggacgagggcgaggaggaaggcgaggaggaggacttcgatgtgcagttcgtctactag

SEQ ID NO: 32715 - protein, 598 aa, DROSOPHILA
MPPKVKKEKKDVNKVTQVDRTFYELTITDLNQKLARLRSHVTTVDESNITLTEKLKEVEADGVDVAAHLERTLAERNNSITELEERLVEITKVRDVENRVAQEKIGDLESKYKAMHDQLTSEIKLLNGKLNSLDEFRIQRDVLLAKFDEQEADLNEREKDHKEALYNMEQRAVVEKDALKKEVEQKLLQVSEDFTRSSEIRNAGYTRRLIRENIALQKEIDLLVMSQIKLQQAYTNQKSKHKEMEEQYSALDQIKNELVRNSVNKIKIIEGLTRNYEKLKAKYVEVLRYKKAYESLLQAEKCENVKQKDAAGKLRTLAKRMEILDLDNRNLEVVHAQHEIEITRLRGVIQEIKCTVRDAIVAEQAAKKFPERLVEANVDDPAMINEVREEAISLCKLKRSDLLSQLMSIVSSHSEELPKTPSIASIVSATSSLYAPGKMGFMPTRPKATPFDAFRSEVIEQEPDRTVPEDLQKQKMQDRLMTSLRGDENTIIDVEFGTTLYVSSSREDDLIEVEEEPLEEPEGSTSSMSVKKASSEGSVAPPETVPLAVSASSKDIKGAPSIGALDTLTATSKMTGVTNEDEGEEEGEEEDFDVQFVY

SEQ ID NO: 32716 - DNA, 3673 bp, DROSOPHILA
aagccgaaggaaatgcggaaaaactcaaaggaaatggcggcgaatcggaggcgcaagaagacaatcggcatgctgacatcgggactgaaatcagtagtcaagtggaaaattattgtctcatccataatgttgctcttattaagcgggacaagtgagtgaaactcatttacggcactacatgtgactgcctctgacacattcggcctgaataaatacataaattcatttgtacgcccaacaggcgtatacgcaatatttggatagcacacagtagatactttgaaatggtcagcaaggcgttatccaaatcatgttgtttcactatacaagtgcaagtgcaaactttaccaggggagtttactagttctggcattttcaccatctgtcattttgaattcgacaacgagatgtaaaaccaactaacagaaataccctttatgtccttgtaaatatatttaggaacacaactatttcacaaaatgcacaagagcttaaggatcaattgcattaatatttgaatatttttttgtaatataatataattaaaaaatcttgcaatatctaggatattaggtatatattttgtatattccgtttaaaatagagatcagtagagttgagtctttatctatccacaacaaaaaaagagaaagacatcaaacttcgtggctgtggatggagttttccttctatgtttttgttttgtttgcataatttgtacccgggggagttgctggatgcgaatgcgactcaatttacacgacctgggtggagtgaacaatggccgaggctcttcaatgggtccaaacagaaggcagccacacgaaacaaattacaaggatttataattcttatctctccgctttgcttttctctctctcttgtttcatgtggtgactccttggaaattgccggcattgtgtactcctgctactgcaatttggattcggatgcggtttcgacaaaaggtcacgtgctggcggtgcgaaagggtcgtctgatgtcccccagcacattcaccgccctcagcggggacctgcatgtgcagatccagttcaatgggaacgagatgtcttcgcaggcggaggaggagcacaccatcggtggtggcccgtccaacgaggagcccttgagctccagtgacgggctgaagagcaggaacaacaccataatgagcactttagtcattagcaaaatcattgatgaagtggagtcaccgctggaaaagggtttgactccgggccccgaggtaaccaataccagccaggtggtgctgcatcgcaagcgcaaggaggtggtgcagaatataccgctcttcccggatccccgattcaatgtcacccaggtgacggtgccatgccagaccttcctgatcggaggacgctacgagatgcaggtggtgagcaatctcaagtcggttaaccggagtgaggtgaccaccacattggtgcccgcgcaggatgagcgactccaccagacgctcgatgtgcgatggcccagtgccgagatgatagtgagtccggtgcgcctgaagacctatcccaagcatcctgtggaggtgaccctccgctttcccgaggtcaactgcaatcagtcgggcagtctggcattgccggaattttggttggagctaatttactgcggcaaggatcgcagctgcaatcggaatataaccccaactagtgtcctttttgcggagcaaatacgcggattccccaaaaacaagagcctccatctgggatgcgaactatttggactagcgggaaactatgcagtccaactgagaccgatgattcccgcccagaacgtgcccaccacccggcggctactgagcgtcgattggagcgacgaattcgtgttcaacgtgtatgcccgcagcatatttccctgtgatccgcacacgggaatcggtgtcctgtacgagtatcctggctgcattctcgagcagggcgaccgggtgcgtctttatgctaggctgcgggccgatgtcgcctccctgaagccacccacgtcgctccactatgtctccgagcagcgggtcgtcaagagccagcattccctgtactttgcctgcgagcacttctccgagaagtacgtagagtactgcttcgtctacgtcagccaggcaatttccggagccgtagccgatgtccggatggactgtgtgcccaccctgcccgtcagcggtgagtggtcgatggtgcattaacgccgtttttaactccattaaaaggaaaatcccaattaagctggagttcaaatagttcttaacacattattgcgtgtgctcgctacactgaaaaaaatacccttttaattactatttcgcattaatttttaaaaaagcataacttcaaattttttcacattatttaaattttaatcaagccctaaagcattacaaaggcatttttgaaatacataaccctcaaatagtttcattttcccgccccattatattatatatttaagcacgctgtataagttttgaagtgattagctcatgacaccactctttccgcagactcggataccggtggctggggaccttggagcgagtggacgccctgctccacaaattgcttgggaggaacgcgcaatcgctaccgcttctgtgactcaccacccccgcgatatggggccaaattctgtgaggtatgtaagcccaaataactcgccagattaacctctgaacgacctctgcctccccacctgatttgacaacgttaacagccaaagtttgattgagtgctcccagaaatgattaatactttggcgcatctgagccatcaagacgatttcaataagtgcggaactacaactaaagacaggcgaacttcgcccgactctggggacttcgttacccaagagattgcttccagcttagttcacacattacactcgactttcctacactgagcgaattctaaacactttatattaactaaaaactctcagcttagaacatataaatgagggcatagccaaactcagctaaaactcaaatacaagctcaaacattttcattagtgacgaaacaaatacatttttttatattcccaaaagtaaaacggataaaatcttgaaattgaaaggcaactgagtaattccttgcagtgtagcccgccggggcaaagtggaactatttcattgtttttgtttgtgggccatgccgtggagtggactggcagccggagtgggtggcttcggcacggtatgttatgttgtctgcaagcgtgtttccacactgcgacacttgctccagattgcgtggggaatttacgacgcttccgacaattgtcggcctactgcgccacgctttatcttgtttcttttgttgaagcgagtggaagaatgaacctccgcctccgtcactatctgttcccgcactgccaccatccacgtcctcatccgcgcatttcattatccaaaaacttccggcatcaggatccagcgataggggcacatttgcccgtactttgccaacttgttcggaacaattacaggcaaagtttttaaatgctccgcacacttattgcaagtagttcttacacgggagtcgcggacgccacggatgctggaacaatggattcgccgtgaggcgactacaattgcgtgggcggctgtgtccatgggccggctgctggaggagcacccggtcggtgggtgccac

SEQ ID NO: 32717 - DNA, 1335 bp, DROSOPHILA
atgtcccccagcacattcaccgccctcagcggggacctgcatgtgcagatccagttcaatgggaacgagatgtcttcgcaggcggaggaggagcacaccatcggtggtggcccgtccaacgaggagcccttgagctccagtgacgggctgaagagcaggaacaacaccataatgagcactttagtcattagcaaaatcattgatgaagtggagtcaccgctggaaaagggtttgactccgggccccgaggtaaccaataccagccaggtggtgctgcatcgcaagcgcaaggaggtggtgcagaatataccgctcttcccggatccccgattcaatgtcacccaggtgacggtgccatgccagaccttcctgatcggaggacgctacgagatgcaggtggtgagcaatctcaagtcggttaaccggagtgaggtgaccaccacattggtgcccgcgcaggatgagcgactccaccagacgctcgatgtgcgatggcccagtgccgagatgatagtgagtccggtgcgcctgaagacctatcccaagcatcctgtggaggtgaccctccgctttcccgaggtcaactgcaatcagtcgggcagtctggcattgccggaattttggttggagctaatttactgcggcaaggatcgcagctgcaatcggaatataaccccaactagtgtcctttttgcggagcaaatacgcggattccccaaaaacaagagcctccatctgggatgcgaactatttggactagcgggaaactatgcagtccaactgagaccgatgattcccgcccagaacgtgcccaccacccggcggctactgagcgtcgattggagcgacgaattcgtgttcaacgtgtatgcccgcagcatatttccctgtgatccgcacacgggaatcggtgtcctgtacgagtatcctggctgcattctcgagcagggcgaccgggtgcgtctttatgctaggctgcgggccgatgtcgcctccctgaagccacccacgtcgctccactatgtctccgagcagcgggtcgtcaagagccagcattccctgtactttgcctgcgagcacttctccgagaagtacgtagagtactgcttcgtctacgtcagccaggcaatttccggagccgtagccgatgtccggatggactgtgtgcccaccctgcccgtcagcgactcggataccggtggctggggaccttggagcgagtggacgccctgctccacaaattgcttgggaggaacgcgcaatcgctaccgcttctgtgactcaccacccccgcgatatggggccaaattctgtgaggtatgtaagcccaaataa

SEQ ID NO: 32718 - protein, 444 aa, DROSOPHILA
MSPSTFTALSGDLHVQIQFNGNEMSSQAEEEHTIGGGPSNEEPLSSSDGLKSRNNTIMSTLVISKIIDEVESPLEKGLTPGPEVTNTSQVVLHRKRKEVVQNIPLFPDPRFNVTQVTVPCQTFLIGGRYEMQVVSNLKSVNRSEVTTTLVPAQDERLHQTLDVRWPSAEMIVSPVRLKTYPKHPVEVTLRFPEVNCNQSGSLALPEFWLELIYCGKDRSCNRNITPTSVLFAEQIRGFPKNKSLHLGCELFGLAGNYAVQLRPMIPAQNVPTTRRLLSVDWSDEFVFNVYARSIFPCDPHTGIGVLYEYPGCILEQGDRVRLYARLRADVASLKPPTSLHYVSEQRVVKSQHSLYFACEHFSEKYVEYCFVYVSQAISGAVADVRMDCVPTLPVSDSDTGGWGPWSEWTPCSTNCLGGTRNRYRFCDSPPPRYGAKFCEVCKPK

SEQ ID NO: 32719 - DNA, 2513 bp, DROSOPHILA
tggcattcagcagatgtaatgtcaatgccaagtggaaagccactttacctttgccttggaatacaggtggtgcgaagtggttaggaatagacatatgcctagggatctgggtattatgatggggcggcgggattagtttggggctgcattgtttgtgataatgaaatatgcaatgtcctaagcggacaactgacgtcaaattgtgtgtgcgtgtcttggctgcaacgcaggattaggccgaaaagtagcggcaaaagtgggtggtgcagatttttagtgggcggggacctggctaataccagcttagtgcgttcaagtggcggcgcaaggagacgactggcaaggtaaatagttgagttgagcggcttaaccttgtggcgactcaaagtaaatagtagcgcaccacaggctgaaacttcgctatctcttttcaacgcccccaatttctttgcccgccctgcggctttctttgttcgctgtttactgttgttgtgactgtttttttatttatttatttttttttgggttgggggaggggtgttggcgtcctgctgccccacacacatgtgaccgcaaatctaacgtgaagaaataaatgagtttttcacattaggaggcaacgaagcgacaccaccaacggcaacttgctgggccacaaaggcgccggatggcaaaaggaatactcgacaacgagcacaaatggcagccgagatgaaaaatgttttttaatttttgaaagtggtttcattgtcagccgtgcgtaacgtaaagtctgcaaggatacggcggcagggcatacatttgcccaaaacattcgctcacgttctgaggaaatggcctgctgcgctcgagtagccagcacatctccatcaccatctccatctctccatttccatcttggacacaggtccactccgaccatcaatggctagccccaaaaatgtgagtgccagtgtgtgaaaactattgtatggagtgcattattgacactgcgcgatactcacatgcccgtgtactcctccggatagggaatgatgtagccatcgggactgggccttggcgtcttgcccacccagaagaaggcgtccggtccggtgccgtcgtaggcaaaggatttgacgaacagcgtcgactcgtccaccgcgtagatttgaccctgcggaaaaggattatatggtttataaatatagtactatactttcttcttaaaacgtaaaataatagcattacttattacgcaaaatttcgcaaagcttatgttgcccaagaaggcagtatttatatgaagtataaaactcaccttaatgccatgggcaaagttggtaaaatctccaatatagcgaccgtagtagggttccggtggagctcgtccggctgctgtggatgaaaggaacgggttgtgagatcgttagttgcagcagatttaattgaaaacgagcgtccaaaaaataagttttccatctcattcacaaacacagaggcgacggacgaacgagatttcaatgcgatgcatttgcaggtgcttttgctgcaatctctgttagggattcataatccggaggctcaagaaaatcgctggacacggacaaagagcgaagcccgctttgcaaattaatcctcagacgaaagaactttgccatacaaaaaaagtttctgccgtgacgatgtgcctccaaccatccaatgggctctgccagtggatgatggctacgaacgatgaagatgactatgatgaactggctctgtttgccaaaactcttgacaagtccccgggggagttgttggcatgcctttccctttgggattgcgccatgaaattgattgaaaaccatgaaatatattgaaattcaatgctaagctcgacttggctgccagagaacttgccactaaacaatgcaaatgtatgccaaatgttttaaaagtacagaaacaggcagacagcctccaattgataggtgtcagatcagaggtgggttactggggggtatgaaattatagtttgatattaaatcgcaatgccgtaagctgcttcaatccacaatcgttgccagggaattccccagaatgtctcaattggaagttggtagatggtagatggtaaatggtggctggtagccacgacgacagaaacaacaaaagcgtaatatgaattaaatcaactaatgcgtgcattaatctctgaagtcctggcccaccgagcacgtggccccaatggcatatatatatatacgtgctcgaggatatttatacaaagtgatgacgagcacgttgacaacccccgaccctcaataaataaagagaaaagccctaggaaaaaccgcctgaagctgcccggcacacgaccaccgatggttgttgttaataatgtttggttgctgcctggctcgggttcataaggattttcgtggaaatcgggggagagggtggaacaaataatactcaatggccatgtctatctttctggctggctgagtggatgtgtctgtggcgttcgtctcctgatatttcgtcac

SEQ ID NO: 32720 - DNA, 276 bp, DROSOPHILA
atgcatcgcattgaaatctcgttcgtccgtcgcctctgtgtttcagccggacgagctccaccggaaccctactacggtcgctatattggagattttaccaactttgcccatggcattaagggtcaaatctacgcggtggacgagtcgacgctgttcgtcaaatcctttgcctacgacggcaccggaccggacgccttcttctgggtgggcaagacgccaaggcccagtcccgatggctacatcattccctatccggaggagtacacgggcatgtga

SEQ ID NO: 32721 - protein, 91 aa, DROSOPHILA
MHRIEISFVRRLCVSAGRAPPEPYYGRYIGDFTNFAHGIKGQIYAVDESTLFVKSFAYDGTGPDAFFWVGKTPRPSPDGYIIPYPEEYTGM

SEQ ID NO: 32722 - DNA, 2495 bp, DROSOPHILA
gccatcgcgccacagcaaacacattccatagggtagcgaggggcatctttgaaccccagaagcttcagtgcagcgccatatatgttcaaacgttgtcgagtgccaaatattcctgttactatatatatagccggcaatcgagcctgtatccacatccacaaaatcagcaacgacctttgcctcaacctttgaccgcctaacaaatcaagtgtcttaaaaacgatcgcattagcatgtaaaattcagatttccgataactatgtttaggtgtttgattacgtttaaatgatattatgttgaacatgtcatttttgtttatttaaggtttttgtcgtgtaatttgttttagaacgaacccaaatgcttgtcttccacaagtactaattaatgttgtacacatatatgttgtactttagataactacgataagatgtaggctatgtaatgttgtcgaaaaacgttgtacgtctcttatgcaaacaagtgccacagtcttaatgcaatagcaaccatatcttcgattttacgaacgagccacgtggttttagcacaaatttactaacgagtcaattacgaaatactaatgtaaaacgaattcttgtatgctacaattttacacaattttttaaagaaagcataactatttacactgtttttatacgatttcgtatagtcataaagtagagcaactaaatattgagatttattcgttaagaatattatatgtatgaacaacttgcactgaaaccataacgcacaattatttaaacaaaagtttgaatatttaattttagccaaaattactgtttaattatgttttaaatggattctgtgtaattttcgatctgtgtatcggccaaagattaagcaataataaaataaaagtaagcatgtattatctactattccttatagcttgacaactgagtctgaaaattagattttaaagataaaacaaattctttttttttttggttaaaaaagtttattaaattttttgtttggggttgttttgattagtaaaacgcgagacctgtcaaaaatgaacacattagccaggccggttaaaagttggttataaataaatattgtcaagtatataaaatataagatgtcagatttgtatagaaaaaatcaatcctgaagttggagcttaagtttagtaaattttaaaatggcttcagtttcatccttgaaaaggcacacaataatacggtttgaaaatgcacggaatgttcgttgttcagggacagcagggtcctgagatttgagaccaaggtgtaagagagtgggcgtgaaaggtgtcaggaacaggatcaaacatcaactccacgggacgagtgcagatccacgcatattttagagttgcgattctgcttctgacttatctctagtacttggaacatctccttgagagcctcgctggtgcccgtcttgcggcgattgcgtcttcgcagggtcacacctcccgacttaaactcacgcatcagagcgtcaagacctgaaacaaaaaaggtgaaagtgaatgagacccaggctttgcggcgaaattacaataagtcgctaccaaagccgaacgaacatgcggttagatgttagcataggatttgacataatagtgtcccgaggagcagtcaatactcacctacgtaatcgagcaatcttgggactttaaaggactttggctaggtggcaattggacataaatcacggacagagtcaaacgggttgatgcgagcaccatgtcgggtactcagcaactgtcaccgccgacaaatgaagttggaccctgatacaagtcaatggaaatatacggtctcccactcctgctcaagatgtgtgtgtgtgtgtgttttcagtgtggttttcagcacgagagctcaggactggcagcagcagaagcaggagcaggaaaagtggcgcaataaaacacggaaatataaaacgcacaaataataataataagccatgcccggccgcccagtaacaacaatgcggcttgcggttctggaacggtgctatggccatggcccttcctcgtaaaaataataaattgcgtcctctccgccatcgtcatcatcgtcgtcgaatttgatacggtcctagcttgacagttttgggcggggatggaggaaatgggccaggaaccaacataaagcaaggcaagcgtaaagtgtaggaaaaatgcgagagtttcgtttaaagccaaaattcaggcaggtttccttggtgccgggccaaggaagccagtcaaaagccttttgctccagttcgccggaatctcggcatggcggctctgtggagaaacttaaatcaaatttaagttttcaatgtatcgcatgaaaccggaaatggcactcagagagacgagcagagagctttagtgtcgaggaggatattgataaatgtgtgcgcccccactcccaaagacaattcgtttaaaccgtactctagcgcacacacataagcccgtagattcggcaaaaaggcaggtc

SEQ ID NO: 32723 - DNA, 495 bp, DROSOPHILA
acgctctgatgcgtgagtttaagtcgggaggtgtgaccctgcgaagacgcaatcgccgcaagacgggcaccagcgaggctctcaaggagatgttccaagtactagagataagtcagaagcagaatcgcaactctaaaatatgcgtggatctgcactcgtcccgtggagttgatgtttgatcctgttcctgacacctttcacgcccactctcttacaccttggtctcaaatctcaggaccctgctgtccctgaacaacgaacattccgtgcattttcaaaccgtattattgtgtgccttttcaaggatgaaactgaagccattttaaaatttactaaacttaagctccaacttcaggattgattttttctatacaaatctgacatcttatattttatatacttgacaatatttatttataaccaacttttaaccggcctggctaatgtgttcatttttgacaggtctcgcgttttactaatcaaaacaaccccaaa

SEQ ID NO: 32724 - protein, 56 aa, DROSOPHILA
MREFKSGGVTLRRRNRRKTGTSEALKEMFQVLEISQKQNRNSKICVDLHSSRGVDV

SEQ ID NO: 32725 - DNA, 2498 bp, DROSOPHILA
gtcctgaccgctggacactgcctggccagccgagaactggacaaatccggtgccgttctacacagcgttcgcctgggggagtgggacactcgtaccgatcctgactgcaccacccagatgaacggacagcgcatctgtgcaccgaaacacatcgacattgaggtcgagaagggcatcatccacgagatgtatgctcccaattccgttgatcagcgtaatgacattgcgttggtgcgccttaagaggattgttaggtatgtggtccagagatccctcaattattccactgacttgcttttttgtttttgccacagctacaccgactacgtgcgtccaatatgccttcccacggatggtttagtccaaaacaactttgtggactacggcatggatgtggccggctggggacttaccgagaacatgcagccaagtgcgatcaagctgaagatcaccgtcaacgtttggaacctaacgagttgtcaggaaaagtactccagcttcaaggtgaaactggacgattctcagatgtgtgccggcggccagttgggcgtggatacatgcggtggcgattccggcggtccccttatggtgcctatatccacgggcggccgggatgtcttctacattgccggcgtcacctcctacgggacgaagccctgcggcctcaagggatggcccggcgtctatacccgcacgggggctttcatcgattggataaagcagaaattggagccatgatgaatacatacttaaatacatgataaccatgtgaaaagcgcgatgtagatattggggtttaatcaattcacatgagatcggcactgtcaagttttgcgagcacaaccggttgtaataatatcgaaccacttttctgtcaatctgtgatcagcaaagtctggtagtagcttgcccacgtaatttcccatattctaatggaaaagtagaggaaaatctctggaactcatttatctctgttgcaatagccatctcacttgtcaatctagacggcagatgtgccggagagcttggtcagtatcggattgggttctggggtatcgagatggcttccatggaatggaattttctactattgctaatggtcatctgcgcattttccgagtgggtccaacattcagatgggatgccataaacgacaacgatttcacctggatccgcttaaaattttgaaatatatccacacacgaggtggagaagggcattgtacatgaccaatagttgcctaattccgtagaccagcagaatgacattgctttggttttgaaaaggagtggcattgaaaaggagtggcgggtgtgtgggatgtgtgagtattccataacttcttcatcattgttattcattcaccagctacaccgactacgtgcgccccatttgcctgcccacgggcgatctgatccagatccaattgtgcgccggcggcatgtacggctatggatacctgcgatggcgattctggcggtcccttgatggtgtccatatccacaggcagccgggacgtattctacatcgctggcattacttcctacggcacgaagcagtgcggcctcggtggataacccggtgtatataccctcaggggggctttcatcgattggataaagcagaaattggaggcataataaataaaattgctagtttattcacatttctcgcattggctagcttacaatattacgtacatggtgctgattggacgtgggatggactaactaagctaggttctagtggaatgcctacaaatattcgcgtaggccagcgttcacaatattcgcaacaaaacattaaattttatttgttagctggcctgataacaacataaagtaaaactcgctgacattacatgaggcggattcctttaacaatttatgcttagttgcgcgctatatataattcagctttgtttgttgttttttaaactaataaccaataatcgtagaaaattttgtttaactaaaaggctgtctgccagcaatacgagcggatagaaattcgagattcgagataggggctataaaacgctgacacttgccgagggccagatcagactcccaaaacgcaggcggcaaaagtcttgtggttcttctgataggcaccattttcataggcatacgctggccaggatgagtggcaatcagatctcctccggagcagcgcgcggggcagtgccaattccagtcgcaatgccattacgttcatccgtaaccagattggcacccaaggcagttagctcgctttgaagttggctcaaaacgcgcttgaccgctatgcaaaagcctcgactgcatggtagcagcgggaattcgggtagctcgcaagacgccttgtactccacaggcatgtctaagaaaatggattatgaataatcgagcaaaactgagttattggctgactcacccttgattttggttatattttggcgctgtgcctcaagagaatactccgaccaggcccgcatgcgggcatacagctcggtgcca

SEQ ID NO: 32726 - DNA, 179 bp, DROSOPHILA
atggacaccatcaagggaccgccagaatcgccatcgcaggtatccatagccgtacatgccgccggcgcacaattggatctggatcagatcgcccgtgggcaggcaaatggggcgcacgtagtcggtgtagctgacccaatccgatactgaccaagctctccggcacatctgccgtctag

SEQ ID NO: 32727 - protein, 49 aa, DROSOPHILA
MDTIKGPPESPSQVSIAVHAAGAQLDLDQIARGQANGAHVVGVADPIRY

SEQ ID NO: 32728 - DNA, 10722 bp, DROSOPHILA
gggagctgggaaggatggtcttaacagtttcccttgcgccttgctgcgtcattttgatgttttattactcgacttccgccagccacagcaaaatggcggcggacccttctagtccacccactttcgcccaccgcacgcaacgcaaaaagtggccagcatgaaaaaatgaagtgttcaaaggtaaagcgactcggccccgtccgtctgtatatattctccatggcaaaggcattaacatggcgctcctgtgcttgttccgctttcttgtattccttgtagttcccaagaagttggccctgcctcgggtttatgttttgtagcaaattacgttttaatgccggggccaaccaagttttattgcaacttttgttgcatttcagctaaattgaattatgtaccctgccgtgttcagtcgccccgagggaacagtggggtgtttgagtcagagtcaatggcccgaccccgtttgcgatttgtgcataatttttaatcccccggaatggccagcggtggcccgtttgctttggccagtctggggaatactaagtttcaacacgctgctttttgctacctgggagtttgaaatgaaaaagaaggaaacgaatcgaactaggggtatatggtttatggtcttgccgcattctaaaatattgcaatgataacaattttctgccagacgacttactttccacttacctaatagcaaactttgagtactgtacaaacaagaaatcccatcttgcatgctccccccatgtttcaagctctgataactgataacagaattccagctaccttatgcatgcactaatgcctcattaattcaatgagggtcagttttcattacaatactcgcaggaaatcattacaacatcctagcttgccatccatccaagcccacattccaagcgaactcgaaaggtatccgctgattaatgacgggactggagcaatagatgagtcagatttcgtgtacaagacggacaccgggaatgcggacttacctcttctgcaggaatttgcgcttgaactcgtgcagcattccaccgccacccgtgccaccatcgtagtcgttgcccagtcggatcttttggtgctgttgctgaaggaggtggcgattggccacaccgaagtccatctgcacatcgacgataagcagaagggtgagcaggacgagggtggcacccagactgatgaccagtcgctcctttaatttcatagtacgcaggacggccatgatgggattggtgttgcaactgttgttgcttgcagcagaaatggctttttgctggccgccttttggtggtgcggcggtctcctggtgttttctattgatcgatccaaagctgcgcagtctggtcagccagccaagattgcggccgttgatctcggcaggagttgagctatcgttggaggattttggaacaacctctgcagtttgagtctgtggatcttgtgaagcggtgcgactggtgcgcactatgcggcgcctgatcacaacacggcgtcgtggcgctgcctcctcttcctccggttccgagtctggatatagcactcgatccggcggcagctcctcctgctccgctgagtactcagcctcaactggagctctcccgccaatgggcccttcgacgttccccctccgccaattggctacgcctattcgttcagctgataactggccgttaaaggggctatcgtaaacgtcgatatcagcagtcgattgttgttgctgctgctgttgctgttgctgttgctgttgctgatgcggctcttgctgcaactgcaattgctggcgatatcgaaagcgctgaaggcgctgtgccaacggcgtcgattgagctgccgctgcgaccgccggtcgatagctgcaaaaaaaaaagcgggaaatttcattaaaaaccaatgcgaattcaagggtgccggctggtgcgatgtgtagttctggtgataggcaatcaaatttctattaagttttcatgacttgaagggtcgaaaagggaatacaaagaagtcacaagtgaaatgccagcaaatcctatccgccaatagcactaaagcaaaggagatacgttttattttgggaacaactttttatgaaaaataagcatataaataaatgctttatatatgcatccaataaaaacattacagtcacaggagagtaacaaaataacaaaggttataaaatatttattttgctaataaaacaaatttatttggtgtaaatgtaaaatgtagtggaataaccttcttaaagtttcgaccattttctaaaaatcaacagtgtgcactagattgtgatagccacaataaaaaatttaccaacatctgcaaaaatgacgctaaataaaagatcaattatcaacgaataatatattattttcgctttgccaatttgaaatgatatcacgaattgatttttcattaaaaccatttatttctttaatttcaatgactaaatttgcatttttcaaggtccccatcgtattgatattgtttattttggtgataagctctgtatttattttcaattggctaattcataacacccactccacatatcagttggtctatccctaaccatatcaagcttcaaaaatatgaccctatggccattttgcagttcgtattttgtgtctggttattcataaagcggcgtcacggcatccgccatgttgactgccaccggaaatgcgacagcagccattttttttttttcgccggccaccgttatcgctgctctagcgtgttgttgctattgccagtgctttttgtcggtgccatcaagttgctgtagtttttgtagttccattttattgtctccatttttattgttcatgtttttgctggcccgtgtagcatgaagcatattttgcaggcagccagctcgtggcgggtttcagtcggaatttgaattgtaactacaacaggaagagttggtcggtgccaggatctggatctggaatagaacctgcaaagtggccgttgtctgtttggccgtcgggtggtggtaagctaacgaagcttgttgctgccttgttttctgcccacatgcaaagtcaacacggccctggtcgttcgacaaccgaaaattgtgggcaaaatgttgaattgcccggggcaacaaatgccgtaactgcattaaatgtgaccaaaatattccagtcctccacatccactcgaaaaaaaatagggcttaagtggaaagtaaaccaagaaattgtcaaggtatcaaacagaattttccttcgcctataaaagctaattttaaaacatcataaaagtttacaattggtctgtacacatttgtgtttaaaatactttaattttcgtaaagtgtatgcttgttgctgaaagcaaaatattggctacatttggtttaatttcagtttcaatattttcttgagtgcattactgtatggcctgcaaattgaatgcgaaaccctttgattgacaggcctaccgatttgttgctgacgtaactcggctcacaaattaaacgtcaaaatcgttggcaaaaatgctgattacaagcaggtctgatagaaataaaatgacagaggcggcactaaattggcaaacaaagaacggccgaaaatggctgcgaagaagcagcagcaggatcgcagtgccatgtcaatcaaatcacatatcatgccaattttctatgcaggctcgcccccaaagagctctgtacagcagtatgagatcctggcaattgctcatatccatgacgagatgatttgacagttgcagagtgggcgtggccaaggggttaaggccagacaagagcggaagggtttttaggggtcatggattggtgggtttaggtacatgaagtacgtgtacaaggaactcagctgaagagacttggcctggcaacacaatggcacatctctcgccgtcaccagcgcgttggcaacatcaatgggcagtcaaatgcaaagcacatacgtaatcccaggaaaagtgggtgggtgctgacggtggactgatgggctggagggctagaggactggaggactggagaagcgtcatccacacgagttttccctatcagccagccggtgagggcgataagcgctgtggcagtgacatgccaagtgcgagtgtgagttcgagttcgagtgcgagtggagcgaacacagttaacagcaattgctgtcgtcgcattttgttgtcgcttgataaaactgctgcgttgcattaaattaaactcatgcggtgtatttaaatgccgcatcgtcgagggtcgaggctctggagtcaactaagagtcgagtaaaaatagcaacagcaaaagcaacaccaatcgttttaatgcaattgctgacagcagcaacaacatcgccagtgagtgacagcaatttcctttccaatttgcgctttgtttttattaatcagacatatagccgcgcaagtaaaaaaaaaatgcaaaaaagaaaatagttaagaaagcgaaatgaggcgagatgtacttaaatgagctgggggcaataaagtgcaaaacaatttagagcacaatatcgcgttgtgttgagagagggatatgttaatattccgcaaaattaatcatttcactaccaaaggaggggctcataagaaaatatcgtgaaaagttgctatggccttcctaatcgatctatccaatcaatttcaattataagcttttccaatatgaagtaacatattgtgaacaatacaaagagtacaaaacactccgacaatcgaccccaaaaatcaatcttaaaccgaattggagcactctgagttaaactgggttatcgtatcgcaatgcaataaatcaaactccctttcaatcaaacttgacaaatgcctttccgctacctttctccagctcaattagccttcgccggtcaacgaactgcattccgtggactcttgctctgtacttgatattatatagtagtcgtgccgcacttgaatcgcagctgcgagacccccactttatccagtttcccccccccccccccatttgctctgcatgattgcactgcagtggaggggatacccttgtaattttgttgttaacaaatgcaatgcgtaacccgcttgaaactcagctcgattcgaatcaaatcagcgattgtgcaacagcttgaagtgacacgctcagtgcatccacatccacatccacatctatatctatatccaccctgttgccccgcgtgacttggccacgcatcgatggcagtcgagaattccactgtccgggatacgaatccgaatccgaatccgattccgttggcgatagcgatggcggtgccgatgccacaaaagacccgacttattgatcgatttgttgccacactatttgagcggtttgcacttgagctgcttacaactactgttgccattacggagccgccaccttatcgacccaatcgaacggccaatcaatcgcgatgccattcgatatgcaaatatgccacaaaagacccgacttattgatcgatttgttgccacactatttgagcggtttgcacttgagctgcttacaactactgttgccattacggagccgccaccttatcgacccaatcgaacggccaatcaatcgcgatgccattcgatatgcaaatggtggccaaactgttacagccatcgttttgccaattcgatcgagtcgagtggaggagtgtcaaggttagtttggcttacacgtttggctcatttacatggctcccttcttctccgtatgaccattgaagcatccgctaaacttcagcaaattgcggcgggtgcaagggtttggaaaatggaaaatagaaaagctaaacgcagtttgggttagttgcctttctggctatttcttcacctctctgttctctatcacattccctgtgctttgggccctttgtcaatttacctttggctctgcaaactttcgcgctgctccgtctgaaagtccaaatcccactggtcgtctcgggaaaatccttcttcttgcaccaggtgattcaatggcagcgatttctcagcagatttgccccaggtcatttcattaccaaagtcaacagaagtgtcctgctgctggtgctgctgccactgctcctgctgcagcttctcgttgctgttaataaaattttccagctggctcgtcgacttccagtttttgtgctccgatggagtccggctcattgccaattcaaatgcactctgatggcagccattgtgcgatgtcctgggaattaccaatgccgttgcccttgtagaagccggtgcatagggacttgagcccagcacgttatggtcctggccattgtattgtctcactgccgattgattcgcagtcattggcaattgatttatgcccagagcgtaatcatcgaagctcttggagttgggcaggcccatctggctgcccatcttgctcccaagccccattcccataccattaccaatcccgtcatcctggctgctggccctctggagcgaaaagctgctctggctgcggctcctctgacgagcttccttttttttggccaactcagccgacgagggggcgaagaggttccggatgctggcattccgttgccttaagtccacttcgctgccgcctgacttaacctggtttgatggagagacgcgtaattgtaaatggaaagctcttgcccaatttcgtgttcatgctcaagcaaggggcaatctttcggggttagtagaatcgaacggggggtaacgggcagatcaattgttatctcacggatagtgccaaaccaacaataatttaagccatcaacggaacacaactcaacgcaattcaactcaatggaactcaagtaaaaaccaaactcgtagtaaaaactcccgggcagagaggacaatgcccggtcaactcggcgccctttcataatcggatgaaaacatttgtggagtgctacttacactcgtcctcgaggcaagtgacattgaatgaggcgaactcaaggaggccaactaggagacttttcctcttccagccgaggttcaggtcatcaagtggatgtggaacacagaacctagcagagtttgctctgccgctttttctcgcttatccttacggcgagtgtatctcaaagctggatgaatctattcggtgaagtgtgtgtgtgtgtgtggaaagtgcaggatccacagatagccagaataagagtgagagagggagcatcaaaatttcaaaatcgttagacagattagcataagcggataattccagaaaaacacagcaatggcaacgacaacaacagaagcaaagaggcagaaaaaatcgttttggaatccaaagagaaacgtacagcatgtgtgaagcgtttaagtgctgatgtcggtctatgctggcgggggagggagcaggttgcagcttttgggtttaggaaaactctgggtgggaaaactcaggccaaaaacgaaagctcttctccggcacttcttccagctgagtggagactgcaaaaaaaaaaaaaaggaaatgcaaaggaaaatccggcaatatcttgaagcacagatatttcgtgtttaccaaataccaacagcagtcacaaatggaaatgcgtggaaatatagctttcaaacaattttcgactatgttggctgcatattttcctatttacgctcggcaaaagacaagcagggcggatcagcaatgacactgaaagtagatctcggaaaatgtgcgcgcgtttatgtggcaaataaataataaatagaaagagctatatttttacccgccgcaaatatttgccatactttactttttgcggaaaagccatttctaagaagtatgattttcttttgattctttatttaaattaaagcttgttcgaaaccgtactcaaatgtgtgtgtttaaaaagcaatttttaatcaactcatccttttttgtcttgctgcatctaatgcccatatgtggcataccgagagcagatttaataatgaatgctggcaaaaatgcattttagattctgtgccaggctggccatggggagttttttagccctgggaaaaaacgattttccccagcttgctttcccgcatcgtgtctctttttactcgctccttggcattgacatttttcagctgtaagacaggaatactttcaattttttctccttgcagctcttgtgtgtggtttttcagccaaaataatcaaacgtggtttgggactcacaaacacacatggacacacacacacgcacagagtgcacacgaagatggcgaaaggagaagattcctatccgatgcagcgttacatctgttttgtttgtcctgggaaggaaaaaggacgaaagccgggtagtggggaagcccacaaaaaattgcatgtcaagtgaaattacttgtttgccaaagagaaacgggttaggaatagagaagggatgcgaaggatacggcttggaatgacaactgcagctcacgtatactcacgcacttgcaaacagaacaacacactggcacacgcatacactcggactcacatttcacatgtgcgcaccaaccataccctgggcgtcctgcaagtcctgagagtcctggctgagactttgatatatacgcaggcgacacttcgatctgccggaatatgcggctaagcacgataaattgagatgaatgtctggcatgcagctaagtctctacagctatctgtctatatatctatctatctatctattcgtctatatatccgtccgggcagctcaatgcgagtcatcttatgctctccgcacttgacacattccgggtaaagtgcatttgcctgttggctgtctatctttctctcgctcctggccaaggattttttaaataccctttatccgcagataacaagggtatttaagcgtttagataatattttatagaatagactatttgttttgaaccataatacgcctatgtagcttaatcttaatttgtatttgttttaatcgaatgaaagtaaaaaaaaaaaacggtctaaaaaatcgtctgcttacagggtatcgtcggtcttaataggttcttatttcgactttaactgactgacgtctagacgcatcgctccgcaagtgagggaggcggctataaatattcgaaaatgtattccactacatatgggccataaaaatgcactcccgacatttttaacttttatttccactcgcaatcccatcgagaactcgtcttcgactctcggcgtggagccattaaaatgcgacacgcattgggcctgctgtatggcagtagtgcattgcgttgcattgcattgcataatttaaggcgttcgggagtgagccggaaagttggcataaaatattcatttaaaatgcagcacgcaacactttggtatgacgcattgctattgcaattgccaccataccaccataccaccctcccgccagaccgtcaatccaccaacccgccacctaccgcccacgtatttaattgcgggcgttgcaaatgcaaatgtcacagacccggcgacatttgcatgccgatgacagggctccactggacatccaaaagggccatttgaatggtgaccataccgtggagaaggcaaatcctaatctcacactgcgatctgctggtaggacaaagtgacaaaatgactgcttgactgactgacagacctgacacgtgcccgtgtgtttgagaggcgtaacaattccaactggcaaacaatgaactaataacaagaacttacccaattcaaacgaaccgccgatggagtcctggcacattcatcaactgtaaaacaaggaagaagcattctgattagcattcggaattgataaacgagcatttataatgggccaacatcaaatagcagatggaaatagaatcgaatcgaatcactttgcataatcaatgctcgagagcagtaaatgaaatgttaacctaagacaaccgaagacaacaagccattaggcttgaattagattgaaagacaacagtgagcagtggagcgaattccaattaaatggccttcctggatatgtgaaatcaaagtccttgtggatcattagttgagccaggcttgcagctttgtattgattgttttatctgatgccatgacgtggcatgccccaaaggcccctgataatgtaatgcacaacggttgtaggcgaaacaaaagcatttggtgatggatgcgatacgatgacgttgcatctgacggcacaataataagtcacacattaacacacaacgcgctttaagaggaaaaccaagtaaaccattccattccattcctcgcagacatcgattgcaattcgatccattaaaatcatacgcaattatccaattcactcgactgttgcatcgtcgtcgtcgtcatgattgccttggctatcatccccagcattacatgtatttctttcatggctacactcaagacgaatatatcatcgtctttcacaaagtataaaaaaagaataatggctaagcataccaaatcagagatcttgaatgcattgcctaagacatggacacctcgttcaatgaaatgcattagacattaaccgataatcactttttaccagataaaaatcaccatgtaatataaacttttatttcccaaactctttttcgagtgcatcaaaactcagcagaaaaaaaaatgacggctcagagggctaggctatccagccagccatttagttggccaggccgaaactcacgttttccagagattatgaggcccaggccgcagtctctcgagagccgcacgttttgcaatgg

SEQ ID NO: 32729 - DNA, 853 bp, DROSOPHILA
atgtgccaggactccatcggcggttcgtttgaattggctatcgaccggcggtcgcagcggcagctcaatcgacgccgttggcacagcgccttcagcgctttcgatatcgccagcaattgcagttgcagcaagagccgcatcagcaacagcaacagcaacagcaacagcagcagcaacaacaatcgactgctgatatcgacccaattggcggagggggaacgtcgaagggcccattggcgggagagctccagttgaggctgagtactcagcggagcaggaggagctgccgccggatcgagtgctatatccagactcggaaccggaggaagaggaggcagcgccacgacgccgtgttgtgatcaggcgccgcatagtgcgcaccagtcgcaccgcttcacaagatccacagactcaaactgcagaggttgttccaaaatcctccaacgatagctcaactcctgccgagatcaacggccgcaatcttggctggctgaccagactgcgcagctttggatcgatcaatagaaaacaccaggagaccgccgcaccaccaaaaggcggccagcaaaaagccatttctgctgcaagcaacaacagttgcaacaccaatcccatcatggccgtcctgcgtactatgaaattaaaggagcgactggtcatcagtctgggtgccaccctcgtcctgctcacccttctgcttatcgtcgatgtgcagatggacttcggtgtggccaatcgccacctccttcagcaacagcaccaaaagatccgactgggcaacgactacgatggtggcacgggtggcggtggaatgctgcacgagttcaagcgcaaattcctgcagaagaggtaa

SEQ ID NO: 32730 - protein, 84 aa, DROSOPHILA
MCQDSIGGSFELAIDRRSQRQLNRRRWHSAFSAFDIASNCSCSKSRISNSNSNSNSSSNNNRLLISTQLAEGERRRAHWRESSS

SEQ ID NO: 32731 - DNA, 2502 bp, DROSOPHILA
tgggcaactattggagcaaatgaaattactcatacgctacatattcaattttgataaaaactagcaaaacgattcgccaaacgcattgtaaaagcaaaggaaaatcgctgaaaaggaccggtcggaagatggagaaaactaagctgattaccgaaagagaaaatcaaatgaaaacttgtcgaaataaatttcattgctgtctcaagtgtgcgggtggaaaaccgagttgggaaacggaagagatgccaccaacggtgacgcagataaccgatggatgggtgggtggtggtgcaaatccacattgatttctttattgcacttttatttgattgtgctcgcatgaaattacgcatacgccatgttgagacaaggcaaactctcatcaacgttatcggtggtcggaatcgggaaggagcagtggaacagttgccatcggcaacaacaatcaggcaacacttaccagcgacagatagagacatgcccgtaaagatgtgggcacagagaactttctggggggcatacactcagcgaaacatatatatagagttggaaaacaaatcctaaatgcaatgcactatagtcttgtaataacattctatctagttcgttgcgaagattgtatccataaaattggtaccattctatacttcgaaaacaaggttatctcattttcttaggcatagttaagtttttctcaagtgtacaggctaaatgtctaaaacgtaaatgtgtcacgtaaatggagcgtaaatttcaataaaaatcatttcaattccgttgaagcccgaaaagtgccgtaactgcttgccgcaaccctacgctccttttactatccattttccatcctagagccgtaaaactcccccaccttcactatcaattaccacgtagccggataaagtggcttgggggcccgaagtaaaaaaaaaaaaaatgtaagcattatgtccttccgctcaagggaaattgaattttttcgctactggtttttatgtgccactcacctggccttgcggtgcagcatctcggccagcgtgggattgtccctgctcacatccggcgcattgtccacaatcacatgcgagtactcatcgctaagcaggtgcttttgcagatccgcatagcgatcgtgtggtgtgggcttcctcgtggatgtgctccttgatgtgccgggtccggctgctccgcccgaagctccggcagccgcatcctgaccactggtcgccccgccactctggctcgcccccgcctgcgtggatgcctccttggagcccgaggcgttgctggaataaaagcaaaatgaaagcgagagtacctctgttaaaaaggagctgcataaaagtgagttaaatgtacaagaaaaacaaaaacaaaaataacagggcaaaaaattgccataatttgcggagacccaaaagccgggtgctcttgacaatggtccgggtggctctcgttgctaattgcaactgccaagtgccccactgccttttagtggcagccatcgagctacactgaactgaagcagcctagacagctaagtgccccctggccaggctcccaaagacacgcacttgctgccggtaagctggaaactttgtcagccaggattttagttgcgtttacctaagacgaacacacccacatccacatccacatccacatccacatccagatccccatccacacccacaagcttagacacacatgggactcttcactcgactgcaataaactgaaattgcaggcacttcaagggggcgaaaccgcaacccatacaagttggaacagtggcgacacctaggggacatgcctctaatatcaggtaaatacagcaaactttggcgaacattatttgcagaagtttctttagacaatctgaacaaagacggggagacaaatttctttacaatttataagtttgctttctctgacatataaattgcattttagtccattcaaatgcggtttagatgacagaaattcgtattcatttagtattcacatttctctcaaagtttgcacaccattttgccagcctattccactgtgcttgtgctggtaatcagcagccgtttagacagcgcctgcttcagacaaaaagagtgcttgaaaaatgaattaaagtttttgaatttgttgcatccattttcctagccttgactcttaatagctctcggcgaaatgcttgagatctaacctggcctggccgggtgccccgtttccggcccattttccatctccacctcgttagcatatgtatgtaccgggaaaccgagaattatgcaccagttgtgtgaccattaagccaaatgacagcactcgtgtgcacaggctgtggggagtgcacatcattaggccagaattttgaaatttgagttttacgtaaattgtcgttttctgaaaatacttatatatatttttttaattgtgcaagtatcccaagtttttggggcgaaagtcttttgtctgtcggtctgtctgtcggcgccttgccttatccgt

SEQ ID NO: 32732 - DNA, 303 bp, DROSOPHILA
atggctgccactaaaaggcacaacgcctcgggctccaaggaggcatccacgcaggcgggggcgagccagagtggcggggcgaccagtggtcaggatgcggctgccggagcttcgggcggagcagccggacccggcacatcaaggagcacatccacgaggaagcccacaccacacgatcgctatgcggatctgcaaaagcacctgcttagcgatgagtactcgcatgtgattgtggacaatgcgccggatgtgagcagggacaatcccacgctggccgagatgctgcaccgcaaggccaggtga

SEQ ID NO: 32733 - protein, 100 aa, DROSOPHILA
MAATKRHNASGSKEASTQAGASQSGGATSGQDAAAGASGGAAGPGTSRSTSTRKPTPHDRYADLQKHLLSDEYSHVIVDNAPDVSRDNPTLAEMLHRKAR

SEQ ID NO: 32734 - DNA, 2942 bp, DROSOPHILA
gctagccaaatggagccattgccggtctgtcaattagcaaccaggcgacatggcggtgcactgaacttgttacgcttaaattgttgataagcccacaacactcattatgattgccactggccagcgaaaatgtggcaatcgcaccgttttggccattaacccatttttcggtccggttctaaagttattccgtatgacttaattcaggttttagtttctacatgctataggtattataccttatattagttgcgtagtcatgcctttaatagaattatctggcaataatcaattattaattaatagctaaatttactcgctgagcattttaattcaattagttcaattgctggcattatttaattagtaccaccatttgataactcgctgcacttgactttgcatgctattaagttattttatttacgctgcaaacgataagtaaatttattaagtaattttcagttctgctgtttaacttgttttaaccagcattcatttattttaggtatttgtttcgcttgaagagaaataatacctatttgcattcgctctggacaaagctcttaaatcttaaaaacatactattaacatataaatatgtacatacatatatgcaaacattttaataaacattattagctcctgccttatctgaagtccaagagttcaatgggttaagccgcagccgtatgccagttctctctgattagagaccagagattagagatatatggccagttgatgctacgatatttgcgcagagcaattgttcgttcgatggcgggagaaatgggagagaaagaacaaatatataatatatatatatatatacatacacgtatatatatatatatataggaggcgagcgtgtatttgtgtgaatgtcacagatgtgcgtgattgtttccatggagcggcgcaagtgaaatgggcaagttgaaaagagcagttgtgtttggtttgtgaggctgccaagagcgaaaaacgaacgcggacaatgaataaaatatttgggctactgtttaccctgtgtctgctgctcgtttggcccacgcccggaaatggccagtccccggatgagtcccggctcctggtggccattcactacgaggccctgtgcccggacagcatgagcttcatccggcgcagattgtacgatgctctgcaggacaacgactggtggtcggtcaccgatctaaagctatatccatttggcaaggcgggggtgagtcagctaagatcaaaatgatagaattcttatgcatactatagtcatttctttagtactcatttcgaattcattagcagttcatttcgaaaaccatttgtatttacattaaaaaaaaaacagcaataaactgaaatacacacacacaatttgtttgtagatcgtgaaatagttcatgttttttgaggttttaaaccagaatttgttacgtgcagttctacaacaacacatccactggcgagagccaagtattttgtcagcatggcgtggatgagtgcgaactaaatgcactccatgcctgcattattgagaccctggacattcggaaggccttcaatctgatctactgcatgctgcgctcctattcgaatgagctgggcccgtgctcgaggagcatgggtgtggacgtcagcaaggccagggagtgtaaggcatcccgaaccacggcagaaatactggcgccctacggcaaggaaacccttaaactgggcatctcctttgtgcccaccattgtgttcgagaatgtgagtaaccaacccaaccaggcttacatgatcaaataccagacttaacttaacattaccctctgatccgcaggactttgatccttacgaccagagaagcattcgcaacaacttcgaaagacacttctgtcggcagtatctgaaaaagttcaacatcaaactgcccacttgttccgcaattttgtaaacttttatgtaatgtactgagtaatttaactgtttcaatgttccaagaccaataaacaataattataaccaactggagtgtttgcttactcgctgactcacttggggccaataaaaatttacatgtgtatagtatatacatatcagcttatcagtcatgtttttgtatacagattctaatcagaaacagctgtctggtggtctaaaaataagattaaaaccccgctgctcagtaagttttccgtagtcagcgcataaatgtaaaggggaaaatgctggttgacagcaggggcgtcgaattggttggctagtcacaccctttatctatatatttatattaattttttcaaaagcggatatattacagaaaaattataaaaaacaagcgaaaagtcaccctactattgcaatacaaataattattttttttttaacttatatgatttttgagccccccttgagcattttctaaccacgccactggccgcttcgaatttgacgaaacgcagtgacaacgctgcgcattacaagtcccggaattatttcagtgtcgagcgttcgctggcgttgagcggccgaatatttcaagatcagctcgggattaaactgaatttgccatgagggcggctgtctttgtgtgtctgctgctgggatgggtgggcgtggccacgccaagggtaagtgacccagttgatcggactgaatcccgaattgcgacgctcccattgatcgtgactttgcagcgtttgcgcggaccgcaagctgaccgactggcgatcaccctgtactacgaagcattgtgtccctactgcatggagttcgtgaccacgcagctcaatccctcgatggtccgtcaggatcgacttccattcactgatcttacgctggttccttatggaaatgccagggtaggtttcatttttcgtagcttaaactagtagttatagtacaagtacatagtatagctcaatttgaagttttagagtgtcaatcagcgttaa

SEQ ID NO: 32735 - DNA, 651 bp, DROSOPHILA
atgaataaaatatttgggctactgtttaccctgtgtctgctgctcgtttggcccacgcccggaaatggccagtccccggatgagtcccggctcctggtggccattcactacgaggccctgtgcccggacagcatgagcttcatccggcgcagattgtacgatgctctgcaggacaacgactggtggtcggtcaccgatctaaagctatatccatttggcaaggcggggttctacaacaacacatccactggcgagagccaagtattttgtcagcatggcgtggatgagtgcgaactaaatgcactccatgcctgcattattgagaccctggacattcggaaggccttcaatctgatctactgcatgctgcgctcctattcgaatgagctgggcccgtgctcgaggagcatgggtgtggacgtcagcaaggccagggagtgtaaggcatcccgaaccacggcagaaatactggcgccctacggcaaggaaacccttaaactgggcatctcctttgtgcccaccattgtgttcgagaatgactttgatccttacgaccagagaagcattcgcaacaacttcgaaagacacttctgtcggcagtatctgaaaaagttcaacatcaaactgcccacttgttccgcaattttgtaa

SEQ ID NO: 32736 - protein, 216 aa, DROSOPHILA
MNKIFGLLFTLCLLLVWPTPGNGQSPDESRLLVAIHYEALCPDSMSFIRRRLYDALQDNDWWSVTDLKLYPFGKAGFYNNTSTGESQVFCQHGVDECELNALHACIIETLDIRKAFNLIYCMLRSYSNELGPCSRSMGVDVSKARECKASRTTAEILAPYGKETLKLGISFVPTIVFENDFDPYDQRSIRNNFERHFCRQYLKKFNIKLPTCSAIL

SEQ ID NO: 32737 - DNA, 2657 bp, DROSOPHILA
tctagcatgcttgttgtgtcagcagggaaccggaatcgcaatcggacctcacacttttaatttatgcccttaaagtttaaagcgaggcacaatgccggagcgttcgggaaaaggcaaccaatcgcctaacaaatggcaacaatttcgctggcaaagtgctaaccaattccccccgcccagaagccccgaggacagaccgaattcgaattcccattccgattaccctcgcagaacccaatttcgaagcaaatcgaaaaaaagcagcagggaaaagttcaagttatttatttgagcgtttcacattttttatcaggtctgcacatttttcttatttatggcaaatgattttatttcttttcaagccaagtttaagtgcagcccccattcccatttgttcgacaccacgaccaccccaacctccagcacctaccaatccacttccgcccctcatggaggcagtgcactctgctgacagcagcaaacacagaaagggaggaattatcaagctcttgtaattgtaaccttcattggacttggaagtcggactcggagacggcggcgtagacgaagacggaggctgctactccaactccgaatccggtttggaacacaaaggcgtcccctcaagcattcgccagacatgttccagacacgcccattgcgggtcccgtttccgtttcgttgctcatacgccgcgtgtgtcaacctctagtacttgacggcaggaaactcccgattcagacttttaattccgctcgtacacggcaagcaaacgggaattagctccaaaaataaaaataaaatactggctaggaacttttgcaaggcttgcagtttttatatatgttgcctagcatatacatattaaattaagcaatgcatttcactatcgccttgtcatttactagttgtctgtatttcaataagaatttgccagtcacttgcaattttggaaatttatcaagacagctatcatttttccattgatatcaattattaaatggcatttaactgcaacgtcatttgagtctgattctctaaattttggatattatattagaacagactatcaaaggattagaaagttaagacagacaaaaacagacgcaatagcagaataaatataattcaaacggactttaattaactctacgagttgactcaaaagagaaacaaacatttttcttaataaagccttttcctcagtgcagcatttaagcttcccgtccaacttttttcagatccttgacgagcactacctgcacaaatacaacgacatcgtgcacaaacacgggctaatcacctcgacattgggcctgcagctgccgctggagccgcgccacttccacgagggcgacatgcgcgtcaagtgcctggctagcatatcgccggtgctgtggaagggcggcaaggagagtgtcctgcagcgacggccggggatcatcgacaaccgcgaggccatgctgctgggtgagtgacctggcacggagccattcccgactccttactaattcgattcgctgtcctttggccccatttcttccacacagtgaaaggtgcggctggccactcggagagcagttttctgcgaacgctaaccatcgccatcatcctggccagaactgggcagtggctacttggcgcggagctgacctaagccggaccaccaagatggcagatggcaccccattcgactcgattcaattaacaaagcattcatttcaattcaattcaattcaattgcaattgcagagcataaatggtgattttgtatactttaagtgtaatatccttagttcttaagcgacgagggggcgacgagaagggaaaagaaaaacagacaaattgggtaaatgtgttatagcatgtaaaaatcattaagcaacgcgagtggaaacgagttaaatagtattaaaaacagatcccattcggaacgaaaaagtaaactcatgcgcagagagatgcacagaattcaattagcaaaattgttaagtaactaaattcgaatcccatatatatatatgacatatccccgcccatcgttcccgaataaagcccagctaagggttcgttgtgcgtaatttctgtgtaaatacttgaatggaacgacaaagtctagggcaaactttggacttttgtcaaataatgtctgagtggcatcaatttcgaatggtagctggaaactttcccataacagatgctaaaactacataattgcaaaaaacaaaaagaaaaaacaaatggggaaaagtaagctggaaaagtgctcttttcccctcttttagttacgattctggcaagtatttgcttcctgactctgaaaagtatttccaattgtatttagtttcgtaaattaagtccgtaagggagaagggaacttgaaattaaattatattgttgatggatccattaccgatggctctaaagttgagaagctttgagttgccgcacatcctagttgtatgaactgtataaaagagaaccgggatatgtgtcatatccttattgttaagaacctttgctaaactagaactataagttaggtgtttaagttgtagccgaactgtcccccagaaaatattccccacatcctgtatgtagctatacctaaaggataaagtctcccaaaagatataactacaatactatatacgatg

SEQ ID NO: 32738 - DNA, 354 bp, DROSOPHILA
atggcatttaactgcaacatccttgacgagcactacctgcacaaatacaacgacatcgtgcacaaacacgggctaatcacctcgacattgggcctgcagctgccgctggagccgcgccacttccacgagggcgacatgcgcgtcaagtgcctggctagcatatcgccggtgctgtggaagggcggcaaggagagtgtcctgcagcgacggccggggatcatcgacaaccgcgaggccatgctgctggtgaaaggtgcggctggccactcggagagcagttttctgcgaacgctaaccatcgccatcatcctggccagaactgggcagtggctacttggcgcggagctgacctaa

SEQ ID NO: 32739 - protein, 117 aa, DROSOPHILA
MAFNCNILDEHYLHKYNDIVHKHGLITSTLGLQLPLEPRHFHEGDMRVKCLASISPVLWKGGKESVLQRRPGIIDNREAMLLVKGAAGHSESSFLRTLTIAIILARTGQWLLGAELT

SEQ ID NO: 32740 - DNA, 3446 bp, DROSOPHILA
gcgagggtgttgtcagctgccaagaaggatcaggcttaagtcagtcccggccataaaacctcatggttggccaaagagacgccgcctgaactttgaatggcaggcgaaacaagtcgggagcccgatggtcagcaccgaatttttgagaccctttcctcgaatgggaaattattccaatcaattgactcagtttagatttgttaagtttgtactattattaaaatactctgtatcacttcttatttacattttaagcaccaatgttaaattgcattttaagctgtgccctttaataaaaccaaaactccctttgaacgtacaactaccatgtgaagccaaaaaatatttcggcttaaaaattctacagctgcagctggccctctgggttcggcctgtcgtattttctctctggctttttgttttgtttcgctgcattttgttttgttttcgactgcgttgcggttgccttgcccacaagttgaaaggtcaggaatttatggattttacatggctgcagagacatttccagatacgagtaatcgtaactttaacaaactgggagcttgccttgaactcatactcctccatagcgaagtcactttgattatctctggacaaactcttaatttccatatggtagttgtccccggataattacgtgcgataagcatttgatttccaaagcaaacattgtatcaaagtacaattgcttccagttgccagtctagtctttgtcagtcagtcctcgtcggtttcggtataagtcatgttgtccaacatcagttttagttctgctcctgagctggtcgatttatacggtttggttttgaagtttttggtgtcctcagaaaccacattgttttactttaaccccactggacagaagtgcagctgggaaacacttccgaggactattctatccaaccatccacagatcatctggtttcgcgaagaaacttatccaggattgtacaagcggcacagcagtaacctgtttgtaatggcctgtctatcttcgacgtcttatgatggtcagctccaacttttggccgagagtttgaccaggtaccgatcagtaagggtacttatcgaggtgcaggataaagaaggctcctttttggcctctcaaatccttttgctttgccaacaacacagcatgctgaatgtggtactgtacttttcacgttggacacgcactctgaatgtcttcagttacttggcctttccatattttaaactcttgaagcagcgtttatcaggatcattacgacccaaaatttttatcaaccagcttaaggatctacaaggttataaaattagggttcaacccgatctgtcgccacccaattccttttcctatcgggatcgacatggtgaatgtcaagtaggtggatttttgtggagaattgtagagaacttttccaaaagcttgaagggcgatacccaggttctgtatccgacatgggcaaaagccaaggtatcagctgcggaatatatgatacagtttacgcggaatggaagttcagatatcggagtaactaccacgatgataacgtttaagcacgaggaaaggtatcgcgactatagttaccctatgtacgacatcagctggtgtaccatgttgccggtggagaagcctttaagtgtggaaatcttattttcgcatgtactaagtcctggatcagcacttcttctaatcttggcttttatactgttcttcttaatagttccccagctgattaaatgtttgggtattacttttcgtggaagattaattggaatggcttcaaggatctttgctttggtgatgctttgctccagttctgcccaactgctctctcttctaatgtcgccaccgcttcacacacgaatcaaaagctttgatgacctcttaacctctggcttaaagatcttcggaataaggagtgagttatattttctggatggtggttttcgggcaaagtacgcatcagcttttcacctaactgaaaaccccaatgagctttatgataaccgaaattactttaatacaagttgggcctataccatcacgtcagtgaagtggaatgtgatcgaggcccaacagcgacactttgcccatccagtattccgatactcgacggacttgtgtttcagctcggagacaccgtggggattgctgattgctccggagtccttctatcgggaaccgcttcagcatttcaccctgaaaattaaccaagctggattgattacccaatggatgacacaaagtttccatgaaatggtgagggcgggacgcatgaccatcaaggattacagccgaacaaatctaatgaaaccgctgcgcatccaggaccttcgcaagtgctgggtcatctttgcagtgggtctgggcacttcgactgtcgtattcaccatcgaattgcttcttatctacaccaacgtgtttctcaatagcttgtagtgtctggctttgtcattttcgcctgcaaataaaataaatgcaaattgctcaccaggaagacaccgcaaagacacgaccggagccacgaaataagactccaagtgcgaagcgagaaacaaggcaaccacaacagatccaccaaattatgtaaagccccaacaccaaagaagcagtctaaaaccaacaatttgtggcctactgacagagagggggtgtacactggaaataagcactttacaactaagtaaactttgtcatacaaaataaaatttaaaaaacgaatcatatttaatttattttattattatgcattttaacatactatttatttattataacatcacaaatttgtttaagcatatttgctgtttaaacttttcagtgcagctgtctgtttttcattttggtgggacaacgcagaatccgtctgagtcttagttgctggcccgttttgattaacataaagcgaataatagacatcgactgccaacaacgtgaacaaatttgatttcacgactttgcactatttacccaaagaagccaaaccaaaccaacaacacctgcaacattgccaacaacaagggacttttggtaatttttgacagccaaagatgcattttcggttcgtttcgtctgttgtcattgatgtgttgcaatatcgcacatctcaattacaaattatgtctaccaccatttgaatgacggcttcacagctttttgcggtgttacatttttgaagaaggctttgagattaccaagtagctcgctacaagtagacgcaacagcgatttatttacacatttagtattatgttttctttgattaacaactttactattacttattagcgaaggaagcagtggtaaggaaattgatttagttttccttcatttatgtctgtgttattcgtgccaatcagatttatttggaaataaaataattctgcctttaccttgggtccgtcttatgactcaccttgcagacctgctgacccaccatc

SEQ ID NO: 32741 - DNA, 885 bp, DROSOPHILA
atggcctgtctatcttcgacgtcttatgatggtcagctccaacttttggccgagagtttgaccaggtaccgatcagtaagggtacttatcgaggtgcaggataaagaaggctcctttttggcctctcaaatccttttgctttgccaacaacacagcatgctgaatgtgcttaaggatctacaaggttataaaattagggttcaacccgatctgtcgccacccaattccttttcctatcgggatcgacatggtgaatgtcaagtaggtggatttttgtggagaattgtagagaacttttccaaaagcttgaagggcgatacccaggttctgtatccgacatgggcaaaagccaaggtatcagctgcggaatatatgatacagtttacgcggaatggaagttcagatatcggagtaactaccacgatgataacgtttaagcacgaggaaaggtatcgcgactatagttaccctatttgggcctataccatcacgtcagtgaagtggaatgtgatcgaggcccaacagcgacactttgcccatccagtattccgatactcgacggacttgtgtttcagctcggagacaccgtggggattgctgattgctccggagtccttctatcgggaaccgcttcagcatttcaccctgaaaattaaccaagctggattgattacccaatggatgacacaaagtttccatgaaatggtgagggcgggacgcatgaccatcaaggattacagccgaacaaatctaatgaaaccgctgcgcatccaggaccttcgcaagtgctgggtcatctttgcagtgggtctgggcacttcgactgtcgtattcaccatcgaattgcttcttatctacaccaacgtgtttctcaatagcttgtag

SEQ ID NO: 32742 - protein, 294 aa, DROSOPHILA
MACLSSTSYDGQLQLLAESLTRYRSVRVLIEVQDKEGSFLASQILLLCQQHSMLNVLKDLQGYKIRVQPDLSPPNSFSYRDRHGECQVGGFLWRIVENFSKSLKGDTQVLYPTWAKAKVSAAEYMIQFTRNGSSDIGVTTTMITFKHEERYRDYSYPIWAYTITSVKWNVIEAQQRHFAHPVFRYSTDLCFSSETPWGLLIAPESFYREPLQHFTLKINQAGLITQWMTQSFHEMVRAGRMTIKDYSRTNLMKPLRIQDLRKCWVIFAVGLGTSTVVFTIELLLIYTNVFLNSL

SEQ ID NO: 32743 - DNA, 3098 bp, DROSOPHILA
tcatcgggcgcaaccaattcgttggacggaatggcagaatgtggttttactgcatggggttggacttctattttctgtggttgttttcgtcatcgagctcactgttcactatgcaaatgtttgcctaaacaacttgtaagcagagtaaataagtcccaggagtaaataaaaaagcattaaaggatattgcggggtgtattggttttacgagaaataaccttcttatagacaattgtattttatatagtttttaattggtatttttctttaatacaaacattacgtaaatttcgatatgggcagcattatgttattaatgggtgtcccagatctatggatttaactgtgttatttttactccaagggggaatgtgttccataaatagctttccaccgattaggcaaataagaccaattatattatataggaccatccgtggaatgaagtcagtattataagatgtctaccgccgttaatagtgttcactctaagctcgtgtcgctaataagccgtggtcaagagctgaccagcattttcttttatgctcctgcgaaagaaaaatgccaccttgaagatacaatctcatcggccacttggggattgcccttggtgatttggcgaacggatagaactgtgatcctaaatggattcatcggcgagggactcttggtactggcctgccttccaggatttcattggagagctctgctaggcagtttagcaagaagtttaaaataccttagacaggcgaggatactcattgaactaatgcaggacagagatgaatttctagtcagtgaagtgttgcagttttgtctcagtcaggatatgattaatgtcaatgctatttttgacgattttccggaaactgaaaatctttccagctttgaggcctatccaagtttcgaagtggtaaaccaaacattcacacctgacacacaagtatctgacttgtacccgaataagatgttaaaccttcgtggaggtgtaattcgaacaatgccagattactcggagccaaataccattctttaccaagacaaggagggcaacaaagagatactcggatatttgtgggacttattggaggcctatgctcacaaacacaatgcccaactgcaggtggtcaataagtatgcggatgataggcctctcaacttcatcgaactcctggacgcagcccaaagtggaattatagacgtgggcgcaagcatacagccaatgtcgatgggttccttaagtcgcatgcacgagatgtcctatccggttaatcaggccagttggtgcaccatgttgccggtggaaaggcagctccatgtgtccgagttgcttacgcgggtgataccatatcccactcttgccctactactactcctctggattttctacgaggtgcttcgtggacgttggcgtcgtcattcgaggctccaaagtattggctggctagtgctggccactttggtcagctcaaactacgtaggaaaactactcaatctatttactgacccaccatctctgccaccagtcaacagtctggcagctttgatggaatcgcctgtgcgcatcatctctataagatctgaatactcggccattgaatttacgcagcgcaccaaatactcggctgcattccatttggcattgcatgcatcgatactgataggattgcgaaatgcctttaatacatcctacggctatactatcactagcgaaaagtggaagatttacgaggagcaacagaagcgcagctcaaagccagtgtttcggtattccaaggacttgtgcttctatgaaatgataccatttggactggtcattccggagaactcgcctcatagagctccattgcatagttacaccctgcttctcagacaggctggtctgcatgatttctgggtgaatagaggcttttcgtatatggttaaggcgggtaagatcaactttacagccgtcggggagcggtatgaggcaaaaactctcactattacggatttgagaaatgtctttatcatttacgtttccgtattgctaattagcctgattctgtttacctgtgagctttttgtcagctgggtaaactactggctgggattttaattgttcacgcggcaattacggcgatggcgttcgataagcctgactgttccggaaagacctctacccacctccacccaactactcagtaaataatagagacaagacaggataaaaacaaatgcaaacttttgtgtgtttacttcgtgacggtgacaagggttcctggagtgcccgattcggcaaggagacagtagttaacaatgctgttgaatggtttcctaccgtcttacaccttcgagctgcgagggcaaatgaaataaatgcaaattgcctcctacgaagtcaccgcagcgacacgacgggcaccacgaaatgagaccccaatcgaggggaagatgaaccactgaaccaccgaaccaccgaaccagagaaccactaagccaccatcagacaaccgcagcagatccaccaaattatgtaaaaaccttggcagcaaacaccagcaaattgtggcctagtgccgaagttgtctgtttcttgcattttggtaggacaacgcaagatctgagttgccgagtctgagttgctggcccgttttgattaacataaagcgaataatagacatcgactggcagcaacgtgtacaaatttgatttcacgattttgcactatttagccaaagaagccaaaccaaaccaacacctgcagcattgccaacatcagcagcgttggcaacagcagggtttttttgggtaattttgacagctgaagatgcatttttgcttcgtttccacggctgtcaatgatgtgtcgcaacatgcatatctcaattttaaatgacgtctagttaggcaaatgaacccactcttttgggactacggattggcccagttacctttacttggcttaagaattttcttgcttcatggagcatcggtgtctagatgtggcttttttttttttttggattagacaattgctacgccaagggcaatttatgatacacaagatgtgccacgatttggttgacaaatttccccaaaacacgatgtctggaaaa

SEQ ID NO: 32744 - DNA, 1098 bp, DROSOPHILA
atgccagattactcggagccaaataccattctttaccaagacaaggagggcaacaaagagatactcggatatttgtgggacttattggaggcctatgctcacaaacacaatgcccaactgcaggtggtcaataagtatgcggatgataggcctctcaacttcatcgaactcctggacgcagcccaaagtggaattatagacgtgggcgcaagcatacagccaatgtcgatgggttccttaagtcgcatgcacgagatgtcctatccggttaatcaggccagttggtgcaccatgttgccggtggaaaggcagctccatgtgtccgagttgcttacgcgggtgataccatatcccactcttgccctactactactcctctggattttctacgaggtgcttcgtggacgttggcgtcgtcattcgaggctccaaagtattggctggctagtgctggccactttggtcagctcaaactacgtaggaaaactactcaatctatttactgacccaccatctctgccaccagtcaacagtctggcagctttgatggaatcgcctgtgcgcatcatctctataagatctgaatactcggccattgaatttacgcagcgcaccaaatactcggctgcattccatttggcattgcatgcatcgatactgataggattgcgaaatgcctttaatacatcctacggctatactatcactagcgaaaagtggaagatttacgaggagcaacagaagcgcagctcaaagccagtgtttcggtattccaaggacttgtgcttctatgaaatgataccatttggactggtcattccggagaactcgcctcatagagctccattgcatagttacaccctgcttctcagacaggctggtctgcatgatttctgggtgaatagaggcttttcgtatatggttaaggcgggtaagatcaactttacagccgtcggggagcggtatgaggcaaaaactctcactattacggatttgagaaatgtctttatcatttacgtttccgtattgctaattagcctgattctgtttacctgtgagctttttgtcagctgggtaaactactggctgggattttaa

SEQ ID NO: 32745 - protein, 365 aa, DROSOPHILA
MPDYSEPNTILYQDKEGNKEILGYLWDLLEAYAHKHNAQLQVVNKYADDRPLNFIELLDAAQSGIIDVGASIQPMSMGSLSRMHEMSYPVNQASWCTMLPVERQLHVSELLTRVIPYPTLALLLLLWIFYEVLRGRWRRHSRLQSIGWLVLATLVSSNYVGKLLNLFTDPPSLPPVNSLAALMESPVRIISIRSEYSAIEFTQRTKYSAAFHLALHASILIGLRNAFNTSYGYTITSEKWKIYEEQQKRSSKPVFRYSKDLCFYEMIPFGLVIPENSPHRAPLHSYTLLLRQAGLHDFWVNRGFSYMVKAGKINFTAVGERYEAKTLTITDLRNVFIIYVSVLLISLILFTCELFVSWVNYWLGF

SEQ ID NO: 32746 - DNA, 7713 bp, DROSOPHILA
ggccccaaagagtcggatgtacgatcacttgcattacggttccagttgtgaatttctgcagcacataaccgaatatgagttactttcctggggcagtgtctctgcctcaatccgaatggaacggggccgtgatctcggccagagcgcactaggaagttttcagttttttttggggctcagaaacaattaccaggttgccggtgtcaggagtaaggacactccgggcgatctgtgccgcagagtaggtcgactcacaatgcaaatgagttatcgcttttacgatgccaactaatcataaaaaaaaacttttcccttggctctatgatgtattcaactgaagttgttaaaataataacgatagcaagaaactttaagtttctctgcactagtagttattatatacagaataatacaaaaatgacaataaaacttccttcttgtagtaaatacacacacttacaagtagtcggcatgttttgcaagtgggttaagtgaagtttctgcattgcaaaagattactttataagaatgcgcttgggcacttatgaactttggggctctgactctgctcgctaaattgacatcgcatacgcaacccatgccagccaattaaagactctacgtgacctccaaaaaacaaaaataaaaaaacttaacataagcactgatgacaaaaaaaaaaaaaaaaaatgagaaaccaaccctgccatgttgagctttccacgctgccactctttttgtgcgagatacgcggaatgtgcagctaattgaccagccccagacgatgatgcacttcatcaaaacaaaacaaaaaaaaaaaaaaaataccaaaaaagcagaagcagcaaccagaaatgacaaaagccaaaaaaaggccgagtgagtgagacttactcaagtggcggggcattacgtcaacgtcaactccatttggcggacaacagcaggggacagagtctacgactgggaatcggagtattggagctgcgaggtggagcagatggaggatgaggagaatgaggacgatccggagggaattcaaccagatggggctgagtgcgggtcaagtgctgacgcatcagccaaatccagtgaagtgcaccaaaacatataactgcttgaaaaatataatgagccgagtggatgctgttgttggcagcatcattaagagcgatcatctgtcagggggatcgcatatgaatgagatttgtgcctcgatttagcctcgctattgtttgctattcaatggaattaattctttatggatttgtaaaacttcaatgattaaaaaattaatagggcttaagttaagactccgaagatattatactcttaaaatatatgcattttactattgcctcaaaacaatcatccccttcccaacttatatccataaatataatttatacataaatccttattttatagtttaaagcttaatctagtggctaccaactgttttcctagtactcatcacacgccaatgaaataactatacttaatagcagatatcgaatgactaataaatgaacacaactatgagctgaaaggaacttaacacccaattgagtcttctttaaaaaaccaaatgactatgtgggcggttttagttttcgtatttattgaaaacggtgagaaaacgtcttcatcacaggaggaaatggcgctactagtgggatcgttagtcggtttagtagcctttcaaaatgaccacaagactgattgtaacattttcatggcataaccaatattacgtgccaaaaagctttaggcgatcaacgagacttgtaaattgaaagtacttaccccagttcagttaataaggatgtataaattaagccacatatgtatattattttattactataatatagatgtcaacttaatggcactgtaatgtgatgacaaaaaactctcaggcgacgttaaataaatcaaaagatggtcgtgacacctcttctcccgtgggtgcagttaatggcagttgaaagcacaatatataagttggaagtggaccaactattcccacattcaaaatgggtcagttgcacctactgttagtcgccttggttctccttagtcctggcggggatagcttctatcatagtttaattcatcatttgaatcgtgaacttaaaattgaatatgttctgcttttgggcaacttcgatacgacttggttagatattttgtggcaacttcctgtttccgtacttcaaattaaagagcactctagggaaacctatagcttgcttgaaaatccgtcacataatgtccttacaatagcttttgttaacgattcaccggaagacatactggaaattttataccgcaatctacgtatgctaaacacacaaccagtgctgttggttataaggaaatcgacaattcgagtaaattcgttgttggaatggtgttggcaccatcagctacttaaggtcgtggccattgctcaagattttatggtaagttgtaaatcattacttaattaataacctcttaatatgagagtgtagtgttttctcttttcgtggtcattaccgaaccttcttctgacatcgtgccatctgttatttgttgttcatttttgtcagtataaacaataaggtattcgtcttcatcagctaaagcattacatagaagtatgcattcctttttagtttgaaaacgattcgggtttccgccacaaccaccgtagataaattctacgcatacattgttatccatgtcataggcaaacatttcaaaatttcccttgcaagggccaggatttgcgatgaaagagcatctctcttaaaataaagatttactacgtaggactccttgagctataaaaataacttaccatgtctgagtgccgtagaagtcccggggactattaagaaaatcaaaaagtagtgaagcgaattcatgtctgtgaaataatttattgtttgtttttgatgtgttgaaacatacaaatgtcattatgaaatattaatcatacgccctgtgggatttgtcctatattttcaggagtctttgattgtctacagctacaaccctttccccgtcttgcagtttatcgagaggcgtttggacaacagcaccgtaatattcgaaaaacgattggaaaatcttcatggctatgaggtaccgattgccttgggtggatcttcaccccgactgattgtctatcgtgacttggagggaaaactgattttctcaggacctgttggtaatttcatgaagagctttgaacagcgttataattgcagattggttcaaccatatccttttgatgagtctgccatttctccggctcgtgatttaattgcttccgtgcaaaatggtagtgtccaaattgctctgggtgcgatttatccccaagttccatatacaggatattcgtatcccatcgaactaatgagctggtgcctgatgatgccagtgccagaggaggtacctcacagtcagctctacagcatggtattcagtcccatggcatttgggatcactattgttgccatggtgttgatttcattgactttatctatggctctgcgtcttcacggatatagagtcagctttagtgagtactttcttcatgacagctgtctgagaggagtcctgtctcaatccttctacgaggtccttcgagctccagccttgataaaggccatgtatctggtgatctgtttgctgggactgctgatcacctcatggtataactcgtacttctccacttttgtgaccagtgcccccagatttccacaactcaccagctatgagagcattaggcattctaatatcaagatagtgatttggaagccggaatacgaaatgcttctgttcttttcggaaaacatggagaaatactcgtcgatctttcagctgcaagaggactacaaagagtttttgcatttgcgtgactctttcgacaccagatacggctatatgatgccaatggaaaagtggtcactgatgaaggagcaacagagagtattcagctcgccattattcagcctgcaggatgacctctgcgtctttcacaccgttcccatagtgtttcccatggtaaaaaattcgatatttaaggaaccatttgatcgtctcattttggatgtgactgccacgggacttctgagtcgctggagagacatgagctttacggaaatgatcaaggcaggacaattgggactcgaggatcgaggacatccaaaggaatttcgggccatgaaagtcggggacttgatacagatttggcgctttgtgggatggatgctgggcttggccacaatagtctttctccttgagttaatttgtttttggcgacataagatgtggcagaacatgaaatatatgttttgtagaaacaaaaatatttaaattaaagaaataacttagcttattaaaataaaatcttaataaaataaaatcaatatcattaggttgttatagaattttctttagtatacatatacaagcccagcaacttgttattgtttaaatgattaaacatactctgagtgtagtgttaattttccaaccaaacttgtctgattgaggtgatttctgctgtttttgtgtaatcccctgggaaatgttttctggttttctttttttcgcccgcgacttgttaacgtgttctgctaattggaattaaccattagccacgtcgtcggcggattcattagcaaccctttaaatgtgcagcggcatcaatcagtgtcatgcagttgtccctcgaccgtcgtgatggattgcccaaagtggatcctgagcggcctttgcctgattagcctggtcagtggcgcaacggtaattgaattactgggtacgttgaaactggaattggactttgagtacgtgctgctcatgaagaataggaactttagtctgtcggatcaagtttggaacggcacttcgttgacgaaggacgttatggatgaagtacaagtgcctgtccttcaattcaatgaaaatgtgagctactttttgcacaacagcatcagtagacgtctggttaccctaggttttatgagtgatgcaaatctggacgagcacagaggtctgctcacagctctggtcgcgaatcttaggcacatgaccacgtctagagtgatttttctagtccaatcgaaggcatcaactgattttctatacgaactgtttaggaattgctggcgtaaaaaactattgaatgtgattgttattttccaggactttgaggtgggtgtggagaattttcgaaaacatgattaaaatattctatatttttggataacagactacctcgactttctacagctactcaaattttcccatactacaaatagaagagcgcatctatgagactagtttgcaaactctacctatctttcccgatcggcttaggaatttgcatggctacgagatgcccgtgattcttggaggtaccgcaccgcgtatgattgcctatcgcaacaagaagggtaatgtggtctatgatggaaccgtgggtcattttatgacggcctttcagcaaaagtacaatgtaaagtttgttcagccactgcaggcgaaaaatcctttggactttgctccatcgatgcaaacagtcggtgcagtgcgaaatgagaccgtagagatatccatatccctgacttttccgacaattcctccatttggatttagctatccgtacgagcagatgaattggtgcgtcatgctgccggtggaggccgatgtgccaccatttgagtattacactagggtctttgagctggctgctttcctgctaactctgggtaccctggtactgatatcctgtctcctggccagcgctttgagcctccatggctatgcaactaacatcagtgagttcctgctccacgacagctgcttgaggggagtactgggccaatcatttgtggaagttttccgagcgcccactcttgtacggggtatttatctggagatttgtgtgctgggcatcctgatcaccgcctggtacaactcctatttctccagctatgtgaccagtgcaccaaagcagccgccttttcgaacgtatgatgatattttggcctctaaacttaaagtggtggcgtggaagcctgagtatgcagagctggttggccgtctccttgagtttcggaagtacgagaccatgttcctggtggaacccgacttcaatcgatatttggcacttcgtgatacgttggacacgagatatggttacatgataaccactaataggtgggttttgatcaacgaacagcaaaaggtcttctcccgaccactttttcaaaaacgcgacgatttttgcttcttcaacaatatacccttcggatttcccttgcatgagaactccgtttttatggaaccagtgcaaaagttgatcatggaattggccgaaacaggactttactatcattggataaccaccggtttttcggaactgattgatgcgggtgaaatgcattttgtggacttgagtcctcatcgtgaattcagggccatgcagattcaggatctacagtatgtgtggtatggatatgcttttatggtagtattatcctcgctagtttggctgctggaaaacttggcgtacacggtaaaatctaaaacgattttcccaacacattttatgcaacggaacaaaaaataaaaagagtttcgtggcaaagcgtacggcttgtttaaaaaccataatatccgtaaaattatcgtttaagacactaaacacataaatcgatttcgttagttgtaaaggcctgctacctaaacaaagggagctagtagttgtaacgactacagctcgtgtagtttcacagctccagctgctttatggttatttgtctagccatcaaatatgactttcctttcgtttcgcataccccactcggggatcgaatgttcccgatttccattgtgcaaatatttgcacagcagctcgccggctcagagttcaacatcaaaagcaattaagacgcgtgcttgccgcagtggcagctgaacacgaaacaccgaatacccagtgtgtttgagctcccccaaaggtgcgcgctgatgttagccacctgtgcgacggccactggcgcctcttgaaattccctaatcgacatgtttcgatctcaaacgacgtggccggcagtggaggcatcaccatcagcggtacacgcgaagtaaaattggttaactatcatttgggcttaaagtgatcaagatctagggcagtatacgctaatgacgcctttcagttttgagaggatatgccaattttggtaaaaccaaatattttattaactattttatagcttgttattaatttcaaaaattgctcaagaaaatgtttaaaatttcgttaaatgtactgaagaattttatatgcttgatgatctgctaccgcattggtttagagaatccaatagttatggaaatgcaaacagtatccacccatttttttttgcagtgcacaagtcgtgtttcaccgatcgtgaagtgaaaaattttctctaatctacgctgatggcacgcatttgtagccccccaccaaacgatgccggcagtctggggacgggtactttgattttgactgacaagtgccgcctgcctgttgatgcgcctgctgctgcactgatgctgcagtaatgctgctgttgttgcagttgctgctgctgctgctgctgcagttgttgcaatccgttgttgacatgcgcagctgcatgcgctttcgtgtgcactcagctc

SEQ ID NO: 32747 - DNA, 3021 bp, DROSOPHILA
atggaggatgaggagaatgaggacgatccggagggaattcaaccagatggggctgagtgcgggtcaagtgctgacgcatcagccaaatccagtgaatttatcgagaggcgtttggacaacagcaccgtaatattcgaaaaacgattggaaaatcttcatggctatgaggtaccgattgccttgggtggatcttcaccccgactgattgtctatcgtgacttggagggaaaactgattttctcaggacctgttggtaatttcatgaagagctttgaacagcgttataattgcagattggttcaaccatatccttttgatgagtctgccatttctccggctcgtgatttaattgcttccgtgcaaaatggtagtgtccaaattgctctgggtgcgatttatccccaagttccatatacaggatattcgtatcccatcgaactaatgagctggtgcctgatgatgccagtgccagaggaggtacctcacagtcagctctacagcatggtattcagtcccatggcatttgggatcactattgttgccatggtctgtctgagaggagtcctgtctcaatccttctacgaggtccttcgagctccagccttgataaaggccatgtatctggtgatctgtttgctgggactgctgatcacctcatggtataactcgtacttctccacttttgtgaccagtgcccccagatttccacaactcaccagctatgagagcattaggcattctaatatcaagatagtgatttggaagccggaatacgaaatgcttctgttcttttcggaaaacatggagaaatactcgtcgatctttcagctgcaagaggactacaaagagtttttgcatttgcgtgactctttcgacaccagatacggctatatgatgccaatggaaaagtggtcactgatgaaggagcaacagagagtattcagctcgccattattcagcctgcaggatgacctctgcgtctttcacaccgttcccatagtgtttcccatggtaaaaaattcgatatttaaggaaccatttgatcgtctcattttggatgtgactgccacgggacttctgagtcgctggagagacatgagctttacggaaatgatcaaggcaggacaattgggactcgaggatcgaggacatccaaaggaatttcgggccatgaaagtcggggacttgatacagatttggcgctttgtgggatggatgctgggcttggccacaatagtctttctccttgaccacgtcgtcggcggattcattagcaaccctttaaatgtgcagcggcatcaatcagtgtcatgcagttgtccctcgaccgtcgtgatggattgcccaaagtggatcctgagcggcctttgcctgattagcctggtcagtggcgcaacggtaattgaattactgggtacgttgaaactggaattggactttgagtacgtgctgctcatgaagaataggaactttagtctgtcggatcaagtttggaacggcacttcgttgacgaaggacgttatggatgaagtacaagtgcctgtccttcaattcaatgaaaatgtgagctactttttgcacaacagcatcagtagacgtctggttaccctaggttttatgagtgatgcaaatctggacgagcacagaggtctgctcacagctctggtcgcgaatcttaggcacatgaccacgtctagaactacctcgactttctacagctactcaaattttcccatactacaaatagaagagcgcatctatgagactagtttgcaaactctacctatctttcccgatcggcttaggaatttgcatggctacgagatgcccgtgattcttggaggtaccgcaccgcgtatgattgcctatcgcaacaagaagggtaatgtggtctatgatggaaccgtgggtcattttatgacggcctttcagcaaaagtacaatgtaaagtttgttcagccactgcaggcgaaaaatcctttggactttgctccatcgatgcaaacagtcggtgcagtgcgaaatgagaccgtagagatatccatatccctgacttttccgacaattcctccatttggatttagctatccgtacgagcagatgaattggtgcgtcatgctgccggtggaggccgatgtgccaccatttgagtattacactagggtctttgagctggctgctttcctgctaactctgggtaccctggtactgatatcctgtctcctggccagcgctttgagcctccatggctatgcaactaacatcagtgagttcctgctccacgacagctgcttgaggggagtactgggccaatcatttgtggaagttttccgagcgcccactcttgtacggggtatttatctggagatttgtgtgctgggcatcctgatcaccgcctggtacaactcctatttctccagctatgtgaccagtgcaccaaagcagccgccttttcgaacgtatgatgatattttggcctctaaacttaaagtggtggcgtggaagcctgagtatgcagagctggttggccgtctccttgagtttcggaagtacgagaccatgttcctggtggaacccgacttcaatcgatatttggcacttcgtgatacgttggacacgagatatggttacatgataaccactaataggtgggttttgatcaacgaacagcaaaaggtcttctcccgaccactttttcaaaaacgcgacgatttttgcttcttcaacaatatacccttcggatttcccttgcatgagaactccgtttttatggaaccagtgcaaaagttgatcatggaattggccgaaacaggactttactatcattggataaccaccggtttttcggaactgattgatgcgggtgaaatgcattttgtggacttgagtcctcatcgtgaattcagggccatgcagattcaggatctacagtatgtgtggtatggatatgcttttatggtagtattatcctcgctagtttggctgctggaaaacttggcgtacacgacactaaacacataa

SEQ ID NO: 32748 - protein, 1006 aa, DROSOPHILA
MEDEENEDDPEGIQPDGAECGSSADASAKSSEFIERRLDNSTVIFEKRLENLHGYEVPIALGGSSPRLIVYRDLEGKLIFSGPVGNFMKSFEQRYNCRLVQPYPFDESAISPARDLIASVQNGSVQIALGAIYPQVPYTGYSYPIELMSWCLMMPVPEEVPHSQLYSMVFSPMAFGITIVAMVCLRGVLSQSFYEVLRAPALIKAMYLVICLLGLLITSWYNSYFSTFVTSAPRFPQLTSYESIRHSNIKIVIWKPEYEMLLFFSENMEKYSSIFQLQEDYKEFLHLRDSFDTRYGYMMPMEKWSLMKEQQRVFSSPLFSLQDDLCVFHTVPIVFPMVKNSIFKEPFDRLILDVTATGLLSRWRDMSFTEMIKAGQLGLEDRGHPKEFRAMKVGDLIQIWRFVGWMLGLATIVFLLDHVVGGFISNPLNVQRHQSVSCSCPSTVVMDCPKWILSGLCLISLVSGATVIELLGTLKLELDFEYVLLMKNRNFSLSDQVWNGTSLTKDVMDEVQVPVLQFNENVSYFLHNSISRRLVTLGFMSDANLDEHRGLLTALVANLRHMTTSRTTSTFYSYSNFPILQIEERIYETSLQTLPIFPDRLRNLHGYEMPVILGGTAPRMIAYRNKKGNVVYDGTVGHFMTAFQQKYNVKFVQPLQAKNPLDFAPSMQTVGAVRNETVEISISLTFPTIPPFGFSYPYEQMNWCVMLPVEADVPPFEYYTRVFELAAFLLTLGTLVLISCLLASALSLHGYATNISEFLLHDSCLRGVLGQSFVEVFRAPTLVRGIYLEICVLGILITAWYNSYFSSYVTSAPKQPPFRTYDDILASKLKVVAWKPEYAELVGRLLEFRKYETMFLVEPDFNRYLALRDTLDTRYGYMITTNRWVLINEQQKVFSRPLFQKRDDFCFFNNIPFGFPLHENSVFMEPVQKLIMELAETGLYYHWITTGFSELIDAGEMHFVDLSPHREFRAMQIQDLQYVWYGYAFMVVLSSLVWLLENLAYTTLNT

SEQ ID NO: 32749 - DNA, 2237 bp, DROSOPHILA
ataataatttgcctgatttatgattcgattttgtgacaccaatttggcatgtgccccccagaccgacgagatgtcacctcagggaatgcagattcatcggcaaaaaaaaactggtcaagtgcggcttttcctttgtctaagctgcaagcttaagagatctatgaaaaattggccatacttaagctgtcattggtgtgatctcccatctgcggcaatctggttaattatggacaaattctttcattataaacattggtaaaaaaaagagcgcttaagttgccgcttatcgtcagctttctatgtcaacatttcagggggatctcgaaaacgagcaaaaagcaaaacgcacatacgtatgccataaaaatatcaaatataattgcgtgtgtcgtgccacttgagaagctgtcgcggttcctaagcgctttttcacaatgctcgttatcgcaatgtcaccgataaattccaattccccagcccgtaatttatgttgacgcaggcttatgacgcaaatcgcaaaatgttaacatctaatggaggggttgcggcttggatgtggttttctggagctccttagcctgcggccgacaaaaatcgacaaatctattcggttcccattgccgggcgcattggcattagcattggactcgactaatttccgctgcatgctaattaaaaatgcctttggcaactcggttgccacatgactccgggcaatttgcacggccgccgcatcgatggcggtgctccatctacaaggagaaccggagacaagtggctgtgcactgagagaaacgcctatctccgtttgcccccaagaagcctgctgcataaattctaaaagcacttgggtatccaaatgacttgaaggcttgtgacactttgcttttgctatttatgttacagccgcgttgaaagtgatctggttttgtttctctgagtgggctggattctaggaaggcacatgctctggagctgtccccaggcacagaccatttcgttatggtttaaatgagcaatttaacaagcagacagcaccggctgccctgccacataatgcggcaaatgctccgcgttgctgctgctgctgctgctgctgctgttgctgatgttgctgctgttgctgctgttgctgctgctgctgctgctgctgctccatgtggagtaagagatcaaagatagaaatctcggcaagaagcggcagacagtggcaggctggctgggctggcggctccatcggttagggttattgcttgttgttgtcgtcgacttaatagcggcgcttgccccttgttgccgctgctattttgctattttcctattgctattgctgtgctgcacttgaaattgaatctgaaggaaaatcgtgcacattctgaggcgacaccgagatgcggaaacggcagcacaacgagcacagaagccgttagttaaactgctgctgccgctgctggagctgccggcggaaaacggccagcgtccaaagctgcagctgcaatcccgattcagatgcagttgcagttgcagttgcaatatgctcccttcgaccaccgcctggctgtcataaaagctggcctgtatatttttgaggcatattaattatttccattttttgtttttttttggctccttccatctcgtttttggttttgttgcggccttttgttgtcgctgttgtcgatgctgttgccgccgtgttgctggtgttgttgctcgtgaggatgtgcttgggctgggcccgcagctgcccgccagcgatttttgacagagattttttgttgttgtttttgtttttgcttttcctgctggcccgaatcgtggtttcgaccatagagcaaaaagtccggccagccagcgcactagcaatgaaattttttcgtacatgttattgtccatgtcccaggttgagatccgctgttgttgctatggctttggcaaaagccaaagcaaatccaccgccacccatggcgggttcaatcgggtttcgttacagttttactataagctctatattgctgatccgctctgcacaggaaaaaacaatgtattgataatttgcgaaaatattgtaatatgacgaacacgtagtccatgtggtgtgatctattcaatttgaaagaaacataaaccgaacaataaaaaagtataaacatttccatgtaaatatatttccgtatttttttaatgaatcctattttaagttttttttaagtgcagaggaggagaagggttgggta

SEQ ID NO: 32750 - DNA, 237 bp, DROSOPHILA
atggagccgccagcccagccagcctgccactgtctgccgcttcttgccgagatttctatctttgatctcttactccacatggagcagcagcagcagcagcagcagcaacagcagcaacagcagcaacatcagcaacagcagcagcagcagcagcagcagcaacgcggagcatttgccgcattatgtggcagggcagccggtgctgtctgcttgttaaattgctcatttaaaccataa

SEQ ID NO: 32751 - protein, 78 aa, DROSOPHILA
MEPPAQPACHCLPLLAEISIFDLLLHMEQQQQQQQQQQQQQQHQQQQQQQQQQQRGAFAALCGRAAGAVCLLNCSFKP

SEQ ID NO: 32752 - DNA, 2739 bp, DROSOPHILA
aaggggtaggggatgggggggtaggcatgccatacttgggcatgcagcgcaaggctcttgccgcttcaattgtttcttgtggacccattttatctcgctgatgcagtccaggataggcaggatttctttatttgagtcaagccccttgtgtgtgtgtgtatgtgtgtttatatgtgtgggcccattcagcctgcaatcaacacaacgcatcctgcaattatcaacatcagccgcctacgtcgaggttccaccattaaccctttgacgggcgtcagtctcaaatgccgccacataacaagaatgcgttaagtcgcttggggttaaaaggttctcaggcttcaggaagtaataaatatatctagctttcagacactttccctagcttatattgaaatattacacactaacctatactgaaaatatcccaaatataacgagcgttgtgattggatgccccagatggcgccaggaggttaagctggattccctttaagtaaacaccgctgcagctgccgtaagtcaagtggttactttatgcatccttaattgctcgactggctgctgggacacgagcacacgtccacgtcctgttcccgtgacactgatttcaaagtgataatgcggagggaatgcatgcgaaaaaatatttgtcacctatgtagcttagttcttatttatgtagtatggttacatgctctgcattaagcagcaaataaataaaggataattagaagtcctgttctacatttaagtttcgtatctttcatgtattgtcgtgatcaacatatagctaattcttctacaatagtttatggttttgcaaagcagcgtcaaaaatgatagcatacttttttggattcaatattaagtgaataaaacttgcttaaagcaagaaagataaggtagaagtatttttatatgcccatcaactcgatgcctgaattcagaattcagaattgatttcgcagacaaatcctgtattgaaatcccattaccacaatcaatggccccaagggattactgctcccgccattgccaaactccggacgagcgtaaaattgtagaaaatcggcgacagcttaaggagcactcgggaacatttgcgtcgcctaccctccgccaatcctccgccagtctctccactcggagcagcccgccggatccggtggacatctgtcaggacggaaaattccgcaaaacttgactgccggcggaaaggaaatgcaaaaacaagtttgaaaatggaaagggtggacaggctggggcagtaacaacgagggttggatgctgctgctgacattcatttactttgccttgggccaacgaggcgtatgagtaacggccgcaagacgtggcatttttaatgcttttgttttgcattcggtgtaattaagaaaacaacttgatgcataaatcccagaggagcgaatgggtgcgccaaaattggcaggcaggcagacggtgtttaagttgcatgaagcgtcggattatgcacaagtgcaattatgcactttgttttcaccaccgccctttgattatttatgatgctctaggcaattgcaaatgcaaaacacctggtggtgcttaagggggaaattcctgaaacgatactcaccaaaagtgacgccattcgtctgcttctccttgtccttgtccttatccttgtcgcacttttcgccgcccaacggctccagctcgatgccatccgtggtggccactttgtaatcgcgcttcgacatattgccacaacagaagccacaacataacattcggccaattttgtaggcttgtggtttaagtggcgccgtcttggattcctttgcctcagggcacgaatcgggttaaatgggtattatttatgggttacgactgatcctggcgtggaggggcacaaggatcgggagtatgggtccgggctaggggggcaccaactccttctgtttcttcgctagcgatatgtttatccaaaaagtggtcggtacaaaaggtccttcgagtgtaaacgggtatgtagaagactagaaaggtcggtgagtaaagttgattgttgtgtttgattattcgtattattcggtctaaaattggtccagttcctggtgttaatgtccttctgtaatttactaagaagaaagtaaaattatttaaatatttaaactgatataatttatgaatagaagagaacgaagaaagtctctaaaagctatctatgtcaagcaaacaatacaatgtaagtagttttttgagtatgccagacaaaagaaaccatcagtcccagttttagaagagatctatttgcagactccacttggctgcgcagaaattaataagaaatatttgaaatgtttgcagcatttacaattcttcgacttattgttagactgcaacttccggtgctggccagaataaaaaaaaaaataaaaacttaaggctcctaaagtggggcagttgggggaaatagtggagcctgcaactgatgtcgccacttgtgggcgggtgtcgctgccaggacattgttgtgctaggcaaacaaaacgaaactttaataaaagccctcgcgctccagcactccagtgtcctttgtggcccagcaaaaaggagtaatagaagaaaaaggcgagctgcaacaatgacaatgtcgtgggctaaaaagcattcgatagccggagggccacgaatgcaaatgcacatcaaatgtgaacagtggcccagtggtgggcgttgggcgttgggcggggcatg

SEQ ID NO: 32753 - DNA, 297 bp, DROSOPHILA
atgtcgaagcgcgattacaaagtggccaccacggatggcatcgagctggagccgttgggcggcgaaaagtgcgacaaggataaggacaaggacaaggagaagcagacgaatggcgtcacttttgatgtccaccggatccggcgggctgctccgagtggagagactggcggaggattggcggagggtaggcgacgcaaatgttcccgagtgctccttaagctgtcgccgattttctacaattttacgctcgtccggagtttggcaatggcgggagcagtaatcccttggggccattga

SEQ ID NO: 32754 - protein, 98 aa, DROSOPHILA
MSKRDYKVATTDGIELEPLGGEKCDKDKDKDKEKQTNGVTFDVHRIRRAAPSGETGGGLAEGRRRKCSRVLLKLSPIFYNFTLVRSLAMAGAVIPWGH

SEQ ID NO: 32755 - DNA, 2480 bp, DROSOPHILA
caccacacaatgagttgcacttatttagtggggcatgcaacatttcgcaactgtagttcttaaacgcacaaccgaaactttttcatttgttgttccggcacacaagcacacgcagccagacacgcacacacacacacacacaatttaagcggcgtgtacttcgcacctttacgcgtcttctttcactgttatttggcaaattattgtcgcgtccgctttgctactctctttcgccaaccgccgtacctacgtggtgagcttgaaaacgtgttttgtttgttacgccgcgtttggcaatttctccgccgtcgaaatcagtcgcgattttcgattgcggcctcaaaacatttgaggcaaaaaacgtctgtccagcgcggtgcttttatcaagtgtgcccagttgaggctctttgcagacgattttgttgagttttgtgcttttgcggtttttttcggggccgccaagtgcggtctcaccataatacattgtgcttttaacagaaatgttaaatgtagcttaaactaacagtgacagaaagagctttttaaaggagagctagaaatgtagatttcggttacaaatgtatctttattacctaccttttatttctagatttagtttttagaaagaatatcttaagaatataaagaacatatttatattttccctaagagtaacttatgtagacatggtggctattgcaattttatgtagatatggtgtaagcttataagcttttgacacgtgtccatgcaaatttttcagttaatttgcattagtcatttttttaactagttctacataacaaagttgaaatttgtattaaaattaaaaataaagggatatatatagttttatatttccttaatattaatttaaaataattttttttcatgatattgatattgatattctacatgcatgcaaaaatacaaatatcttaacaataacttccgttagctattgatatcacaaatggatacatttgtattagacttgctcaataaaacagatagccacactattcagaacgtgtaattcaaaatatagctagaagactatcaatctatctaaaagacctgctcataaaaattaatttagattgatgggggtaatttatagatatattgcgttctgaactgggaacatttgtgctggcatttggataaagtaattaacaccgaagcctttcaatacttaccagattggtaaaatggaagccacctttccaaatgttggtcttggcgttacctggcgtcgtcgattgggtgatggatggcgttggcttggccagtacagcgggcgtggaagccaccgtgggcttaatcagcttactcaacttcgagggtggtccaatgggcacccggacggtgaccttcttcttcggattcagctgcaattgggtctggtggtaggtatattcgatgtccttcgccggggacaaggattgcagccgaggcagatcctctaagtcgatcattattgcttatcagctggcacaaatggtgatgagtcaatatgtcaactggaatgaaagcgaacacacagataaggatgggtcactaggttgactaggcttttttttaggatggtggttttgaacttaataattctgttccgacattaaatataaacagtttgttttcggcgtataagaaaatgtgtttttactcattttgatcaatgtgacagatcaaagatataataaattcatatatattttagtagccatactcgtgtgattttatttttaatttcttcgaattccctgctagtaactttatcgaactttcactgtaaatgagctataaaaactgataagcgaacttcgacgggtggaattcaaaaatgagatatagccaacctaatggtttgttttatttgccatttattgagaaaattacacacattcacacaaattcaaatgtagataagtacagtggatgcccaacaacaatatcaactcccacgagaatccagaaagataaccgcgtggaaacggcattcattatctatcaattgatttgggaacaaagtattaggtatcagtaaccatagagggatttctccattgtacacaatacagtgggccctgccttggaagaatgcaaattacatcagccaatgttccacagggggaatttttcgattagattgggacaataaatgaatcataaaataaattaaattggtcgcacttctaaattttgggaatcagccatgagtccctgctataaatttaatcgacaggttctttatagaaattggtcaaaagattcgtacttatttgttaatcttttcttctttaactattaaaatctatggtgttagcaattttaaatgacatttctatttataagaaatgtacttaattgtgtagactaatcaatattataatttatttgctctttttcataacagctatcattttgacctttaacggtctgcttctctatatgagcatattatctatctattat

SEQ ID NO: 32756 - DNA, 300 bp, DROSOPHILA
atgatcgacttagaggatctgcctcggctgcaatccttgtccccggcgaaggacatcgaatatacctaccaccagacccaattgcagctgaatccgaagaagaaggtcaccgtccgggtgcccattggaccaccctcgaagttgagtaagctgattaagcccacggtggcttccacgcccgctgtactggccaagccaacgccatccatcacccaatcgacgacgccaggtaacgccaagaccaacatttggaaaggtggcttccattttaccaatctgtgtggctatctgttttattga

SEQ ID NO: 32757 - protein, 99 aa, DROSOPHILA
MIDLEDLPRLQSLSPAKDIEYTYHQTQLQLNPKKKVTVRVPIGPPSKLSKLIKPTVASTPAVLAKPTPSITQSTTPGNAKTNIWKGGFHFTNLCGYLFY

SEQ ID NO: 32758 - DNA, 2749 bp, DROSOPHILA
tggtttctatttcctttttggactggtccattgaggggctcgcttgaaatcgaaactgaaccaacaggtttccatgttgttgctgcatcgatgttggcattggtctttgggtctcgaacaaggaagccacagcagtttggaccttgccttacttctttctgattcgcaatggattttgtatttcgcttttcgcttatcagtcgcagttcggcggcgatcgagtcaagataatgctcaatactatagccggcaaacctttaagccgctaccagataaagcggataattcgttatgaacgaaaggtttgtttggactgccgcccatcaggagacacgcgatccacacatttccaccatcgcgagtttatatacccctacaaggggtgtatacagtgcagacaaagagggaatcttgtatagtgtatctctattttaatagaaaaatcgaaccttgaatacgataaaatattgttcaaagtattttagatttattaattagaacaaataatttgttatacttgataaccatttgaaaatataatataatatattatgtggctgtaaacagcgaatggggtggtcacgaactttggaaatactataggatatttacataaattagtcgtatagcgacattagtattcctccgaattgcataactaattcattgatggcaaagcaagcaaactgaaccattaatgggtaaacaatgaaaccacccacaactcattccggccaggacggacgaccaggagcactccactggcggccatcacacgagatgattgtggcattcgttgtattctttttatcgctgatagtattttatctgtttgtgacaaccaagcaattccacaaattgcagggctgactggcgattggggtcaggtagaggcaaaggtaaacagcgatgccaactctcgtgatagagcaaacacacggcttaacgaattgcgcagaacaattattacatatatgaaattaaatacctatttcaggtgatgaaggcattgtgctacagtgccaaactggtggctggctaccatgccaagcggaatccggaactagccaagcgatacgccaccgccagctcaaggatctcaggtgcgagagccacactgcgtctcatcgacgacatacccatgatccaatatgctttggagtatggcttgggcgagaatgagcccgatcgcgtcatgcaagtgctgggagtgacggccaacattgtggatttgctctactatcccatcgagaaggtgtgctggctggccgagcacaagattgtggatgtcaagaatgcggataactgggacaatgtcaactccatattctgggtgctttcggtgtacctgaacctcatgaggtacagaagaattattcgaatcgtcagctttgaattttcaaattaaattgcatcttctaggacaatgcggaatttttcactgaatcaggaaaagctgaaccgaacgaataatataaacgagtaagtggtcgtcagccgaaaacatccaataaaagctaacaaaccttccaaatccatagattggatgtgaaaacgttgaccaagcaccgcctggagatggtgtccatcgttcggatctcactcgactttgtgcacgccgtcagcacgctgccgaaaggatatttgtggggcggcaagctgtccaccctgcaggtgggtgctattggcaccttatccgctggcctgggcatctaccagatctttgccaagagaagactgaacaagtagtcggtccgccgttgtatttgcaatccgtgtactcgtatttgttgaacagaattttaagctagtcggtaatcgtttttgtacgttgagttttttgtacggcactcgaaagtgtgtttagccagtatgtcctttaaagtagcacaaaatacacgctgaataattgtaaaaaacatgagtttttggtctgtgtgtcctttattatctgttatttcttttattgtgtgtttttagattcccatacatgtatatgtcagtttgtgtattgttaattcccttcttagccagcagaatgtttaacttaatgtacatatattgtcagccctctggcgagggttcatttaccagagttattcgtattatttgtcgttcacgagaacgatttgttttgtcggtttagcagtcattgtatacaatgtgtcttaggcatatttaaaatactcatatgtctgatataatacttgttatgcatggtttcaatttaaatatttggatttatagattacatgagggaccagatcagttggtcgggcaggagcccaagatctgacctctatggctttggttaaaaataacatttgttagtaaatatattttcattgtacatagtttatttgcttgtgtttgtgtgccgtcgcaagcgcataaatattaacaattacttttttagttattatcgtttttagtttgctctgcttgactgcttccattggtaagctctttagatgtacgaagtatgaatgaagtggtgtttatcattttatttttagcctttatgtttgctgtttatgtaacggggttcattaaaattcatgttattttgatatagatatttttgggatttattaattttcgataatatacctagctacatgagttatatacttttgttattgttattagtatcattggatattcgattgaagtttgttcgcttcacttacaaaaaaaaaaagcctcaaaaagttcccaaaaagagttcatgcactcaaaatatgttcaa

SEQ ID NO: 32759 - DNA, 630 bp, DROSOPHILA
atgaaggcattgtgctacagtgccaaactggtggctggctaccatgccaagcggaatccggaactagccaagcgatacgccaccgccagctcaaggatctcaggtgcgagagccacactgcgtctcatcgacgacatacccatgatccaatatgctttggagtatggcttgggcgagaatgagcccgatcgcgtcatgcaagtgctgggagtgacggccaacattgtggatttgctctactatcccatcgagaaggtgtgctggctggccgagcacaagattgtggatgtcaagaatgcggataactgggacaatgtcaactccatattctgggtgctttcggtgtacctgaacctcatgaggacaatgcggaatttttcactgaatcaggaaaagctgaaccgaacgaataatataaacgaattggatgtgaaaacgttgaccaagcaccgcctggagatggtgtccatcgttcggatctcactcgactttgtgcacgccgtcagcacgctgccgaaaggatatttgtggggcggcaagctgtccaccctgcaggtgggtgctattggcaccttatccgctggcctgggcatctaccagatctttgccaagagaagactgaacaagtag

SEQ ID NO: 32760 - protein, 209 aa, DROSOPHILA
MKALCYSAKLVAGYHAKRNPELAKRYATASSRISGARATLRLIDDIPMIQYALEYGLGENEPDRVMQVLGVTANIVDLLYYPIEKVCWLAEHKIVDVKNADNWDNVNSIFWVLSVYLNLMRTMRNFSLNQEKLNRTNNINELDVKTLTKHRLEMVSIVRISLDFVHAVSTLPKGYLWGGKLSTLQVGAIGTLSAGLGIYQIFAKRRLNK

SEQ ID NO: 32761 - DNA, 2204 bp, DROSOPHILA
ttcccttcgcggcttgtcgaccgaattgagctaaatcgtgttcattaggcggtgccacgcctcgtcgaacgccctcttttcggttgtcgcatagcgacttaaagcgtttaatatgcagggaaaaactttcaattcgattatgacgaagataaatactcttaaaaatagatttttgcaacaataaaaactattattcctgctgatctcttataactcgactgggttatttttcaaaacttaggacaaaactttggttaaaactggtatacctttaagcagtgtaaggcttcaaaagtgcaaccgttgcaaaattggacttcttcgctgcacccattgcccgtgcgttcggttcgactctcctgctttcccttttcaactctgaccctcacagagcaacaccccatgctaactgtgttagtcaacaccatatccccctgcctcttgtgtccgaccattgagtatttgctgtcgcatgcaaatttactggccgcacttgtgacttgtcatgtgctacacaatcaccacccacccatctgcacccaccacatacacgacatacagacggttacacatattgatcccattgagcatctggaggcagttcccccttcctgtgcccatcgcttgggttcctaactggttgaagatggccacaagtgttcgccagactgtcgatttgggggatttggaaaaggaaaaaggcaaaagggggtcattgcagtacggatcgaaatgcggtggttaaataatcgctgtttatgaagcaatcaataaatttaagctgttactgccaccgctgcagagcaaacacttggccaagagtcagtggagtgggttgctcttgtaaacgatgcttgtaattgcgttatttagggcctgttgacttcgagtagggaaatcgaagtattaacgatcgtatgcaatgctgcacagatggagataaattccagttattaatatctgaacttttaataatctgcgatgctttggttacgactagatgaacgtgaagttggcttttgttgacggttacgacgtgtatcccaagggcgagccatgtctctggccaggagcaggcggtaaggaggacgagcccaacgatgagctgaccccgctccagttggagagccagaacggacttcccctggcggcagtacctccgcatctttcccgaaaacttcgaagttcaaatccagaatgttgactactttgtggagctaaagaatcagttggagtcgttcgattccgaaaggattgctcacagaaagtgataagaaaagctcagacggctggtctaaggaggtccggctgcggttattcgagccatttgctatgatttaattaattggcagaccgtgttcgaggaccacttgcgcactcattgctgacgcaaataatgcaaaatcgaaagagttgggcccaagtgctcgataagtgggtcttgggattggcatgtaggattaccgctgccatcgatttcaatggcattgggttcaactgaagcggatcaaacacgatggcgaactaattgtgcagaaacgagggaaactcagcgcagctagcacacatagcacacactcttttctaataagtattttcgatttctttcaggttaatttgaaattctccagtaatgcagaaatggactttacccatttccattccatgctctatataagtgtcaggacctaaactttgcaactgtgatatgttccatgaagtttcctctagaatggaaactgtaggtcctctctgcttgattccctcgctgtgcaggactatatatagaaacccttctgggcaagggtatgctatatagcacaaatgaaaccaaatgcacgcggcttggcagggcttcaagtgcctcaacaagtacgagtgttgtgttgcaagggggaccgcgggcaatattttccatttccatttaattacgcgcccagtgggcggtgggtaaacgagtgaagtgggtggtcggttcaaaatgctggggggaagggggggtaggagggatggagatggatctggatgcttgtgtcctttgtagttgcatttaattgtgtttcgcctgcgccatttcgctaccataaattgttgctcgcccggacgttttgacgggttgacttggcccgttcgcttgtcagttgttactcattttccatttgccagtcgcactactcatccgctccatcttccttttgaggccc

SEQ ID NO: 32762 - DNA, 204 bp, DROSOPHILA
atgaacgtgaagttggcttttgttgacggttacgacgtgtatcccaagggcgagccatgtctctggccaggagcaggcggtaaggaggacgagcccaacgatgagctgaccccgctccagttggagagccagaacggacttcccctggcggcagtacctccgcatctttcccgaaaacttcgaagttcaaatccagaatgttga

SEQ ID NO: 32763 - protein, 67 aa, DROSOPHILA
MNVKLAFVDGYDVYPKGEPCLWPGAGGKEDEPNDELTPLQLESQNGLPLAAVPPHLSRKLRSSNPEC

SEQ ID NO: 32764 - DNA, 2688 bp, DROSOPHILA
ataagaaaatgcacctagttaaagcttgctatttgaatttcagatagctatttatcggcccattctaacgcaatttccgcacatgcgcctggaggatgctgtacggaaattacctgttgctctgggccatttgtttacttgctgccaactctgtttgtttactcagtcaactagctgcgctcgggccaatagcatactaactgcaagttgttacacgttcattcaactagaacaaataaacatgtgaatttctcgcccggcctttgtttttgatatttctttgccttgttagtgtcgccgcgtgtgcatcgcataaatgtggcaataaaacgacatttattattgctaccgaagcatttaattgcccatcacaagagggtgtcaccttctcacgttgcattaacatcaaaatgaactaattcctactggcagatgaaaaatggaactgtcaccaaagaaattctgccttctggagttgtgaatgtgctcaaaaaaaaaaaaaaaatggtaagtattgtacttaaatcacgagtttcacctgttgcctttccatgtcgtcaaagactttaaagatatttagacaaagtcatggcagctgacaaaaatcggtcgatatgggcaataaataagatcacgttgtgcagtttaaagttggcattggccatgtcactaccgtaaactttccatgcggaaaaaacttaggctgcattcgttctttgtcccacaaacacaaatccctggacatgtggccgtcaagaagtcccaatcgcgggatggacaagtgacggctgaaatgcgcttccaactcatattgctttcaaccaaaacagaaatcatcgcgtgggtagcattttttcgcattggcgaatacgaatacaattttcacgaaaaatatgtcagccacatgatgaaagcaggaagtgttcaagatatatacagaagaaagtattgtgatgtattggcatatcaaagatagtcgaaaggtggagatacaattattttacagagatattttggcgcttttggccgtcacactctttgcatagatggctcggtagatgtaaaagccaactgctgcatgaactgcaactacggtgcaaatggtcgaaataatatcggcattgatatgggcatagctcttgagcaccacaaatttcagggcaaaaaaggtggctatgggaaagccaattattagggaacagtaggacatcagcagcaggacaatgaacacggatccatgaatttgggtgtttggtggcatcagaacttcccactccagcttctccatgctcgaaatctcttgaaggaagatcaggcgcaggatatagcccgtgaccaggacatgcatcacaattaccgtggctacgccggatccaatgcccacattgtcatcgctgtttccgtagagcggctccataatcaagaacttgaagatgacgaagatcaccacgggaaacagaaggaagacggtcagaaagagcagcagtcgctgcattcgttcgacgagatattcggctcgccttttctggaagggaatttagcggacttggataccgaaaggattttgattagcttaccttgacattggaaacaagttcagcattgttcagatccgctgtggagcagggagcgagggaatggctaaccacctttccactgggataaatcttgcgcagcttggcaatcattttgtctatattatatttaacttaggatatgcaactcaatgcctacttaaattattgtctacgattctcagatagtcgtctaataatagcacacatattttagttcaataaacttaaatcattttattagcaaataaatatgatgcccataaaacttggcatacaaaaacaagcccaagtcattttgggcaattaagagatcagcaaacataaaattttttgctgaacataaagattgccaccatgcgaggcagaaatatctggtcgcatgactggggcgacatgactatatagtaattaaacttaacctaatcacaccagtagccagtagccagaaaaagaacttcgtcagattagatatgtgtaattagccagacggtggaattcgggtagagctatcttgaccgataaagccctccaatcaacgtcgtgatttttatagcaacacttgacttaaaaaccgcgccctcgatttatagcaaaagattatttgtgggtcagctgactgcaaggggatcggttttttccctagcgaaattaatttgccagcaattcataaatttagaatactacaaatcaatcgttggaattttcattgacattcacgattcggttgtcaatttttcacaattatattgcgcatttcgttgggtgtattttttagagaaattagcaaatttgaaggccaaaattattgtgaaagattaacattccatttatttctcagttattcacaagaaaagcatttggggctcataaagatttaacaaacatagattaccataaatctttgacgttacattcgctttaaattaataatcttatctaactttgaacgcacgttactcatacgcaacgttggcccattgatttgaatgcagagcagacttcctggctaaaaataaagcaatagaatgggaattttatgaatacgcttatccaatatttttcaactgttatgtctgtgaatcatgcaaattttagaccagcctctgttatc

SEQ ID NO: 32765 - DNA, 636 bp, DROSOPHILA
atgattgccaagctgcgcaagatttatcccagtggaaaggtggttagccattccctcgctccctgctccacagcggatctgaacaatgctgaacttgtttccaatgtcaagaaaaggcgagccgaatatctcgtcgaacgaatgcagcgactgctgctctttctgaccgtcttccttctgtttcccgtggtgatcttcgtcatcttcaagttcttgattatggagccgctctacggaaacagcgatgacaatgtgggcattggatccggcgtagccacggtaattgtgatgcatgtcctggtcacgggctatatcctgcgcctgatcttccttcaagagatttcgagcatggagaagctggagtgggaagttctgatgccaccaaacacccaaattcatggatccgtgttcattgtcctgctgctgatgtcctactgttccctaataattggctttcccatagccaccttttttgccctgaaatttgtggtgctcaagagctatgcccatatcaatgccgatattatttcgaccatttgcaccgtagttgcagttcatgcagcagttggcttttacatctaccgagccatctatgcaaagagtgtgacggccaaaagcgccaaaatatctctgtaa

SEQ ID NO: 32766 - protein, 211 aa, DROSOPHILA
MIAKLRKIYPSGKVVSHSLAPCSTADLNNAELVSNVKKRRAEYLVERMQRLLLFLTVFLLFPVVIFVIFKFLIMEPLYGNSDDNVGIGSGVATVIVMHVLVTGYILRLIFLQEISSMEKLEWEVLMPPNTQIHGSVFIVLLLMSYCSLIIGFPIATFFALKFVVLKSYAHINADIISTICTVVAVHAAVGFYIYRAIYAKSVTAKSAKISL

SEQ ID NO: 32767 - DNA, 41723 bp, DROSOPHILA
tgcaactatgagtctgccacatttccaccaaaatttccccactcgaactacttgtgttttggccacacgttcctgtgtctccaccgaatccatccaacggctatgaactcctacgaccctaagatcctgagatcctatgctcccaaaatcctaagatcctacgatcccaagctacccacagctatcctcagatcctgcgatgctgcaatccttcgattctgccatcctttgatcctgagggcactggactcgcagctaacagatggacagttgccttcctcgttcgtactctcattcatttcaaaaacttatcacataaattttaatatatttttcgtttgggcggaattcttagcgtgtgttgtgtgtcgcgaaagcagagaaggacatgtgtatgagtggaactagttctgctgcgaaaggcaaaaaatagacggattactggctataactgaggtcaaccatccgtgcaaacgacaatgataacaaaggcgaaatcgtggctggctgggctgtgctgattgaccgaaaaatgggggaaaaataacatgagcctgcgatgggtgagtatatgtggtggttctctgttttttgtatttgttctactgctgggatcagcggtttgccaatttgcgtgcgatgcgccttcaactatgctacagtttcgtcctgctctctcgtcctggtggcgctccttttagttatccttgatggcgtgatgtgtgtgagtgtgagtgagtgagttttgctgcttctgctgtttgctattcgtagttctattcaaaaacgcttacttggctactgcacatttatgtttctgtttttgggtttttcgctgctgcgttcgcttttacttccacttttcttcgatttgtttgcaatcataataataataatattaattttctgttataacgctagctcgctgattggatgatgcgccagggccaagggctatcgccatcggttgccccagctgctggaggagctgtggtttcgcttagaagaccagcatctgatcggcactgccctccgcgctgtcctcgtcatcggcgccctcgtcctcgtcatcggatgtgagcgatgcggcattattaaccacggactctgtttggatattgaacatgaaattagaatgtgtgctcggatttatgtggccatttcccccgattccaccatttccctgccactaatctaacccatcgccatcgccattgccatgcatgtctaatagcggtcagccgcagagcgtccttcttcgttatttttgtgcaggacgaacggaaacccctttgcagccatttcatgtgttatgcatggcgtatgtgcgatattaataggaaaactcaattaccgatcccctggcaatgtccgcgctgttggtcagcacaacttgtccgtgtgctcctgacaactttaacaaccttaagtgctcggttaaaatcaactcggcccgggaaaccgaaataccgttatactgagagtataggccaagtaaatgggacggcagagataagcagattacgtatacgcaccggagtgcgaggtgttctcgctgccgttagccggctcgagcattgcggcagctgagttatgccagcactgggccataaaagctggcttaaaggctgatatttcaatacggttggatgggccaggactcaggtggctaaccatgggtgggcccgacacagttcgattgccacgaaaatcggttaaggaagcacgagtattatgctggactatttcatccaacggtattccgcattaattggcagcggctaccaattgcagcgaatgaaaaccattgaggattacagccgcccatgagcatttattccgcataatcgatggtcttagtgctctgtattagggtgtatcggtttgaaagtcatatttaaataaatgaatgtttgggaccacaactttaaacattctgctttaaatatcctcatttgctaaatggtttggtttgttagattcctagaaaagtgtgtgtgaactgtgtttctctccactttctgtgttcttcagaaacatcagctgtgtgcaaatagcaactgaccagcttaacccatttccactgtttctcccccgctgattatggccttttgaaactttgttggccctttgttatgacccccgccaaatggttgggttaagtgtttgcatcctgctcccttatcctgccctgcccctcatcccaaccgaatcacaaaatcccatctcgccaggtactcaccgcaattgggtttgccgcgtgtgcgtgtgttggcgaactccactccgtgcttgtccacgcaccagcaaactcccacggaattgtggcactgggtaggcttgtagaatccctggatgtcgcagtccggtgcgtaggctcctaattagttaacaaacgccggagagagaaaaaaaagcgcaacgttttagtggggcaacttgatggggcacaaatggttgggttagtttttggatttggtgagaagcggcacaagcaagttgttgctggatctattttgttttgggtttggggtcgtgtggcgggcgaacaaagtaagaaattatatagttggtatatatatatatatataatactgtatagaagggggtcttccaaaaaggcaaacacaaaaagcattggacagtggcggtttctacagcgggtagcaagaaaagggggttcagagtttacggaaaagttctgtgtggctgttaaaagtgtttaatttgctggcttaaaagttgaagatatagaaaaaacggggtagcgagcacaaaacgaaagttggcaacgaaagcggcgcgaaaaaaaggttacttctgttaactgctgtgtgtcagtgtgtgtgtgtgtgtttgtgtgtgttagggtgtttctcacaaaagtgtataagtgtaagtgtgtcagggtttctatttagctgtcaggcgcttaattatagtttgaaaaaggtttccaacgcgtgtaaagtaggagcaaagagtgtcagacaaacaaacactaagcgggcaacaaagcgccgtccgaaagagatggcagatagcacgacagaaagagacggaaacagaggcagcgacagagatggcaatagaggcggctgagtgaaagtgaaagtgaaagtaacgaaaacccaatgaaaccaaattactctttgcgcgattactatcgcttcacgtttggtttctcgttttcggtcttaggttttctttcaattgacttttaatgtaatttcttctttttttttgtttactataggttgatgtttgttcgggggtagagggaatatacataactaaggcccaggaccccagcacaactcatacgaatatagagagaacatagaagtattagtgttatgtagccagagaaatgtccacctgtacctatctcacctgcaaagtcgccggcgattctccggcgcacagcggcacatggacgatccgtcttctcgaagcatctgcaccattcccgtgtgttgatcgagctatccgtgtccaagtcgcaggtgtcgatgaatggcttgatgcaacgctcgttctggtcatgctccaggtcgtacatctcctgcagcgacagctgcccgtcgttattcagatccaggtggccgaacatccacttggcctccgtcttgcaggcgggcgggaagtgggcctttgacttctggctgtgctggcgccgcttcttgctgtccgccatgatcaccgagaaccagtccagcagtcggttgccaatcgccgtcagttgctgcggcttgcactctgccgatttcgatggataggctgtggcaagaaaatgaatgcattcttgtatcatgaatattataaatgtatttaagaaatttgagttagctattcccttcagacagaaattggtaacctctatgccaacttggaataacctaaatatttgataataccacaaatcaaagtcaaactgcaagtgccagccaaaatgtgttctacatacatagtatgtattacatacactctgtgttaattggcaatgtctcaccattcaagttgctgttcttattgaacttctgctgctgcttctcgaccacctcgttatagttgcgcatcttgtgcttgtcctcctggtacttggagtcctgccaattgccaaataatttgatatgtgagaagaggccactggatattctggttaacccactcaccttcttgtaggccgtgtacttgaggtacttgtagtgcttgttgtcatatttgatctcctcgggcgtgaaagtgtactgggcattgatgtggttgttgtgccggttattgtcctctttgtcctgcaataccaataccaaaaatttaactttgttgcatgtctgtatgtatgtatgtagtatgtgtatgttagacattaacttacattcatgatcgtgttgaagtcgttgttgttgccgcccattatgttgccgctgttcatcatgatgttgttgttgttgctgtccttgtaggcctgctgctgctgctgctgctgttgttgttgttgctgctgctgctgctgctggtccaggctgatcttcttgttgtacttgttgttgtagcccgagatgcgctgcagccgctttccatcgacaatctctgcgaaaagcgttggcaaaatggcggtcagaaaatcgttgaagcagacaaactttttgcagccccaaacaaggcatacttttgctttattttctggccaactgaaaattgaaaattaacgtggctggctgactgactgagtggttttgcgggcccccttttgtacaatgggcgatggaacaatggcgtcggctacttgttagccggcctattaaatatttaacaagtgatgtgccggggcagaaatatatttaaagccaaaaaccattgtttggtaattggaatttttaattgccaagaggatgaggaggaggagggaagaatgctaaatcctctcgaacaaatcgcatttagctgttggctcagtttttgcagcatactttcatgggcaaacaactggcgacgagtaaggctgtcacaaaatatgcatgcaatttattttgtagtcaagggacgtgggaggtccttcgtttttcgtcgtcctgcgactctggccgactgccaggctggagctcattatgcggagcatttgattccactcccaggaaggccgtactatttgtcttagtccgtttgttatggtcgtggaatggaggatatgggatagactcacccttgcagggacagaatcctttgcaggcgatccgtatggacgtcgaatgtatgcaattgtgataatccaatctgcatagtgatgagtaggtcctgttgtcggctccgcacaggaacgtcggcttggccacaggacacggcttgcagttgctacaaaaaagaatgaggggaaaaaaatcagacgaaacaggagcgcagttagaatgccgtctgaaatcagaaaagtaaaactcaaggggcgcaacgacaacaaatagatgacatgcaaaattaatttttatgcaaatgaagtctgtgtcctttccccactctttccacatatttttttttttttttttatgtagtgtctttgtccacacatccctccgccaaatccggcggacaacttgttggacaggtgagcggcagaaggaggggcttgcttatacatttatttaaatatttatttaaaatgcgctgcacgcacgccctggcaaacagtcgagccatgagattggccagtggattgaggcaaggacggggcgcaggacgaaagtttatttaataatttgagcaaatatttaaactgccagcaaactcaaacgaaaaggacttgggcaaggcatataatttagcgtttcgtatatatgactccatttcagcaatgaatgtgtacgtgacccattagaagggggagaccattatccttgtgattcgtgaaattcatacgcttttaattgacatgaccctttatctggtgccaatcaatcatcttttaaactcaaaagaacagcttaacccttccttcaatttagcgattctttttccatttaataaataaaaccaacaaaacgattactccaattaatggttgctactgtcagaagccatccattcaataaaaaaggcttccgcgagaatttttatccttttcgatgtcgctttaattggcctgtcatggattcgctgccactctcttcccctatatcataattttattcagatctatatatatattggtatatatgtatatgtattctcccttgtttgaacttttttgtttggcttcaaataaaatttgcacatttatttttggttgtaccacgccgactgcagatgaatggaaatcaatttgcctaattgccccaatttggcattcttaattagtggatttcgtcgggttttcagttttataatttaaggaaatattaattgaaaattggccaattattcgggtcaagctcggctttgcaacgcatgccacttgtgtgcgtttgctaaatgaatttcatcaagacttgactaaaaaattgttaagtagagaagtagaaaaataatttagaattcaataaaatgtaagcacatttggatttgtcgtagggcttctcgtgcatctgcatatgtgcctcttaagctggccaattccattgcagagccaatgtaaacgaaccaatggccaaaaccaaagtaaatatattctcggatatgcatatccttcacttcccgctgtgtgtgtatgcaaatgtgtttgtgtgtgtgtgtgttttcactacttttaattaaaaattctctcgcatgttcttttgcacgcttccggttcgcttttgtttgccctttttcgccggattgtttatacaaatttaatgaaaattcttaggaccaacagtaaatagtgaggcgaataaatttgataatgcgatccttggccaatgacaacgccaacatcattgtcccgatgacgatgccgatggcgatggcatcttgaatggcctgcccagcatctgcggttgctttgaccaaattgcccatcaaatgccgcctccgtgtctctgtgaaaaatgtgtaaatttttactcaaatatttgctttcaattttgcaaccgaattttcggcgtcctgttggtcttcctttgagcggtagctccacctgctaaaatggctgaagccgacagcttcatgagcacagaccacaaaacagctcagtggtttcgaataactgccaggggcaggccatcacatccacacccacacactgcccactttcacacacacacacacactcacatagctgagttgtgacagcttgaggtgcgatctgaaccatggtatgtgtcctattcaagcaaaatcttcgaatccctttgtagggagttgcagatagaaggcagcaaaagtcaatcgtattatttttaaaggcagtacattaaaaatatattatgagtatgtatatgtactttatctttagtacctttaactcatctactaactgaggaaaaaacaaagggatagataatattctccaacgagtcattacaatacataactatttttattacctaatagtaatatttttcaaggcagataccccctctattctcgcatttgagccactgtgcgatggcatattgttgcaacaaacaatgagcgtctcacacatgagttatggcccgaactcggtctccatctccagccagctggatgagttttttgggggggcaatgggtattgtggaggttgcctcgcattttggtctattagaagtgcccccctatgacgatgacgacccttttactggggcaggtcttttgtttgagttgcgcctgaatggaaagacgagaactggagcagctcctgctgccacgatgagtggcaaatgctctggctgtggctatatggctatatgggtatatggatatgtggctatggatcaaactattgattttgccaacggcttcgtgacacattcatatttcatgccattgacatagatacacatgtgggtatgcaaagcgtggaatatatatgtatatacatattcgtaaaagcaaaattgaaaaggaaaattcgtaaacataaaagtagagggaaaatatgtcaaaagccattgttaatatcatcgctgggagctgggtgaaaaaatggagaatgtggtcgggcgcgtgatttgcctatagattgatttttacacacaaacacccaccactcgcagttgtttgccaagtggattttaattcaattacaggcgcctgtagtaaacacacaaaaaaccagcataaaagcatgaaatccaacgccttacttacttaccacttttttcgcacttttcccgataatttagttttcatttcagccgccaagggatccaaataaaaactttgcgacatctcaattcttgcaaatgcatatacatacatgaaaatgtcgggcataaaatttaactttctgaacacgacaacacaaccgataaactggacgaacataaacaagaagcgaaaacatttttataacactcggatgaaggatgcatttcaaaggatttcgatgtggcccaaaagtccaagaagttggctagtggttgcagttttggggaaaacaaaattggaggagctttggagttttaactggttttaaaaaaaaaaacattttctttatagctttaacacgtacacatttattaatttaatagaagaaagataatgaaaaagtgaaatatcattaaatgcgtaaacaagaagattctttagttttttttgtattaaaacatttataagtatttcttttttcacctgtagtacatggaaatatttgcaataaaagcttttagaacattgatagaatgttgtgtgcgttaaaaaaaaaacatgcaaataacgctgtttttttagggatgtctttgtataaaaatccttgcaaatgtgcgagaaattttatgaaatattacccaatattttgcgaaaggatatcgactgtttgttgctaacaacttccgctcacaacccttttcccgtgcaaacccaggccaatcaagccttgacaccgactcgactttgacttcattttccggactctgccgctggcacacctgatccagctcctggctcctgctcccactccatagcccaaggcactgccccttttggtgtccattctttgtgtggaggccctgctcgcgtgccagtccacaatttgggttagggtcaaagcgataacacggaacaagtcaagggatccgacgacggcacgcgtcaaagggtaaaggccgtaaagctgtcgttgcggcccattgaaccattcagccaaaagtgtgccaccagctaacatccaaacaaccaaacaccaaaaaaagccaacgacgataacaacgcaaaaacaggccaaaggctgcgtgctaaaaattgtagcactgtgaatttattgcggaatttttatacacgataaaacaatttgttattagcatggcgaccgtggaaatcggacgaagttcggagtacgggtggcccggatgccaaaggtgaccctctgtcccgcatcgccaacacaatcaacccctttttgtggacgcgaatttgcttaatgaaatgtaaaatcccactcaaaggcaggcacaaaaagatcgacacaaaagttaaacactcgaataatgtacagagcgagaaataaattgtttgaaacacacctaaaaagttaggtgaagaactgagatatgaaaatgaactggggtcacaataaacagttctataacaatttttctaagtgtactcactccaactcctcgtcgtcgtcctgctgaataacggaaggtcctgcagcaggctgggatagctgctgttgctgctgctgcttatcgccggcggcgatactgttctcgtagaagacatcatcctccttggactcgtcgtcgtcgcccagacttaggctcttatcttcgtcgtcggtctcctcatttccctggacactggcctgggcattgttggtgcctgtggggctggagttgctgctgccgccatcgctgctgttatcctcgtcgtcgttgttgatatcctccgcgtcctggctgtcctgattgtcctgctggttgacacgccgcttggcctcctcctccaaatacttggccttggtgattatctcatcactggaatgtgcaatggtttggcatgggtttaagtttagatggccttcggctcggacctcgcaatttaattggctcatcgggtcgacaccatcccatcccataccacttaccgattcttgtggagctccttcttcgacacgcaaacggcactgaactcgtcctccagcaggcagatttcacgcttcttgcagttcagcggtcggcaaaggtcacctgcaggcgtgcgaatataatttattaataggtcataccatattgtgcatatacacgtatgtatatatatatatagttctccagtgacaacttaattgaccgaagccaggggccaaatggtgcgcaaatcctttgctttgcttggctttgctttgctctactactcactcgagggatcgtgtatccagcgcttgtgctcgcccagattcttgttgctctgcgtgtttttgtttatctgaatgaaagggagagagagaaaagaaacaataaattgtatgcgaaacatttgctagtttaattttgttatttaaatgcataaaaaatgcaaagcgtacacaagccaaactgaactgaactgacgtctgtcaaaatgcacacatgcacacaaacgcaacccattcagactcactgagccatccacacacttactcacacactcacactcactcgcacacacacacggcaagcacacggggcgtatgcgtaatggcagttcaaatggacttttaggacacaatagcaatagcatacagcactgctgggggaaagttgaaaagcaaacagtatcgagtcataggagaaaaatagttacgtgatgggggagtttcacatgagtgtatgtgtgcctttctaatgatgatcaatagttcatctgttatgacaacaaatggagccgtctaacatgggattcatagattaaagcatggaaaaaattcaaatccatctcgaataaaacataaattgctttgtacaatccgaagaggcctctctgcctgccagagaaattcatatccaaatgaacatatgcaaatcggattgcaagctaaaaaatatggcatactcttgacttgcttagttatgcgacactttgcagatttattttaatttaattcaattcagcacgcagcttaagcacgcccacaaatggtgtgtgggtgtatgtcgaagcacacacaccattacactgggccttgtgaggcgaaccgaaatgttattaagtgcaatggtgcgtatgcataatatttaacttgtctataaaatgtatattccactaacagcagctgcgacaacaacaacagcgcctacagctgcaaaataggctgtgaaaaatggcaaaaataagtgaaaaaaaaaacaaaagttaagctcacgcggacttgacagttttgccatggcgtttgccactggccattttatttgggcttcgctgtagcggcggatactgcaatcgccgctgtctgttggcttaatgaaagcgacaggagcgacagaaactgaactgaaacagctgaaagcttccagcatgtcaggctggcacatacattctgcccagatgcacccaaacacacaacgcacacatatacacaaacactacacaccgattcgagcgcgaaatcgctcaagtgcgaagtggcaattgcgggacacacatctactgccaacaaaacgcccagctccgccctcgaatgaccacgccccactccgcccagcgcccttcgaccaactgtaatgcaataaactcgtcccaggacgtggacgcaggcaatttgcatgcgttaaaacgcaatttgtgcgcgtttcctggccgcggccgcaacgttactgccccggttacccaaccttcctcatcgcccattccatcctgttggccgagatgcctcttcccagccactttggtccacagcccgcgcccacacatactccggcacgttccgctgggtctcttcatcgcaacgggatctcctgcagctttaatacgctcgcctttgattgcacggcctatatgcactgagaaaaatcaggtacaatagtgcctgcattggtggcctttaactttatttacatttgattgagagaaggaaagctttcgtgtactaattcttacttatttaactaactatcttcgatttctcactctgtatggacatgtggatctgcggctggtttcgctgattggcctggccggcaatctgtgcggccagcttctgtgtcgctctgtttgttggctttaattgcgctgtgtttgctgcggtgccggtggtgctggtggtactggcggtgctagtggtgctgttggagctggtggtgctgaaatcggcggctgggttaccggttgatgccgctattccctctcgttgaccatgcgattgaccttattgtggcttttctacgggggcgcgtgataaacttgcacacaacgcagctgtgcaaaaggcagcacggtgacatgagccaccagcatggcattttaaaaatgccccactaaactgggtcaaagcaccagctgcaagtgaaacataatgcaacacaggccagccgggcggataagtcaagcaccagccacagatgcaccacccactgggaaagcaagaccagccaccacccacaaagtttgccagccgtttaacctctttgccagatttctggctgtttaagtggctgagcttattaaagcccatttaattggtggtgctctctagcggcgccttccagcgaaaacttgaccctaatttggatggtagttccccctagagaaatgggagaactaggacttgagtgggagtcctgcgagtggagcactccctttttccactgagggaaacattttgagctgcttgttgggcgaaagataaaggcggcattgttactgacgccatttttctgttgttgccaccactgcagccagctgcattgttccgaccagctgccacgccccttgggctggtggccgcccccctttttcgccgcattgtggcaatctgtcaagctttaaattgaatttacgactttgttttcgttgcgggcttatttcatcttcttttgttttcttgtagccgctgcctctgcaatttctagcgatttctttattgttttttttttgcgctctctcttctattttttattatttgctaagggtagaataacaaacattttagtggttgcttgagctcgccgcttttccagctgcgagggaggaatgtcaattttggttgcattatgtaaatgtaatttttaagttggctgtgccccccaaatcgatatccttttcaccgtacgtatgtatatatgtatgtatgaatgtgtgtgtgtgtacatctccgtttgacggcttaagcccggacccaaatcctttgtgctccatttaacttgcactcatgcattaattcaaaccgatttcatcccgattcgatcgatggccatatattttctatcccctggcacataactcattgcggcattcggcgcaatcagcgcggcccaaaaggagcaagaattcgcattaaaacgcaaatttcgcctttttgcaaacgaatctgaattggaattgggattgcaactgggcgttgctcgtcccaaaattgttgtaaattattcagcggacatcgaatgactggcaatgatgcggtgatgctcaacctccttcagttccatctcctccaatcagccatcgccccggtcaatcaataaaatatgaatgtggtcgggactgcgggaatctgcggcaattagagtgtacaagagatcagggttgaacgaggcactatatccattgatatgctaaatgcaggaccccgaaaaatgaccaactgactgactgacttcgctcctaaattatgcacttcacttgaaaaatgcattagcccgttcacccagtcgcccggttgcccggatttatgtgtccgcctggatacgggtgtatatatatacatacatatgtatgcagtggggtacgtggcttgtgtgtccccaatccggccgagctattatctatgctgagtcagatgggggactgagcacataaattgcacattttcgtgcacacaaaatggtaaatcaattcctattactattacagcccagcggatggctataagccgcctgtccggactttgggctggcacatttccgtagcggaatccgcctgttccctggcaggcagcgggccgaatccatcggaatccatcaatatatagctgaggccaaaacttttgaagtggcctaagccaagtgcagatggagcggactttgcgccaggaaattgcattctttggctgggcgaaaagtgtcactaggagtcaggaaaaaaatccccctggttttgcaatcatcattgtgatttggggaactgaaaagtgggtaagttaattgctcatatgtcccattctcctccaatgaaatggacttattagttatggacgagtcattaaaagcgctgtcactgccgctgtcacatgcataaattacaccataatctcattttaatggttaattaaattaccataacggtcagctgtcaaaactgatgtcgcaccgatttctgggaggaaaattggaaaattgcaacggcaataaaaagaataatgcgattcgtgtattaaataaaacattgcaagccgcattttgcacggagcatcaggtttcaggtttttggtttcatgtttcatggcggcaggacaataaaccccggggccacctggaatggaacgtgatccccggaaaggcctagcctggccgttatgtttatgcatcataaatgcattttgcagctggcagccaaccgcattgcagtcataaaacatttgcaacagcagcagcagcagcgaggctgcaacaaattgcaactagtgcaaggactacggcaccatcctggccaacaaaggccactaaaatgtgcttacctatgtggaagagatacactcggttacatggttgcaattcctatttataaacaaagggcagaccacgtcgagcactcttcaaaaaaaaaaaaaaaaagccacactctggaggattgtttggtggcggagtggtaaccatctgattgctggcattttttatgtcctgcatttggtaaccggaaacgtgcatctgtggttgtggctcagagattggaacaagtttattacaaatcccggcacataaacacggcccaaggtgagtgagagatcctggtctccgataaaggtggaaagttatgaccgggatgctgaagggattccggatatgaaggaagccaacgggtctaaatgcattacggaaaatcgattatgtgccattcggcagctgcaactgcttctgtattctgcctctcttctgtggccattaatcagtcagtcaggcattacttggccagaaataggaactcaactgaaccgaactcacagtgttatgcgggcagagccacgcccctttatctccccaccccttgccatgtcctaatgggggcagttaaaagctttcaactcccagtgagcaatgtgctccggccacgccacaaaggccacagatatggcactgaatgcagtcggcgacgagcgttaaatgctcgctccgtaaacgccaatcctttaataagccggccacgcccagtcacacgctcccgcccctaaagtggcgtgcattttcaccgattgaatagttcaatcaattagttaattgcagttctgctcgaccggagtgcactgcacaaatcgaggcacttagcagcggtcattagcagggcgagtccagagtccttctgcggatccccattccggatatgaatgtgggtgtgatgtgattgccaggaaggagccgagttagccagctgccagtttgccagcttaccagttggccagtttgcagctattaaagttggccaggaaaccagatagctggaaatgacactggccaactctgaatccgacggtctgactcacgtgacttgtgcacagcaaatggggagagttcaatggtcaagactttaggaaatccttttcatttaaataaatacgatggaaatcttatatatctgtttttatataatgataaaataaagtcacttaactagattttctgcaattctctctcaactagtttaattcattcatgaataccatattctagccacagtacataaagaatttaaaattaatttaagccttgccacatattgcaactttcgtttatttaagcgtattgcattttttcgctgtgcagttacaattaaaaatcctttagctttggcacggaaaagctggcaaaatggcactgcaattcattgccacacatcacgaccagctgtccgcctttcgaggagaaagtgcaaaagcgggagtggcagacaagaaattgtcaacccatccaacccaacccactgcaccccacctaatcatccacagccagcagcaacttgcttgccaagcacacagagaccccgaatgaagtagcggaaaatgaagtttttccgagttacatcggcaactcccagacagagcaaacaaaaacttagcaaattgcaattcatcgctcacgcaaaaggggctaaactgtggtggtggtgctgttcgcagttgcgcgctcttaatagaaaataaaagcaaggcaaaaatcatgttttattttccgctttacccgcccgacattcccattcccattcccattgccattccctttcccattttcattacaagccattcagacggcgcaccctggattttcctggcagccattacagcccagcaaaatggcggcggcacccggaagttggctgttgctgctgccctctctttctatccgctgcgtgtgccctctcactcccactaccatgcccactttcttatcctgtcgaactgcgttgatgagaaatgacaggcaataacgccgttagccgtgctccatctgcatttatcataacttttgtgtgttctttgctttgatggcgctgctgtggctcgcggttattgttgctgtttgtgttgttgttcgtgtcgttgggttttgtaatctctgttccctgtaattgcccagtgctctgcctgttgcctccttatcagtcttagcacgctttgcgcttcgtattcatagagattcagcacttcgcggcggcttcagcgctcgtaagtatgcaatgatttctggctcggctgttttcttttccactagttagactgcattttcaacaaggaacagtactttgagccataaataatgctcaatctggtctcttagactttaatggcatatggctgagttacttgccacttgacttattatgacttattatgccctttagattatatatctttttattcccacaaaatgtataaaacagaagttaaaggaagttattataatttaatatttgtatgctcccattatataaccattaattttaagtaagcatagtagtttactgctccttaatatggccaaatcaaaaaaaatgaaatatttactcgagtagtttctcagcatattgaatatgcttgtaatctccacctgggccacactttctatgctcgaactatactgagtcccatttgatagtagtggagctgtgtagttcagtaccaattttgaatgtaatgtaatttatgcagcagcaaagccgattatttgcaccggtccaaaatgcatccgaacaaaattgtaatgttatacacccacaaacgaagggctaaataaatatttgatttgctttattgcatctggctattggtagctgcataattgaacgacgaatgcgattaattggcaaagcaaacagcattcgaggccattgaattatgggaattgcgaatgctaggcttaacaatcaaaattaaagccgggggatttttaatgcgagtacgtgtaataattatccttaacgaagcgataaatgtcgatcaattaaattatgactgctaattaagtaagcacacaatttttaccgacgcacttgcatttgcattttcagcagctctatgaatgtgcatccaatttgcagaccgagtggtccacaattttgatgacattcgcacaagttgtgaataaaaaccgtttcgagtgctttcgccttgtgcaggcagtaagcagcacgcatacgcactgttggccagcactttttgtatatcgatgtcgactgtgagtgcagtttgctaaagtgcttgccaagagctgagctcctttttttcgttccacctaatgcctgacacacacacacacaaattgaagctctccaggcgatgcaaacgcatgccctccggattgtccttgagctgtcagtccgccagcaacccaattcccattccatatttccatactaccgaaactttgccatgggctctgaaaaaagctcgaacaaaaggaaatgtacgctctgggccgagggatatggtaaatggtaaatggcagaggaggattatatcagttctctcgcttttattttttttttttgctttttttggccaggtaatgcgcccataacggattaggcgatatcctcggggttccatctctgcagttctgcaggttttgggtgctcaacgcaaacagtttccggcgttgcccggataattgttacaatatacaaaattttcatttagtttatttgcccagcgacaacatgtcagctcagcagcaacatcagcaaacaacaaacaggcgcgcccccaagtcaccaccatgggcgaaaagtgaataatttggcatcagataagtagattcgtgttttactcgactaagaatgaactactttagcctctgtacagacttatagactctattctagggacattacattcgaattatgccaaaaacttgccattttggcccattgtgcagctgaacgagtgtttgtgcgcaggaaacttgtgtatttatttgacttatgtgacgctgtaaatggggagagtacgagtttgtacgaatgtggggcttggatgttatttaaaatgcagacatgtgtagcctgtagttgctgctattgctgctggtgcgccattaaaatcccagcaacattgttaatgaacttttaatgactttttgtgagtacacacactaaaacaatatcaactttggcctagcagggtgtgtatgcgacacaaatcagagggctttggttttgtgtattttttttggcccaaccacctttttttctgtatgggaacaagcgtgaaatctaaatgcgaaactaacttttgacacactactgggacaacagacgcagtgcagcaaagtcggcaagtgcagcaggaacactattaatatgcgaaatttgaattggattcgagtggctgaaaggcccgaggaggggcaacttgtttacccggaagcccactgggcgtgtggtgcgaacgtgtgcagtgcatcttgattaacaaatcaactggaattggaatgcgattgcatgcgattcatcagtaatcggaaatcttggctgcgggccaaatggggtcaccatcaatccagcaatcctgcagtcctgttacccccaaagcaatgcgaagcaccttcgcctccatttaaggcaaataaatccatcagccagggggaatcccaagtaaatgagccttaaagtgggttcatatgtaccggaaagtgatggaagaatgttcaccaatacatggagtggaatccctaccaattgggatggtacagaaatagagttccactccttgtgctatgagctgcaaaattcagtttaatttataaataatgcagtacaagatagaaattactattaggggatgtctcttttgtaatcaattgaatttttgagtgctggatattaaattcatcaaattagtttctcatatagaaatgggaagacacgaatattattaatgacggaagcaattgttaactgcaagtcatttgtactgaaaagtagattagccatctaaaaagtaaacaaatgcgtaagataaaacagtttataggcagcaccgtatgataagaaattaggtttagttccttctcggatttattatcatgccctctctttcgctcgcttatcgctgatatttaaacgcgcgcttctctccacgatcgcacagtcgtcgtcgagccagtgttgcgaaaggtgtgttgtgtgtctgctctccgctgtggtgaagtgtcgatcagctgatttcagcaaacaatttaattgatttgttatcagccggctaattatttacattttatagagtgcaaaatgagtacagccaagtgggagaacaacgaggagattaagatctttcgcgaatatcttcgcataccaacggtgcatccaaatgtggattacagtgagttccaatgggcatgtatatctttatgaggctgcgataagagtaccctgatctttatgaccttgccataaaatgtgtctgctatttatagccgtttgcacggaattcttgaaacgccaggctgccagcttggacctgcccgtggaggttatctatccggtgaacgagcagaatcccgtggtggtgctaaaatggcagggttcccagccggaactgccctccatcattctcaattcgcacacggatgtagtgcccgtttttgaggagaagtggacacacggtccattcagcgcggatctagatgcagagggtcgcatctttgcgcgcggatcgcaggacatgaagtgcgtgggcacccaatatctgggagctgtgcgtgccctcaaggccagtggctatcaacccaagaggacgatctatctcacttatgttccggacgaggaggttggcggccacctgggcatgcgggagctggtaaagagcgactacttcaagaagctcaatgtgggattcagtttcgacgagggaatctctagtgcggatgaaacctacgctctgtactacgctgaacggactctttggcgtgagtaggattgactcatacaaacaatttaagctagccatgttttcctgcagatcttcgtttcaagatcagcggaactgctggtcacggatcactgttgctcccgaatactgctggcgagaagctgaactatgtggtaggcaaaatgatggagttccgcaaatcgcaagtgcaaaaactagctgacgactcatccctcgaaattggtgatgtgaccactgtgaatctcacccaactgaggggcggagtccagagcaacgtggttcccccattgctggaagctgtatttgatatccgcattgccgtcaccgtggatatccctgcctttgagaagcagattcgcgactggtgcgaggaggctggcggcggcattgaactggagtttgagatgaaaaacccctttgtggagccaacaaagattgactcgtcgaatgcctactggctggcctttaagaaagcactcgatgacctgtaaggatgagaagctctgacaaaaggcatggctctgatatcctttctccttgtttctttcagtggcctcaagacacgggttcgtgttttccccggcgccacggacagtcgttatattcgctacgcaggcattccagctctaggattctcgcccattaacaacacccccatcctgctgcacgaccacgatgaattcctgaaagccgatacctatttgcacggcattgaggtttacaagaagctcattcctgccgtagctgatgcttagcgaactcaattcaattatgaaataatgcatttaatgcttacttgtcgatgtttattgtaataactttaaacaagcaggcttataaaaacccatttaaataaacaatgtatgaataaataagccagtccatagtccataccattaatggtgagcaaaaaaaggaaatttaaatgaaaatgaataagtttatggtttactattatggctttgctagataacattaagctcttagcgcaaagatgaaaatccgcaaattgtgggctcttctaatcaagtagcttaaagtcaacaactgataatgccattaagtcaatccacactcagacttcaaaccaaacagcacggtggattacaagtcagttcctttagaaccacggggcattcaactcaaaatgtgcacttgcacggaacaatggaagaacgacgaggaaataatcattttccaggagtatttgcgcattccctcggtgcatccagacgtggactacagtaaggatttgtttttccgctccttggattttgttatccctatttcccttgcagctgcatgcgtggagttcctaaaacgccaggctaacaaacttaatctccgcgtggacgtggtgtatcctgttgtgccttcgaaaccggtggtgattatgaagtggctgggcaagcatcccgagctgaaatccattatattgaactcacacatggacgtggtgcccgtgtttcccgaaaagtggacccatgagccgtttggtgcccacatagacgcccaaggccggatttatgcacgcggtgcccaggacatgaagtccgtgggatgtcagtacatggctgcggtccgtgcactcaaagccagtggctatcagccaaaaaggaccgtatatttgacttttgtgcccgacgaggaaactggcggacacatgggcatggctgaattcgtcaagggtgattacttcaaagccatgaatgtgggctttagcctggacgagggcatcgccagtgaagatgacacttatcctgtattttacgccgagcgtacattgtggcgtaagtcttccatttgcatcagtagcaatatattctgattcattttatacccctgcagaacttcgatttaaattcagtggcacttcaggtcatggatcgctgctgcacaaaagcacggctggcgaaaagtttcactttgtgatggataagctgatgaagttccgagaaacccaggtcaagctactggccgaggactcctccttgcagtccggtgatgtgaccactttgaacctgacccaactcaacggtggcgtccaaagcaatgtggttccccccgtactagaagccacttttgatattcgcatagccatcaaccagaatgccgatgcaatggagaatcagattcgcgagtggtgcaacgaagtcggtggtggagtggaactggatttcacgctgaagtgcccctcggtggtgaccaagatagacgactccaatccctactggctgggcttcaaaaagggactagatgaactgtaggtaaacaaagattgtgtagttttcacttcataatttgttgaaattttccagaggtttgatcacccatacacgagttttccccggcgccaccgatagcttctacgtccggcaagtgggaattcccgctctgggattttcacccatcaacaacaccccggtgctgctgcacaatcatgatgaatatttgcgggccgacacatatctgcacggaattcaggtgtacaggaagctcatcccctctattgctgattcataaaatgttcaagcgaagttccactcataaatggaaatcaatatgctacaattggtcttatcgcttatgagtaatgtttttggctcgatgagtgtaggaccaaaattaaatgtttaaatggtgtgactactacaaatcatatctgtttctaaacaaatgaaaatcacacactgataacacgagtttcagaagagagtttttgtcatggactttgccctcattcaatatccaataaatcgtcacaactattgatatcgttctcaaaaactaacgtaaccttcacgtaaaggggttgtattttatatatacatcataattatcaataattacattaatatgtattctattttcttatcaaaccaaatacaaattataataacccattttttcgcagaccataaacgacggtggttgagttttattggtgttatgtgaactttatcgaattggctaccgtttgctattagacatttgttttggtagaattttgtacaagaatatgtgctgttatcatttctataacaaccgagtttgataacgaactcattatttgataataatacgaagccaaggccataaaaccaaaatcacccaacacacaaaaatttctgtataagttcattttttgccaactgcggcacattcgagtttggtgactggcagcgaaaacatatccacaaaatgagcaccgaaaagtgggaggacaacgaggaaatcaaaatattccgcgaatatttgcgcatagctacggtgcagccaaatgtggattacagtaaggattccccaaggaattcacagaagagcactactcatgtacatcttaacttctagccgaatgtgtggagttcctgaaaaggcaggctcacagcctggatcttcccgtggatgttatatatccagtggagaagaagcctgtggtgatcatcaagtggttgggcaccgaaccggagctgccctccgtcattctcaactcgcacatggatgtggtgccggtgttccgtgacaagtggacccacgatcccttcgctgccgatatcgatgaggagggcaggatctttgcgcgcggtactcaggacatgaagtcggtgggcacaggatatctgggtgccatccgcctgcttaaggcaagtggtgtccagcccaagcgcaatttcttcgtgacctttgtgcccgatgaggagatcggcggcgagctgggcatgcaggagttcgtcaaaacggaatactacagcaacatgaatgttggtttcagtctggacgagggcggcaccagtgaaatagatctgttctatgtcttttatgccgaacgtatgcgatggggtgagtaatccttgagacacatctaggactagaatctaaactatatcccctctttggcaggtctcaagctgaatttcagtggaacctctggacacggctccatgttgctgcccagcactgccggcgtgaaactgaactatgtgctcaacaagctgacggagttccgcgaatcgcaggttcagaggctggccaatgatcagacaatcaacatcggtgatgtgacaactatcaatctcacccagctgagcggtggagtccagagcaatgtggtgcctcctcatttcgaggctgtcttcgacatgcgtctgtccatcaccctggatgtggttgcctttgagaaacagatccacgattggtgcgaggaggcaggtggcggcatcgagatctccttcgacgagaaggaaccctacgtggcacccacaaagatcgacgactccaatccattctggctggctttcaaggctgccaccgatgaactgtaagtctgaatcgaatgctcaacaatgcgtgttcctaatacgatttgtatgtttatagtggccttaagatctaccccattgtctgccccggtgccaccgacagcaggaacattcgagctcagggcattccagccttgggattctcacccatcaaaaataccaccatgcgcatccatgatcacgatgagttcttgggcgccgaaacttatttgaagggcattcaaatatacaagaaaattttgggcaacctagcgaatgtctaaaaactaaatcgaaataatacatgaaaaccttatcaaaataaagattgatgattttgttataagttagtacaaaacttcctggccttttatcttatctcaacgaataccttaatcaacttaagatctgaagaatacaacttgctatccttgcgacagcaagtagataatggatgtatctacattttgctgtatcatcatagatagcaagttggaagactgggaagcccattaaatccaaaataatcacttgattttttcaaatcgaaggtcatcaatcaaagcttcgtcattttaattgaatttgtcataattttacgatatgatggaaaatattgaaaaatacatgacaacttaccaagaacttgaggtttcaaaggttgaggttgcatagataatacgcaatgaactcatttctgtgtaagttgcatagataatacataatgaactatttgccgcttagaaaagttacttattcggataatagacgtgtgggttttgcagataagggcgttactatcgcaaccacatacacttttgataagcatttaaattccttgaccataaacatgaaagcaatcagtgtgattataaaagcacagacaatctttgttgcagctcagttgctgatgacagaagagtgtcgaaatgagctcggaaaagtgggaaaacaatgaggaaattaagattttccgggaatacttgcgtataccaacggtgcatccagatgttgactatagtgaggacttaattttaattctttaaagtttgcgttataatgtctttcaatgtctagctgcctgtgtggagttcctgaaacgtcaggctagctccctaaatcttcctgttgaagtggtttatcctgctgttcaaacgaagcccgttgtgatcatcaagtgggaaggaagtcaacccgaactatcgtccattgttctcaactctcacacggatgtggtgccagtttttcgagagaagtggacccatgaacccttctccgccgatattgatgaagagggtaggatctttgcacggggtactcaggacatgaaatcggtgggcactcagtatctaggagcgattcgcctgctgaaagctagtggcttcaaaccaaaaaggaatttgtatgtgacctttgttcccgacgaagagactggtggtcatctgggcatggcggagtttgttaagacggattactacaagaaaatgaacgcgggattcagcctggacgaaggcgccactagtgaaagtgacgttcatcatttgttctacgccgaacgtttgcgatggggtaagttccataaggatgatgatgatggattggggacattaccgtttcgctttatgcaggactcaagctgaaagtcagtggaacttctggtcatggttcccttttgctacccaatacggcaggagtaaaactgaactatctggtcaacaaactgactgaattccgcacctcgcaagtggagaaccttgcgagagattccagcctcagcaagggcgatgtgaccaccgtgaatctcacccagttaagtggcggagtccagagcaatgtggttccgccacttttcgaggcggtcttcgacatacggattgccattactgtgaatgtggttgcctttgagaaacagattcgcgattggtgcgaggaggcgggtggtggcattgaaattgatttcttccagaaggagccttatataggacccaccaagctggacaattccaatccctactggctagctgtcaaagccgcaatcgatgagctgtaagtaccgactaaaaattaactataatggctaatcgaaatcctcctgtgttttagtggattgaaggttcatcccatcgtttgtcctggcgccactgacagtcgtttcattcgggagaagggtaccccagccattggattctcacccattataaacaccaccatgcggatccatgaccacgacgagtttctgcaggctgatgtgtatcttaatggcattgatgtgtacaagaagattattcgcaatctggctgaagtctaaacaaaatgtttgaactacatggatcgtggctataataaagatgggctaattactaaagtgtgcctcgtatcttcattttagagagtaatcttatcaaaaaaaaaaaaagattcaagagtttaatttgaaattccgtgtttatctcaatattgtttgttgattctttgactttcgcctccttgatcaagatataaatgattctgatgggaattctgtagcagattgtcaactatactgcttcttgtcactacctcgactgccatccaaagtgacttgcaatatagtcagaattggaagagatctgccgcccattgataacgattttcttatcatatacgcataatcacttttgtggcacgatccaaatgcatataaagacagcggatgcctttagctgcttatttctactttaccatcctaacgattcatattaaaaatgagtgccgaaaaatgggaaaagaacgaggaaattcgaatattccgggagtatttgcgaattccatctgtacaccctaatattgattatagtaaggtccttattttaatatttccttaaatgcattagcactattcatttttagctgcttgtgtggagtttattaagcggcaggcagattccctcaatctgcccgtggaagtagtttttccagctgttaaatcaaaacctgtggtgatcattaaatgggaaggaagccagccaaagttgccctcaatcattttaagctcgcacatggacgtggttcctgtattcccggaaatgtggacccatgaacccttctccgccgacatcgacgaggagggtaggatctttgcacgaggtgctcaggacatgaaatcggtgggcactcagtatctaggagctatacgcctgctgagggctgatggctttcagccgaaaaggacgctctatgtaacctttgttcctgacgaggagattggaggcatccatggcatggcagcgttcgttgaaactgacttttacaaacaaatgaatgtgggattcagcttggacgagggtggaactagtgcttctgatgttcatcacttgttctacgccgagcgtatacgatggagtgagtagcccgttcagctttcacatcagttgattgaacttcccattattcagttctcaaattgaaagttgctggaaccgccggtcatggttctctattgttgcccgatacagccggagttaagttgaactatgtgttgaacaagctgacggagttccgtgaatcgcaaatccagcgactgaaaaacgacaaaagcctgagcatcggggatgtgaccacggtgaatctcacccagttgagtggcggagtgcagagcaatgtggttccaccgctttttgaggccattttcgacatacgtctagccataaccctggatttggttgcatttgagcgggaaattcgaaattggtgcgaggaggcaggtggaggcattgacatcgagttcccactgaaagaggcctatgtggcggccaccaggctggatgattcaaacccctattggttagctttgaaagtcgctctggatgaactgtgagtatacgtcagatacaatagagaatctttaataatgtatcctttttcaggggtcttaaagttaagccgatagtgtgttttgcagtcaccgattgtcgttttattcgccagcagggaaccccagcaattggtttctcacccatcataaacactacagtactaatccatgaccatgatgaatttttaagggctgatgattatttgaatggcatacaagtttacaagaagattattcctaatctcactgaagtctagccaatgtcttctctctgtccaataaaactttgttgaaatactggaattttaatgttcttaatttaacatttattagtcaagcaacatcaacatcgggtaatgttgagtttacataaagataaatctgtcgtaacaatacaccttgtttaaccaaacactttaacgatattaacaccgccttggctttgataagaattacgagctatcagataaaaatttagaaccaagtacgaaaccaaccgagttcccatcaaattttcacttcaccttaggggaaatttcatcagaggaatgaacgtggagctttgtctagacgaaggtgtggttgcttccaataagacccagctaaacggacccttcgggctaggtaatatctacttagtgcatagattggaatttcctcataaatggccaaccaaactggtttctctacttcacaaaggactaaaagtttaagcctgtgtttgtcctgtcatgtgacaactttggatccctgccctcgggttcgtctccatcaactcaactatacaatgatactggtgctcgaccataacgagtgtgtccaggcggtctcctaaaacgaactcatttcggctttatccagtggcggcgcatcgcgcatacgccccattgcccgccgaactaagggctgtcatcgatgtgacagcaacgtatagcgagtttgcgagacacaactggcaagcggacgagacaggtggtagtgagttttgtcagttagtcaaacaaaataaattttaaggccaccatcacctggaagcacagcgaggggtcgggtgttaagttaaactgctgcatgtcagtctctgcaaattgtcagttgggcagcacttcggaatgtctgacatgtgagtggtgccaagggcaataaattatgctggggccgcagaatgaataatggcaacatgctcacgaaaggaccctctcgtacattcccaccccccgctgcaccactcctttttgaccatttgtgtcctggctgcaactgtgacccgtgcgtgccgattagacatgttaatgcatgtgtcagggcaatgaaatatgtattgatggcagtcctgggggagatgccctcatcctggtccttttgtgtgaccaccgcccggaattatgacaatttatcaggcgaatgtcagttttgggtggctgatgggggggggggggggggctggttggtgtgcattccaaatgctttccacgcaattaacactgaccattagtggcgccagtttggcataatgagtgcagtcgacaaggtccagccctttaacgctcgcattaccgctggcaacttaatgcatatcatttttacttttaatgagccggtggcagttggcagcacagcccaactcaccttcgtccgtcgtccttcgtccttacaaccttttttattttctattttcgtcctccatcgcctgctgtctggtcctcgcagaatgcacttaatgcaccaagttttcgcagcccacctgccatggacccacttgaaagcaagttctgggttcctggttctggtttttgggtcctgtgcttcggagcttcgaaactctgggctcactttctttttcgccgcgttccactttgcattttaaatttccgccaacttccataatgtttgtgcggagggagtggggagcagaaagtttggcaacttttacatttcaattttaatttctttggcccacactcgatgcaaaaccttaagccaaacctgagcgaatttcttaatggcccactcacactaattagggaatccagaagtttcagagcctttaaagatctcttcatgttcttgttcttttttttcccggcaagtgcttcacatttgcatttatttcggcagcagcctcgactttttttttattgccatccgaagtttatgacgaataaaacccaacaatcacaatgaaaaactcgttcctaattaaattcaatttacttgtgactgctgcggcccgatgtcccgaaatgggctggctctcaacattatggccgtgcaattaaaatcgcagactaaacgagctaaggcgggtatctatattgtgtgtttttctaccaaacagcaggggatacaatataaaagcaatgtcttctaatatacaattaaataaaacgtacattgaacagccataagttcaataagtctttaaattgatttcggtttagcaagtagttggttttatttctacgaaatgcatatgcctattttttcgacctgagctgtatggctatatcctcaagcgcaaatattatatgtacaacatatatttcgctggggacagtaaagtgttctaatgccacacacaggcaattgccgacgccttgtttcccaatgttgccacagctgcacagtgggccacacaggtgaccaggcgacaggcatgaaaattaattttaaatgaagaaaaaaagagtagagggatatatggcgctccaagtggagtttaatatgccgtagatcaaagtcaggccgtaaacgagatcccatttgccacacacacagacatcgtgccattgtgatgcaccagatgagagaacgagcatccgcatcctgtggctgggataataaacgtgggttaggagttaggaccacgtcctgtagcgacagcagctgactgaaaagtgtcattagggcgcaggcacgcccgcacgcactcacacgcttaataaagtcaattgaagtctccaagccgcctatatgtgtgtgagtgagtgtgtgtgcgtgtggcaaataatttattttgtcgttaagcttaactccagccattgcggaaaaaagagaagcaaactaattaacttgtttagcgccaaagctgcgcaatttctacgctcgcagcttaagcttaagcgccactgccgcccaactaatgagctcctgtgcgccacacagccatctatatatatatatatactatactatgctacactctactatatactagaatacagtacagtaatcggttgtgtgggtgcgacattaggggagcgggttttcctggcaaaattcttcttaaaagttgcgcctgattaagcccttgcggctgcatgggtgaaagtgggtttttggctgtgcaaatggctcttgggagtcaagcgtctagttttgccacacggtctcttcagccaaattccaacttccacttgtggaaatttattcaactacaagtagttgctggaactggagtttagcgactaattgtttataatttgtcttcacagcgttagcttgcacaaaataacttatatttttcaaagaaaattgtgcgatatgtacatagaatacttaagttcatactcattttgaagggaaatttgttggtaagtaaaatattttagaattaagttcttagtgctactgatttatttaactcggaaaggtaatgcaaactagtaacaatcgttagagacgagcaatgtggtaagtatttgtatttgttcctcgtcaaatacttccttcgaaagcaggaatttcgacagcagcatcttttctgctgctgcgttcgctgtggcagagcaaactttattgcatacgccacggcgcaatatgagcccgtggcggaaatggcgttgcaagttaagccaaagggggcaattgggggaaggcaggcgaggcaagagaaacaagcaacagaaacagaaacagctcagaacatgcaaaagcagtgcaaacttggctttctgcgtccctcggctgcgcttcaacgcttcgcgactcggcgtcgtcgtcgtcgtcgtctgctgtgcgggccagcaattgcaatttcatttccgttcgctggcattttattcccttttttggccagcccgccgtgtttgcagtcgccgtttcgtttattttcgttattttcgtttattttcaagaaataagtattttcgactcagcctcagcatcagtttctgtttcagtttctgtttttgttcggtcttgttttttatacttggctgctgcacagactttcgcgcagatacggtgaaattcttgcataaactttgtgccgagtcgctatctaattgaaacggagcaaaggaatgcagttgcacttgccgcggagtaacaaagtgcaacaggaagtgggagcgacggcagctgcaatcgaattggccacgaaaatgcaaaatgaagctagaataaaaatttaattttcccttcctgtgtgattggactgaagctgagtgtgaggcaatgttttttctcgcaacaaaaaataaaaccaataaaagcagaaaaagcagaaaaacaaaaaaagaaaaaaagaagaagtgccttcagctcggcttgctgccaacagaaagtcaatcagccaagattctgttcaggctgtcaaagtttagaccttgtttttccacttgtcattgtctgtttccggttttctaaggcaccctcggcccagctaattgcaacttgaatggaaaacttttggcccgcctgtgtgccattcagaatgtgctttattttcatacccgtttcactaacagtgtttgcttttttagcccaaaggcagcagttcgtcattggcaagcgctgcgtatacgcaatattatttttacaactgtcagcagttagcctggaaaaactttgccatgagccaactttgcggagcgaatataaactttcgttgacaatttgtcagggatttttgactatttcgcaggaactcgagactccagttctggggaaactcaatgctgacttggcggcagagacaattttctgaatttgataactagcggaaaaactttgggctgagcttttagtttttaagttttttaagaacataatatccgtcttggccccaattttttgccgttcacgtagctcgcctaattgcataatttgtatgcgggattttgcggctgactgcaatttcgttggaataaaaagttttatgcacttcatgtccctagtcgacgtttcgtatttggcattgtgttttgcttttgtgccgtaaattattatcgcctgcatgtgggccgctccttttccctgcttttgggccaaaggatgtaacatcctgcacagctcttcgttaccgttaccaacttgccaactgttattatctgtctccctgctcgttcgtacattcacggctccttactcgctcgctcgctctctctctctctttctccttctctttctttgtgtctttctctcttgccaggatcctaaattccgtgtgtgtgtgagagttatcgcatacaagctataaactcacagtcgaagtagcgaacgttataatttatttatggtaatgcgtgcgcacacacacacacgcagaaaatgtctctggcagaaagttttatgtgcgccatacctcaggacaggacctcgcaccacacccaaaaagtcgtttcgtttaacgtccatgccgaatccctttatctcgcttttaattttttccgtggcaccttgcagctgaaatattaaatcaaccatttttcctcgcaagattctcggctttttggcaccggaaaaatccgccagcgcgacgcgacatgaacttcattttggccatgtcaaatgccaatcacaacaagaagagaaatttaatatagcaaattgtaatgtcaggaatgttcgtcaacaaagtcaatatcaagatgagttctttgtgcaaatttgtgtaagggcaagggcgcaaaccaaagccaatggccgacggcagaaagtctgcgagaaatgagtgaaaagcaaggtcgccagcatcacgcattacgtatacgccgtgtgggcccgcaggatatcttttgacttcgtttttgagtggaaagcattttcattttaatacttttccttactttttcattgtgaaggcttattgaatttgagaaaaaccaaccgaaatcaacgacaaagtaaattttacaggaccaactaagctttaaatggggaagaaagtacaatacattttaaagtaagttctttctgttcttatctatatattttttttacatctaattttgttacttgaagcccctatggcgcaccacttgattgtacacttccaaaagattttttttctaggcttttgtgtcaaccgcagacaaacaattaatatgcataatttgtaacggttttcttcgtctcgaaatctcagcgaaactgctgtcagcaaacgctcgccgagtccttgaatcctgaggccataaataatgacagcttaacaggctggctgatactcaaccaaccgccagaccatgcgacataccatttgacatgtgcttagctgccataaatccccaatgcctctgctccccgattgagtttgtgccgaatatctggatattgtgtcgactcgtaattgataggccaggcgacagattcgcatcttcaactaggtttcggttattggacaagcaggcgggttgcctcacctctcgaaaactcattagttgcaatatgtggccagatatcgtaactggaccaacccgttaggccatcatcctgcagctattaattaaaattgcacaattctgtctcaggcatccttggctctatggctcgatggctctatggctccttcgtatcatggctatgaaaatttaatatttgcccggcagtaaatacagatgttgctggagcaaacaagaactgacaaccacacacgagcagaaagctcgtcttacataatcagttaagttgcacacacatatgtacgagaatctcaatggccggttgtagcagtatcctgctgcaaatcctccagctgtttggggcctgccacacaacaatatgaaagtgaaaaatgagtttgctcaagtttagctcccaacctccccgtttggtggaaaaatattttagtttcgccttagctgacatcgaagttttgttgcctcaaaagcaatttgtcttattggtggggtcgcagtgcaagatttatgaaacatggtagtctgctgcagaagaaaccatgtggagtagctcttaagcggaacaaatacgttttgccccgaattcgagttaagcggttaattagcgttgatgatcaaaggaaaaaggcaggctcgtatcctgcgtcctgcggttctatcggattacgtgttcatgattgctcattacaggcgcagaaaaaaggtgagcttttaaaaccataaatattgaaaaaaaaaaatagttcaaaagttcccagttatcgatcattaaaaagggcaagttaaacaggggattaatcaattataaatctcaatggcttttaaatgaccatttttatggcagcacattagttttatgctaatttctcagctgcaataacaattgatatttaatttttttttgcgtgtgtaagcgattgcagtactttttaaccttagctgccagccatttgccattcgcaggcagtccgtgcattcgctcgcacacatgcaggcaatttgctaatgtgtacgtgcagcaggactcgactcctgccacaaagaaattaaggatggtggacggcgaaggggttgcgattggcaaggacgcaggccacaatgcgataagggagaatcataaagcagacgagagcggaatgcacaacaagcctgataagtgggcgtggatgtgggcgtgggccggtgaataaacgagtgaagtgagtaaagtttgcagcggattcataagttttcctgctcgtttcggttgcttttttggttcgtcgatttttttttttttttttttttgggttgagaacagagaaattggtatgtctagttcgagtcatattttcttcagagcaggagctgtgtcactcctgggaaattttgcatcgcacaaaaggcaagaaaattgctggttgcagacattttctgagctgccggtgctctgttcccttgctgttttttcggctgcgtgctggcaatttatgcaacagtttgacaacataaaagtttattacataacttgcactacactacggagaggtcaaacggatgctgagaccagacattatccatctagtgcccataaaaatggattttaagccactgaccagagggaggtgttggatctacaagtaatgctgtaattttgccacattctgatttagttttttcctgttgggcacacgagaggtgtgtcggcgggattatatgtagtacagacactatactaagtggcgcttatacaaaattatgcatatcaactttatgcgcctggcagctatttcacacacacacccacaaaaagccaacagctgagatgtttgcacacagagcagtgcaaaggcagctatgttttgcatacattacgcatacgcagtgtgtgcggccattgtgtaagatacgatgctaaagtctgggccccgggccccagcttatttccagtttattccccattttattggcattttattttatgctgcagctacacattttcccagcgctcaaatcgcaaaatgcacaatgcaaagatttattctgtgctgacaaacagagcatcatttgctagtaatcgatggataagagcaactgactttcagacaccagagccagttctgccgagtgccggctgagtttgtctggctgattatccatatggatggatgggatggagaactatgaatgagtgcggattattgcttagtcgacaggcaggcagacggaaatgtgcgcaaatcaagcgaattccaagcttgctaagctaatttattatcatttttacgactaatgcaaggcttacaaaacgaatccgaattggacagggaaatggaaatgtatagcatgcataaatcataacgaaattctatggcatctttcgcccaatctcccagtttgcgtgtgtatctgtgagccatcgccttttgtgcctgattaacgtcaactgtttatggttatttattttgctgctgctgcacactttcatactttcaggccatttcctactggcggggattacttccgccttctgccagataaacaagcaaattaccctgggatacgcaaaatatgatttcatttatttatacgcctgtttcggcaaggtttccccgaggatgtttgcctaaatcttaagctcaaaacgttgctggcccgcaatttgtcttcaactcgtggcaagtaaactctgacttttgccagaaacttttcaattaaaaagaaaatctagggggaggggaggggactaacaaaactccagccgtgtgtccaaaatttcagtgtcgcagaaatctgtgaaatttgcacgccccccaaaagctgcagacaattcggttgtataaacttttcaaataatttattccattttgcaaatacttgagaagccagaagttggtgaaataaaaagtctaatttatggcgagaaaatgaaaatgtgcgattagaccatataaaaactaagcgcgcggagtaaaaaaattggagaacaacgagattttgaggacatcaaagtgaaatttatgcgaaaacaaaagctggggctgtacatttgctgtgctctttgtatgggtgacacgcacgaaaaacacaaatacaaggacacatgtgtggattcgttttggaaactgtttaaaattctgcgtatgtggtgcctgccaaaaatttcgaatgccttgtttcgtgaatgtttttcttccgccttttgctatggaaacttttgcgattcgcaataattttgcttgaaggccgctagactgtgtgtgtgtgtgtgtgccaaggaacacacacttgctcggcagactattagcacatacacacacacaatcgcatttggtgagcaaaaaaggcatggcaagggggtaggggacggaaacgcaggaaaataaaaccaaaatggcaaacaaaacaaacacagcacaacacacaaaacgaaatagaagaaggaaaaataaaggaaaaaaagaggggaacacagattctaggaaccgaaaattaaacaccctagtcttggtagctcaaatttgtgccaaaataagtgaacatattaaatttccttcagatgaaaaatacacctattaagctgcctaaaagtaagcgttgaagtggagatcatattttggtgtgaaaaatgttattgcatactttaagacaccttgagaaagcaatttcaacttcacagatatcagtagaacgctcttagagtacaattgcaagcaaatttagcaagctcataagaaagtttcaaactaagtactaatattcaaatacccacttgaagtgtatgaaaaagaactagtccaaagcgaagaaaagctggagagaacgcaaagcaaagcgcctggcaaataatacaggcaaatgggcgagaaaacaaagcgacgacgttgcgtctgtgactaacagtcatcgatgagggggcggatggggtggtttctgggcggtattgaatggtatttgggtggcttttgggtgggtgggtgttgtggtgcgtgtgggcagagcgactgaaagcagcttagcgcttacttcatagtttacgcgcagccaaacgacaacagaaatgctaaaagctattgattttcccatgttgcctggcactcgtacacatggtatcttgtggttgggcctgcttttggatatcggctccgatatccgggacaggtgcgtgctaaagacccggacaagaagcgagtcaccgatagcccggatcagccgggtcagctcctctgagacgttagcccagggaactctactctatatggctactgcaaatcggatttgcgtgagtaattggcacgtcgcattctcttttttgggccagagaaaacgttgagccgtaaaaaacaaacaacacgaccggaagttgttggtgtgaaacctcagcaacgacggcctgcgacaaaaagttgggcaaataaaagcgcaattgcgttatatatgtcctcgaacacatcgaaaaaaatggccttttttctgctcataatatctatgatttcatccatttaaggcgatcagatttaattgtaaacaattaaaattaaccaattggtatttaagcagtgttgttgattcacatttttctatattgattcagaaaatggtgcaatattcgtcacgaggtatgatagtcctttaaaatatctaatatcagttgacatcaagatggaattgatgagtttttctcggtgcattccgcacacttgcgcctcggagctttggcaaatgtcagcagtcagcttaaggcgtattaagtaggagacagacaggaagagtggcaaactgggaggcggagacgaatccgagactcagacggggaatccgagtcgttgcgaagcggagacagtgaatgaatgggggcctggatgtatggctggatagccgtaaagccatttggaacttacctcatcgataaactcgaaatcgccgcccgtctcgccgacgtacttcttcttgtttctggcctcggtgctgccaatcaggctggatgacatcaacaccagcgccagacaagcgctggcaatcagcggcgagtgcttcatgatcgacgtccgggaacgggaacaggaacaggagatgtcagcggtggctacggaggaagtgcttcaagcgatgcgccctgttgacgggttccgctctcgctagtccaaatcgctggtgcgatgtcctgtggaaaactacagacgcctccggttttacgcactcacgcacactcactgccgctgctatccacgcacacacaatcttacgcagcaactatgctaagctatgaatgacaatgagttggctctgggatccagtttctgtttctgttttagaatctgtttctgtgtttgctcttgcaatagcaggcgcctccgcggatgaagtgcagcctggtcacgaaacactggggaactgaaggcgacgcggccgaaacgtaaactgagcgcctacgaagacgagctgctaagtgacagccaccattggaattttgcgacaccagttccgaggcctaagagcgcgaaaggatgcgctaagagagtcactggaatgcctggacaccagcagggttgtcacatcgcatttggcgagtgaatcatttgaattatgtttcaaaatagtttagaatcaaaatcttaacacatattaaatattagctttcatatttttaagcactttaaagtcatgttaactaaacgaaagtatctgtaagtaaattgtgtacttccacttctatgaccttttttccagtgtaacccactgcgtatgcgcaatgtgtcctcgctctcacatagccaccacccccttgccgttggcgcaacaactgccaggcccttccagaatgccaccaccaacaaggcgaatagcgactagaaatggcttaaaatcgatttttgtggactctcttagggccgccaacatggccagagctctggaatgcggattcgcaatgctcttaggcgataattgctggagccaaggcagcgggtcgtgaacctgccactggcgcccaatgcgacttcgcatcccaaatggacttgagtcttcttctttttttgc

SEQ ID NO: 32768 - DNA, 1983 bp, DROSOPHILA
atgaagcactcgccgctgattgccagcgcttgtctggcgctggtgttgatgtcatccagcctgattggcagcaccgaggccagaaacaagaagaagtacgtcggcgagacgggcggcgatttcgagtttatcgatgagataaacaaaaacacgcagagcaacaagaatctgggcgagcacaagcgctggatacacgatccctcgagtgacctttgccgaccgctgaactgcaagaagcgtgaaatctgcctgctggaggacgagttcagtgccgtttgcgtgtcgaagaaggagctccacaagaatcgtgatgagataatcaccaaggccaagtatttggaggaggaggccaagcggcgtgtcaaccagcaggacaatcaggacagccaggacgcggaggatatcaacaacgacgacgaggataacagcagcgatggcggcagcagcaactccagccccacaggcaccaacaatgcccaggccagtgtccagggaaatgaggagaccgacgacgaagataagagcctaagtctgggcgacgacgacgagtccaaggaggatgatgtcttctacgagaacagtatcgccgccggcgataagcagcagcagcaacagcagctatcccagcctgctgcaggaccttccgttattcagcaggacgacgacgaggagttggacaactgcaagccgtgtcctgtggccaagccgacgttcctgtgcggagccgacaacaggacctactcatcactatgcagattggattatcacaattgcatacattcgacgtccatacggatcgcctgcaaaggattctgtccctgcaaggagattgtcgatggaaagcggctgcagcgcatctcgggctacaacaacaagtacaacaagaagatcagcctggaccagcagcagcagcagcagcaacaacaacaacagcagcagcagcagcagcaggcctacaaggacagcaacaacaacaacatcatgatgaacagcggcaacataatgggcggcaacaacaacgacttcaacacgatcatgaatttaaatttttggtattggtattgcaggacaaagaggacaataaccggcacaacaaccacatcaatgcccagtacactttcacgcccgaggagatcaaatatgacaacaagcactacaagtacctcaagtacacggcctacaagaaggactccaagtaccaggaggacaagcacaagatgcgcaactataacgaggtggtcgagaagcagcagcagaacctatccatcgaaatcggcagagtgcaagccgcagcaactgacggcgattggcaaccgactgctggactggttctcggtgatcatggcggacagcaagaagcggcgccagcacagccagaagtcaaaggcccacttcccgcccgcctgcaagacggaggccaagtggatgttcggccacctggatctgaataacgacgggcagctgtcgctgcaggagatgtacgacctggagcatgaccagaacgagcgttgcatcaagccattcatcgacacctgcgacttggacacggatagctcgatcaacacacgggaatggtgcagatgcttcgagaagacggatcgtccatgtgccgctgtgcgccggagaatcgccggcgactttgcaggagcctacgcaccggactgcgacatccagggattctacaagcctacccagtgccacaattccgtgggagtttgctggtgcgtggacaagcacggagtggagttcgccaacacacgcacacgcggcaaacccaattgcgcctttaagccagcttttatggcccagtgctggcataactcagctgccgcaatgctcgagccggctaacggcagcgagaacacctcgcactccgagtccgtggttaataatgccgcatcgctcacatccgatgacgaggacgagggcgccgatgacgaggacagcgcggagggcagtgccgatcagatgctggtcttctaa

SEQ ID NO: 32769 - protein, 660 aa, DROSOPHILA
MKHSPLIASACLALVLMSSSLIGSTEARNKKKYVGETGGDFEFIDEINKNTQSNKNLGEHKRWIHDPSSDLCRPLNCKKREICLLEDEFSAVCVSKKELHKNRDEIITKAKYLEEEAKRRVNQQDNQDSQDAEDINNDDEDNSSDGGSSNSSPTGTNNAQASVQGNEETDDEDKSLSLGDDDESKEDDVFYENSIAAGDKQQQQQQLSQPAAGPSVIQQDDDEELDNCKPCPVAKPTFLCGADNRTYSSLCRLDYHNCIHSTSIRIACKGFCPCKEIVDGKRLQRISGYNNKYNKKISLDQQQQQQQQQQQQQQQQQAYKDSNNNNIMMNSGNIMGGNNNDFNTIMNLNFWYWYCRTKRTITGTTTTSMPSTLSRPRRSNMTTSTTSTSSTRPTRRTPSTRRTSTRCATITRWSRSSSRTYPSKSAECKPQQLTAIGNRLLDWFSVIMADSKKRRQHSQKSKAHFPPACKTEAKWMFGHLDLNNDGQLSLQEMYDLEHDQNERCIKPFIDTCDLDTDSSINTREWCRCFEKTDRPCAAVRRRIAGDFAGAYAPDCDIQGFYKPTQCHNSVGVCWCVDKHGVEFANTRTRGKPNCAFKPAFMAQCWHNSAAAMLEPANGSENTSHSESVVNNAASLTSDDEDEGADDEDSAEGSADQMLVF

SEQ ID NO: 32770 - DNA, 5479 bp, DROSOPHILA
aggtgcgtccggaacgtcaaaagctgctcaacctgaagtacaaaggtgcgtgacactcctaggcttcgggatatttcagttttaagatccaatgacttgcaggaaagacagcagccgacaatgtgaagatcagcgctttggagctgaagcccaactttaagcttatgatggtgggctccacagaggccgatatcgaggatgcgtgcagcctgcccgataatattggcgaagtggtcgacgacttcgatgacgccgatgaacgcgaagagtccgtggagcactccgccgtctatttggccaaggtgcagcgtcgtgtgcgagactacaagatcaaggagttagcgccgccgcgtgagggcaagaagctgcttgtcctggacatagactataccctattcgatcaccgatcgcctgctgaaacaggcacggagctaatgcgtccgtatctgcacgagtttctgacttccgcctacgaggactacgacattgtcatctggtccgccaccagcatgcgctggatcgaggaaaagatgcgcctgctgggcgtggccagtaacgataactacaaggtgatgttctatctggactccaccgccatgatatcagttcatgtgccggagcgcggtgtggtggacgtaaagccgcttggtgtaatctgggccctgtacaagcaatacaactcgagcaacactatcatgtttgatgacatccgtcgcaacttccttatgaacccaaagtccggcctaaagatccgcccattccgtcaggctcatctcaaccgtggcacggacaccgagctgctcaagttgtccgactatttgcgcaaaatcgctcaccactgcccggatttcaattcgctaaaccatcgcaagtgggagcactaccatcccaagaagaactcctgaacttatcctcggttgcaaacatttgttagatttatgttagatttatgtttattaaattaagatgcattttatacgcattgcgttccagccgtcaattagagtgtgtatccgccttgatccgcccagtggactctcctcgcctccaggtactcctcgtgcagcctgcgtcgctcatcctcgagcttggccagccggcggtagcgctgcagcaccattccacagccgaagagcagggcaacttgacagatcagccagaagatgaacagtgcaatcagcaggctctggttgatgcaaacgttatccaggtgcagcgggtcgtctatgccagcaatgagcagcactccccgctcgccgtacagataactattggtgttgctctggtccggaccgtgcacccggatattgtagttgaggggcaattcctcctgcgatctggtaaagttgtctggttgcggagccacatccaccaccgtggagatgtacacggggttctgaactcgtaggtcttccggtctacgatctggttggtcagcctgtcgccttctccgttgccaggatgaactaatacaattgctgggcgagcagcgctccacgcagaagcgaatctttacatcgaagcttacgttggccgttcctgagaacttgaaggcatggaagcgagcgcgcaacatgctcctgctggctgtgtgtaccctttccaaagcgggaaacacactggcatctgtgggacatcctcgctcgtcgatcagcagcacaaagttctcattgtccgctgtcttggccaccagcgaggtagcacgaaagtcgggtagtggtgccagctgcaactccatgtgctctgccaactgctgtgggctgtactccgccacaatctgtagttccaggttctgtccaatctgcacgtcgttggtctcgtgctggtgggatagatccaaaatctgaagcgagatgctgggatgcggatggggcccagtgctgctgttgtagtgaaccacaccctcgtgtgggaacatgctgcaggtatcgattgtgatagaattaagcattttgagggattctattaagaatacactcactgttctgtgtactccaatgaggactccagtgcaatggcgctgggcacaggctctgagctatccacactgctgtcccgaaccgaaacgcccagcgatgtggtggcattgctctgtatacagccaaccttgatgagccggtcgccctgggtttgcacatttggattgttttggatgaccaccagagcagatatgaacgttctaaataatgcaaatgatataattaaaaaaatggactggacattggacttcatcttacctttggtattcctgtgtcatttcgtaggcacgcaggatgccacagcggttctcctttacctcgctgccgatctggagcgtcagcagaacactcccattgcccgatcctctggccaggcagtccttggagtgcatgctggcatagatcttgccgacgaaccagtccttgggattgtacttaatggtcatctcatcgcgggtgcaaaaaacccggactgcggaataaggaatcgattaagattgagcataccacatccccagaagatcttaccatccaggcacttgaccctccgcatgtacaccgagttttcacggagcttcaggcttcgcggacccagggatacaatgtcctccgagtggaggagacactcggacagcgagagttggtttacatagtagaaggagacaccctggcagtagaacttcgcctcgtgggagcacatcgcctgacactgcaatacggaggtagaagccatcaatcaatcatccgaccccccatccatttcgattacaatcataatgcgcgacatccgaagcgcggcggacacacctctttttgggagaggcccaaatacctggcctccgcatagatgaaactgctgttggcgtacagctcgtaggaacagttgtcactttcgatggcccgttcgtggcactggttctccatgtactcctcgtcgtatggagccgcgcgaaaggcgtccggctggacggtcttgtccctgtcgctcagcatacatctgccgaggcggggagacggacgctggccaggacccgcctcgccgcggaagctacgaaagaggagggttaaaggttgctttattaacttctaaacgatgatgtgtcgattatgaccaagtcagttcggttatttcagaagaattcgatatatacttgagtttaagaaaatctagatgattgctgatgatctcacttttcaaaaatacttatcttattttgtaaaaatttgtttggaaaagaacatagcttcgaaaagatgatgtcttctggatatatctttctttcgtattataatatcatattatcatattattagcttgctacacattgttgaatagtcctaacctatcccatcaccatcctcggagtgatgtcataatccggcgaaaagtctcgaccatgcattaaaaatgcacaacaaaagctattcatttgtccggcgaccagcaactacaacaaccacccactgacaaccgacaacaacaaacaaccaaatagcaaacaacaaacaacaaatagtcaattaccgctcacgattgttccgataggagggcgcaaaggaggcggagaggcatcggaactgggtttcgaagaagcagcgctcggcgcactcacgccgcgtgaccagcgtcgaaatggtcttcttgctgtggtagaccagcgtgctgccggggattttggtcagtgcccagagacgcccacggcacgcatcgggaactgcaaggtcggaatggattagaggcggatcacggccacttccggaggtttggctggagaattactcacctcggaggcaggtcttttcgtagaagacggcctcgccgtctgccaccagaggcagttcacccgaaatggccagatagcgcgaggttcgctcgaagtacgagtagccatggcactcgtccgtgtccagcagatggacataggcaatgcaatcgggatcctcgttgcagatgcgccagcacacctggctgaccggaagttcctgttggccgttgcgagtcttgaagttgctcaccatttccggtccgtagatccgattatccgcattcagatactccagcggtggccggaatccgacgatcttctgcagctgcaactggtgcaacggacacttgagcagcagcgcaactggggggcagaacggaatgccatgaatgtgggtttcaatccaacgggatgcgcatgactgggaaccaacgcatttttcaaattgccgagcagtcatatggatttcaattctggtagctaagctcgtgctcatcaattaatatgatatttttatgcatagctgagcaatgagaaaatcaatcaagcatcatcgggatttacccttaagtagggagggggtttaggaatgtctgagattggcgttattaactaattgaaaggttgaattggaaattaaaaaacgtaacttaacaaacttatcatgaattgcaattgagatatgcagagatctttcaaggtatctggtagatacttttttgatattctggcatatctataagatagtacttaatctctccacttccgcttttccagaagttagttgcttagttaagagcactttcctgtgtaggtcattctcccacttaggccccccaatgaaactcgttctcagggtgtttgccaataaataaatctataatagcagctgacatgcacatgcagcgagtaaacccctttgccgacttgtaaattgatctatgcagttttggttttgcttctccatttattcgcttggcttttgaatgcaaatggcgagtgcatcttcaaaacgctctcggaattggcatcatcatgagctaagcgcggagcaatgtttgcaaaggggttttccgatttttcatatttcatatatatacatatatatatattagccaactgagaactcaccactagcgtttagctggagaattagcaaaatcgctgcaatggctaatttgcatagccggggggcggtcacaagtgattggagtggtggcattgtttttcagatgcgtttttgtggctgcaaccgcgaattgtttggcatgctcgtgcaataaattttaattgattctcggtcagaacacgggctaaactcgtagacgcattacacgaaccgagtaacaagggccatttattcagtggctttttgcccgttagctggttatgtatttggcacagtccaacactttcggtcactcaatcgcctgcagatcgaactatttgcatatatgcaaatgcaaatgagccagcagtatcctgttatcctgttatcctggcccactcgacaacaaatatgaattagagcgatttcccgatgtgggtcagttggccgccagcatcatcgttgtgctaattacttcaaactcgcctgcttatgcattatttatttgtttttaaattcgagtataacgtgtggctttgacttttgccaccacttccattagccaaatgcacttggctaaagttctgttcacttttatcacacttgattccgctgcggcgattgta

SEQ ID NO: 32771 - DNA, 2307 bp, DROSOPHILA
atgccagaatatcaaaaaattgcgctgctgctcaagtgtccgttgcaccagttgcagctgcagaagatcgtcggattccggccaccgctggagtatctgaatgcggataatcggatctacggaccggaaatggtgagcaacttcaagactcgcaacggccaacaggaacttccggtcagccaggtgtgctggcgcatctgcaacgaggatcccgattgcattgcctatgtccatctgctggacacggacgagtgccatggctactcgtacttcgagcgaacctcgcgctatctggccatttcgggtgaactgcctctggtggcagacggcgaggccgtcttctacgaaaagacctgcctccgagttcccgatgcgtgccgtgggcgtctctgggcactgaccaaaatccccggcagcacgctggtctaccacagcaagaagaccatttcgacgctggtcacgcggcgtgagtgcgccgagcgctgcttcttcgaaacccagttccgatgcctctccgcctcctttgcgccctcctatcggaacaatcgtgagcgcttccgcggcgaggcgggtcctggccagcgtccgtctccccgcctcggcagatgtatgctgagcgacagggacaagaccgtccagccggacgcctttcgcgcggctccatacgacgaggagtacatggagaaccagtgccacgaacgggccatcgaaagtgacaactgttcctacgagctgtacgccaacagcagtttcatctatgcggaggccaggtatttgggcctctcccaaaaagagtgtcaggcgatgtgctcccacgaggcgaagttctactgccagggtgtctccttctactatgtaaaccaactctcgctgtccgagtgtctcctccactcggaggacattgtatccctgggtccgcgaagcctgaagctccgtgaaaactcggtgtacatgcggagggtcaagtgcctggatgtccgggttttttgcacccgcgatgagatgaccattaagtacaatcccaaggactggttcgtcggcaagatctatgccagcatgcactccaaggactgcctggccagaggatcgggcaatgggagtgttctgctgacgctccagatcggcagcgaggtaaaggagaaccgctgtggcatcctgcgtgcctacgaaatgacacaggaataccaaagaacgttcatatctgctctggtggtcatccaaaacaatccaaatgtgcaaacccagggcgaccggctcatcaaggttggctgtatacagagcaatgccaccacatcgctgggcgtttcggttcgggacagcagtgtggatagctcagagcctgtgcccagcgccattgcactggagtcctcattggagtacacagaacacatgttcccacacgagggtgtggttcactacaacagcagcactgggccccatccgcatcccagcatctcgcttcagattttggatctatcccaccagcacgagaccaacgacgtgcagattggacagaacctggaactacagattgtggcggagtacagcccacagcagttggcagagcacatggagttgcagctggcaccactacccgactttcgtgctacctcgctggtggccaagacagcggacaatgagaactttgtgctgctgatcgacgagcgaggatgtcccacagatgccagtgtgtttcccgctttggaaagggtacacacagccagcaggagcatgttgcgcgctcgcttccatgccttcaagttctcaggaacggccaacgtaagcttcgatgtaaagattcgcttctgcgtggagcgctgctcgcccagcaattgtattagttcatcctggcaacggagaaggcgacaggctgaccaaccagatcgtagaccggaagacctacgagttcagaaccccgtgtacatctccacggtggtggatgtggctccgcaaccagacaactttaccagatcgcaggaggaattgcccctcaactacaatatccgggtgcacggtccggaccagagcaacaccaatagttatctgtacggcgagcggggagtgctgctcattgctggcatagacgacccgctgcacctggataacgtttgcatcaaccagagcctgctgattgcactgttcatcttctggctgatctgtcaagttgccctgctcttcggctgtggaatggtgctgcagcgctaccgccggctggccaagctcgaggatgagcgacgcaggctgcacgaggagtacctggaggcgaggagagtccactgggcggatcaaggcggatacacactctaa

SEQ ID NO: 32772 - protein, 768 aa, DROSOPHILA
MPEYQKIALLLKCPLHQLQLQKIVGFRPPLEYLNADNRIYGPEMVSNFKTRNGQQELPVSQVCWRICNEDPDCIAYVHLLDTDECHGYSYFERTSRYLAISGELPLVADGEAVFYEKTCLRVPDACRGRLWALTKIPGSTLVYHSKKTISTLVTRRECAERCFFETQFRCLSASFAPSYRNNRERFRGEAGPGQRPSPRLGRCMLSDRDKTVQPDAFRAAPYDEEYMENQCHERAIESDNCSYELYANSSFIYAEARYLGLSQKECQAMCSHEAKFYCQGVSFYYVNQLSLSECLLHSEDIVSLGPRSLKLRENSVYMRRVKCLDVRVFCTRDEMTIKYNPKDWFVGKIYASMHSKDCLARGSGNGSVLLTLQIGSEVKENRCGILRAYEMTQEYQRTFISALVVIQNNPNVQTQGDRLIKVGCIQSNATTSLGVSVRDSSVDSSEPVPSAIALESSLEYTEHMFPHEGVVHYNSSTGPHPHPSISLQILDLSHQHETNDVQIGQNLELQIVAEYSPQQLAEHMELQLAPLPDFRATSLVAKTADNENFVLLIDERGCPTDASVFPALERVHTASRSMLRARFHAFKFSGTANVSFDVKIRFCVERCSPSNCISSSWQRRRRQADQPDRRPEDLRVQNPVYISTVVDVAPQPDNFTRSQEELPLNYNIRVHGPDQSNTNSYLYGERGVLLIAGIDDPLHLDNVCINQSLLIALFIFWLICQVALLFGCGMVLQRYRRLAKLEDERRRLHEEYLEARRVHWADQGGYTL

SEQ ID NO: 32773 - DNA, 2651 bp, DROSOPHILA
gcggagttcgcggtgggacgtacagtgattgcactgaggtagaggcgccgcgaacactgccagaactgccaccacgaccgctgccgctcagggatcctcccccgcttccagatggcaccgccaggtgaccctgatgatgatgctgcggaaccacggccagcgtggccgacgaggccgtcgtattgctgtagatgggcgactccgatcgctgcgactgcgtggcgcgcatcgagatgacgcgggacggattctcgtagatcgggtacgaatcgctggagtagctgccgcccaggtgagctgccagttgtgtgtgctgcagctgctgctgctgctgttgttgttgttgttgttgctgctgcatcggagagctgtggaaacagaagagaaaatgtgtttaaaaatgttgtatatatcatatatattccattatattcctcgtacagaaaatcatatattgtgttattgttttaattattgtaaggcgagtagaaaccggttttgtacatcaacttttcttattgtaaataaataaagcaatctgttatcaaataaaaaatctttgaacaataaatgtttcgaaaataaaacatttcgtgcattgtcattgtttaaaagttataataatattaagcactttttgacaatatgtagtttttacggattattcctttaatcaagagctgctcatattatctctacccactttatcaatcgcgcgctatctattcaaatatagtacttcaagaggcagtttacctagttggctgatacctgggctgtcgctccctgatggacatggcagctcgatcgaaccgcagcgtggagccaaacggcgtcgaggcgtgctgttgatgaatctgtggatgctgctgctgctgcggcgggacggcgtagtgagcgggcgagtgtggccgctggggcagttgcaacatgttggcataggaggcgcttagcaggccctgatctgcatcgtagctgtcaccacccagatggggatgatgctgccgctgggtggtggagtagctgcgctggaatcctccggctcccggcgccggcgatgatgtggtctgcagcagtggcgacgactgctgacggcgcatccgctcgatctgctcgaaattaacgtagttgctgctgttctgactcaactgattgctgctggcgcggaactggtggggcggcaggggaggatgactacgcacatgcggatgggaggggtggggcagagaagtgaggatgcgagtgggagtgctgctgcaggggcatctggctctgtgctcgtcgagcatggtagtagtccggctgcgagtccgtgcaggagtaggtgttccgactggtgctcgagctgcgcggatggaactcgcagctgggcgaggtgctcgcacagcgctgcagcgatttcttcttggcccgctgatcgctccacacattgatcaccgaaatatccggtggggtgtccttcttcatgtacttccccaccacgccctccttgtgctgggacttctccttgttccggcgcgagagcatcgtcggttttcggttgcacagcaggatcgttagatagttcatgcagactatgtttccgctcggattccggatcgctgtctttgtttagtccattttcgagctaaatttatgctgtacgatcggtttttgtgttttcagctggtgaccagtgtggccaatgaactggcgaaacaatcgcctattggcaacttggggacattcctcatgtctttgcatgactttctttaattgctaaatatataattttaaaaaatttaaaatattttttaataatctctgaaaaatataatcaaaaaatcattatttttattgcaagccgattgcaatcgataacgccgggcgttgcaatcgatagtatctatcgacttctgacaactcgactgtttatatggtcttctaataaattagttaatatctttaaggtacactattgcaaaccacttgctggattctatccaacaaacatacattaccatatatggtgtgataaattaatagcggaatagaaaccagctaagatggaggtcaaagaagtggtagtgattgtaaaatggagtggtaaggagtacccggtggacctcaccgaccaggacaccgtggaagtgctgcgtcacgagatattccgcaagacacaggtgcgtccggaacgtcaaaagctgctcaacctgaagtacaaaggtgcgtgacactcctaggcttcgggatatttcagttttaagatccaatgacttgcaggaaagacagcagccgacaatgtgaagatcagcgctttggagctgaagcccaactttaagcttatgatggtgggctccacagaggccgatatcgaggatgcgtgcagcctgcccgataatattggcgaagtggtcgacgacttcgatgacgccgatgaacgcgaagagtccgtggagcactccgccgtctatttggccaaggtgcagcgtcgtgtgcgagactacaagatcaaggagttagcgccgccgcgtgagggcaagaagctgcttgtcctggacatagactataccctattcgatcaccgatcgcctgctgaaacaggcacggagctaatgcgtccgtatctgcacgagtttctgacttccgcctacgaggactacgacattgtc

SEQ ID NO: 32774 - DNA, 651 bp, DROSOPHILA
accgatcgtacagcataaatttagctcgaaaatggactaaacaaagacagcgatccggaatccgagcggaaacatagtctgcatgaactatctaacgatcctgctgtgcaaccgaaaaccgacgatgctctcgcgccggaacaaggagaagtcccagcacaaggagggcgtggtggggaagtacatgaagaaggacaccccaccggatatttcggtgatcaatgtgtggagcgatcagcgggccaagaagaaatcgctgcagcgctgtgcgagcacctcgcccagctgcgagttccatccgcgcagctcgagcaccagtcggaacacctactcctgcacggactcgcagccggactactaccatgctcgacgagcacagagccagatgcccctgcagcagcactcccactcgcatcctcacttctctgccccacccctcccatccgcatgtgcgtagtcatcctcccctgccgccccaccagttccgcgccagcagcaatcagttgagtcagaacagcagcaactacgttaatttcgagcagatcgagcggatgcgccgtcagcagtcgtcgccactgctgcagaccacatcatcgccggcgccgggagccggaggattccagcgcagctactccaccacccagcggcagc

SEQ ID NO: 32775 - protein, 124 aa, DROSOPHILA
MNYLTILLCNRKPTMLSRRNKEKSQHKEGVVGKYMKKDTPPDISVINVWSDQRAKKKSLQRCASTSPSCEFHPRSSSTSRNTYSCTDSQPDYYHARRAQSQMPLQQHSHSHPHFSAPPLPSACA

SEQ ID NO: 32776 - DNA, 3820 bp, DROSOPHILA
attgaaatgtatctgtaggataagctatgaattgaaaagtatctgtgggacaaacgaacttgtatctcacagtacaaagtaatcataccaaacccctaaatatatattattagtcaataatatccatcgagtcatattttctgtttacttatcaatttagcaaaagatatgacaaatgtaattacaatctaaaactctcgttttatgtatcctgtttaatatgttcaaaatataataaaacacaacttttggcctttccaatgccgaatactccccagacttcgaaaacttcttatcagcagtagaaactgtttttgagggacctgcagaaacagtgactataaagttttataagcattcgataagaggcgactgaatgaattatcaggttcgactaaaaataagcatagccaaacgaaaacaaacataagattcactttctattggagcgctgtttttttttttgccaatacagaatcggccacgattcacttgtgcccaatgcataatttttgcaagcgaatcgaaaacttggcatggaactcggaaatatgtgccaagccaagtcgagtaagacttggccaccaactgttgccctttatttacacttcgcggcgctgaatttccaaaacatccgtcgatgaatcggactcccaggttaaatacctgtggggtttcaggtggcacatcgattacaattgcgctcggcaggtaagatgatcagtaaaccagtttaattttctttgctcacattacaaacaaacgccaagctcaaatcacattaaggttatatagaacgtagcacaattctacgtttcatcaaggcattcgaactgtcatggatctgcttggctaccatctcgtctggtttcgtataaggcactgatttcgcgatgagtcgatggttaaataagttaaaggtcgattacaggagcactatgatgtgcatatagctgctggcgagtatgtggtctgagtcagtcgtcacctggtcaccgggtcactggttttggttctggttctggccggcgcgtcgattcttctcgagtatcaaagcgcgactgaaaggtgtaacaagagagtagtggcttttcggagagcggagaatgcagcggcatgtggccgctcacttaccggtagcgctcgtagaagcccacgatggtgcccagttcctgcttgaagagccgcaccagcatgctgtcgaagccctccagctccggcaggctaaacatgttgaactgcagcaggtggtccttggacgagtccgcctccgagtagacggccaaccacttggggatctcctcgagcagatagggattggccggcaccagtgcattgtgagtgtgcgtgggtggggcatagagcgacgcctctggtcgaatcgctttcggtggctccgcagacgtcgtgtagacatagtaggaggtcaagcatggatgctgacgttggctctgcccggtatactggttctcatagtaggtgccatgcatcttggacaccacccgccgccagcccaccggcagaccttcgcgctccaacggatgattccagtgcgtggtatgcgcattgtgatcaatatagtatttccgaccgtgtagcgtgtactgagtggcccagccgggcggcagaggcagctcctcgggctccgtgagcgattgctgtgatggtaccttctgcagcgacccattggcactgcctcccgctccggcaaccgcactgggcggagttcgcggtgggacgtacagtgattgcactgaggtagaggcgccgcgaacactgccagaactgccaccacgaccgctgccgctcagggatcctcccccgcttccagatggcaccgccaggtgaccctgatgatgatgctgcggaaccacggccagcgtggccgacgaggccgtcgtattgctgtagatgggcgactccgatcgctgcgactgcgtggcgcgcatcgagatgacgcgggacggattctcgtagatcgggtacgaatcgctggagtagctgccgcccaggtgagctgccagttgtgtgtgctgcagctgctgctgctgctgttgttgttgttgttgttgctgctgcatcggagagctgtggaaacagaagagaaaatgtgtttaaaaatgttgtatatatcatatatattccattatattcctcgtacagaaaatcatatattgtgttattgttttaattattgtaaggcgagtagaaaccggttttgtacatcaacttttcttattgtaaataaataaagcaatctgttatcaaataaaaaatctttgaacaataaatgtttcgaaaataaaacatttcgtgcattgtcattgtttaaaagttataataatattaagcactttttgacaatatgtagtttttacggattattcctttaatcaagagctgctcatattatctctacccactttatcaatcgcgcgctatctattcaaatatagtacttcaagaggcagtttacctagttggctgatacctgggctgtcgctccctgatggacatggcagctcgatcgaaccgcagcgtggagccaaacggcgtcgaggcgtgctgttgatgaatctgtggatgctgctgctgctgcggcgggacggcgtagtgagcgggcgagtgtggccgctggggcagttgcaacatgttggcataggaggcgcttagcaggccctgatctgcatcgtagctgtcaccacccagatggggatgatgctgccgctgggtggtggagtagctgcgctggaatcctccggctcccggcgccggcgatgatgtggtctgcagcagtggcgacgactgctgacggcgcatccgctcgatctgctcgaaattaacgtagttgctgctgttctgactcaactgattgctgctggcgcggaactggtggggcggcaggggaggatgactacgcacatgcggatgggaggggtggggcagagaagtgaggatgcgagtgggagtgctgctgcaggggcatctggctctgtgctcgtcgagcatggtagtagtccggctgcgagtccgtgcaggagtaggtgttccgactggtgctcgagctgcgcggatggaactcgcagctgggcgaggtgctcgcacagcgctgcagcgatttcttcttggcccgctgatcgctccacacattgatcaccgaaatatccggtggggtgtccttcttcatgtacttccccaccacgccctccttgtgctgggacttctccttgttccggcgcgagagcatcgtcggttttcggttgcacagcaggatcgttagatagttcatgcagactatgtttccgctcggattccggatcgctgtctttgtttagtccattttcgagctaaatttatgctgtacgatcggtttttgtgttttcagctggtgaccagtgtggccaatgaactggcgaaacaatcgcctattggcaacttggggacattcctcatgtctttgcatgactttctttaattgctaaatatataattttaaaaaatttaaaatattttttaataatctctgaaaaatataatcaaaaaatcattatttttattgcaagccgattgcaatcgataacgccgggcgttgcaatcgatagtatctatcgacttctgacaactcgactgtttatatggtcttctaataaattagttaatatctttaaggtacactattgcaaaccacttgctggattctatccaacaaacatacattaccatatatggtgtgataaattaatagcggaatagaaaccagctaagatggaggtcaaagaagtggtagtgattgtaaaatggagtggtaaggagtacccgg

SEQ ID NO: 32777 - DNA, 1359 bp, DROSOPHILA
atgcgccgtcagcagtcgtcgccactgctgcagaccacatcatcgccggcgccgggagccggaggattccagcgcagctactccaccacccagcggcagcatcatccccatctgggtggtgacagctacgatgcagatcagggcctgctaagcgcctcctatgccaacatgttgcaactgccccagcggccacactcgcccgctcactacgccgtcccgccgcagcagcagcagcatccacagattcatcaacagcacgcctcgacgccgtttggctccacgctgcggttcgatcgagctgccatgtccatcagggagcgacagcccaggtatcagccaactagctctccgatgcagcagcaacaacaacaacaacaacagcagcagcagcagctgcagcacacacaactggcagctcacctgggcggcagctactccagcgattcgtacccgatctacgagaatccgtcccgcgtcatctcgatgcgcgccacgcagtcgcagcgatcggagtcgcccatctacagcaatacgacggcctcgtcggccacgctggccgtggttccgcagcatcatcatcagggtcacctggcggtgccatctggaagcgggggaggatccctgagcggcagcggtcgtggtggcagttctggcagtgttcgcggcgcctctacctcagtgcaatcactgtacgtcccaccgcgaactccgcccagtgcggttgccggagcgggaggcagtgccaatgggtcgctgcagaaggtaccatcacagcaatcgctcacggagcccgaggagctgcctctgccgcccggctgggccactcagtacacgctacacggtcggaaatactatattgatcacaatgcgcataccacgcactggaatcatccgttggagcgcgaaggtctgccggtgggctggcggcgggtggtgtccaagatgcatggcacctactatgagaaccagtataccgggcagagccaacgtcagcatccatgcttgacctcctactatgtctacacgacgtctgcggagccaccgaaagcgattcgaccagaggcgtcgctctatgccccacccacgcacactcacaatgcactggtgccggccaatccctatctgctcgaggagatccccaagtggttggccgtctactcggaggcggactcgtccaaggaccacctgctgcagttcaacatgtttagcctgccggagctggagggcttcgacagcatgctggtgcggctcttcaagcaggaactgggcaccatcgtgggcttctacgagcgctaccgtcgcgctttgatactcgagaagaatcgacgcgccggccagaaccagaaccaaaaccagtga

SEQ ID NO: 32778 - protein, 452 aa, DROSOPHILA
MRRQQSSPLLQTTSSPAPGAGGFQRSYSTTQRQHHPHLGGDSYDADQGLLSASYANMLQLPQRPHSPAHYAVPPQQQQHPQIHQQHASTPFGSTLRFDRAAMSIRERQPRYQPTSSPMQQQQQQQQQQQQQLQHTQLAAHLGGSYSSDSYPIYENPSRVISMRATQSQRSESPIYSNTTASSATLAVVPQHHHQGHLAVPSGSGGGSLSGSGRGGSSGSVRGASTSVQSLYVPPRTPPSAVAGAGGSANGSLQKVPSQQSLTEPEELPLPPGWATQYTLHGRKYYIDHNAHTTHWNHPLEREGLPVGWRRVVSKMHGTYYENQYTGQSQRQHPCLTSYYVYTTSAEPPKAIRPEASLYAPPTHTHNALVPANPYLLEEIPKWLAVYSEADSSKDHLLQFNMFSLPELEGFDSMLVRLFKQELGTIVGFYERYRRALILEKNRRAGQNQNQNQ

SEQ ID NO: 32779 - DNA, 5204 bp, DROSOPHILA
ctgccatgtgctcattagcggtatctaccagacgataaccagcgtagtaatcgatggaataacttgtcttctttatcagttggagcacatgcaaaaatatactcaacccatcatcgatgaagtcagtctacagaagtcatcccgctatttcggtcgttaaaaaaataaatgaaatgggagctgtaaccttcttaacaattattttggtgaccttgctgggtcatcgatccagtgccctggagttcgaagagtgtgccagtgctccacaattgggagtttatgtcgccagctctagcaattgctccaaatacatatattgtgccggtccaggatcctttgaggccgagtgcttggatggtcattactacgacgaaaaattggaacgctgtttggatcgaaagttggtgtcgagatgccgggatcccgtaggcataaccactaaatccccctcgatggtcaagaagccagctcagaaagcggaaccattggcgattaccctgcgacttttacccaatgccggaccatgttatccttatatggtctgctacgagggggctggactggccaaggcctgtactcctgctcatctagtgtcctgcaatcgcatgcaaacgcgagagaatatcatcaactgccaggagggagtctatggctttatgccacatccacggaactgcgcctacttctactactgctccagtggctccaagctggtccatcgatgccacttgaactacacttggcactacgaacggaggtcctgcgtccagcagtccgagaggatgtgctactccgaacaacttcggcttatacgaaataaaataggaaaggccaaccggacgtaattctaatgttaggatatagatttaatttaagttaaagattcgtataaatagctaaacatgtacacctagcgtaagcaacagttgaataaagaactgcaattgggaaacaaacaggagtaaatgcttctgggtggggatgtgccttctcctgtgccctacttccagtaaaacaggtgggagctgcgcacatcgaagtggtagaagcgaagcagcatgtaatcctgccacttggtgggcaacagtctaaagcaaggcgacaacaataatcgttagaaataatcgctggttacctgggctaattcaattctcacctgagcagccatacactgagtgcgaatatttttggcacatacaccatgcgctcgttcagcaacacgcccttgacaatcttctcggccacatatggtgtgggcagtccgggatagctcttggcaatgctaaatgtagtagccgcatgagaccaagtgatctgcccaaactataaaccaatcttaccccgcatcactgagcagtggaagatctccgctggtcctcatcagataggcattggccaccgtggtgcgaacgtagtcacagtcggacaatcgcagctcagctcgcagcgattccatgaagccctcgattccgtatttggtggccgtgtagatgcccgctcctggcagtggaactagacctaaatgcgagttatatatacataggtatcaatgaagtggtaagcactttaaccaagtaagcttacccgctaaggcatttactgccaccagatgaccggacttgcggtttatcatcttcggcaggaactccttggtggtctgcaaaatcaagaagttttatatttgtcccattttcagaagcacacactcaccattatgtaggagcccagattgagctgcagtattgtgtcgatttcatcgctcttcagactgggtgttgaagtcatgggcatgagggaggcattgttgaccagaatgtccacgggacccagttccttctccaccttggcggccatcagttgaagctcgcgaggcgatgacacgtcgttctggaataaagattcttgttatcaaaccattaaatatccaagcagctagtgaactcaccttgtaggccttggcaacgcagcgtggaatcttggagagcagctccaccgtttcgtaacatcccttggagttgacatcaacgacggccagcttgcagccccgccgcgccagttccaagcagatctcgcgacccagcccactgcctccgccggtcacctgggtttaaatcacaggttactcacattacactcgtatactcaagtaaattaattagcttaatttgcaaacaatcaactcgagctaatgtgacttcgcattgaacaaaaacctcatttacggacaattatgtgagcagcagcaacagcggcagaggcgacttatgaatggcattactcatacgctcggtgggccgaccctctggggcacaattgagtgacttttgaccgtaattgaagcccactgggtgacctcagccgccgttttgggtgtgcggtagttgggtgaatcgaaatgtaagccggaatgagttcaattcagagtttggcacgttagcgactagcaatggggaaaacaataacaaatgcgcagttgttgtgattatagaacagccgaagaatttcaatatcatatgcaaattaacagcggcaacagtagttgagttttatctacgcatctgagagatacccggcatgctacacacttgcagatactttggcccatcgaaattctacactctattgtttgtaaacacaaacattagactgaaaacaaaagtgaactttctgaggtttgcatttttgcgctcttttcgttcatcttggaaataaatatagcgacacacgcaaaaccagtttgcagttggccgttggccagtggtgtcgaaaaagggggtatttttgagctgaaataactcgaattccgcaaccatgatgtcaatagaacttatcaacgaaagtcaatcttataattaagttgctgctaacagttggcatgggaattctccagtccctgccacccgaaaataccactgtgcaaccgcaacaaaaatgtatctgtatgtgtatctgtatctgagaaaacgatatctgagggaacgatcgaaaaaaaaagctgagactaaaacaaaagtcgggccgctgtgaatcattaatacgctacgtgagacgcttatggccggcacacgcccactataaaaagcctgaaaagcatgctaatgggttccgaattcgatcaggttctttacgatatggagcatcggcagcggcatcatcacttgaccttgtccagtggcattggcgcccattggcaattgacttctccataattcgacgccccaagatgcatatgtgattattggagcgcgatatggttgccatgagcacgatttcagctggagattcactttgattgcagcgcttacagcgaaattatgtcacattaactgtccgtggcaccaaagacgcggctctgtggacacaactaaacaattggccaacaactaaccaagctgggcaccaaacgcataaatatttacattaataacacagtactaagcgatcgaccgcaccctaatggcagtgacatcaaaaaaaaaaaaaagaggagaaataaaaagcaaagaaaagcgggaaaggggaaaaggtgggtgagccaaaggtgggcgtggtggaaacccggaggcagccactggaaaaggaaagtgcgtgacgtttctggttggctaagtagtcgtcagatacaagatcacttagaagcggatactgggaaaacaaattcacatgaagccaacgattaaagtataccattaccaatttctttacgaagtatctgaacctaatttggtacccaaagatgtatctaaacacagacatatatctcttttttaatgtcagtacttaacatgaaatgcgactgcattttctaagtgcatccatgtctgatgtgcatctgactagccttattaatggctcatttgccagacgctcattgcagccatttgttagccccaatgggcactcgaatgcaactcaccagtgccaccttgccactgacatccttctccttgagtcccagcgcgaataggtaatccaacaggtgcttgagaaagacggccagcaggaccagaggcaggaggagcagaaagacgatgactttcagattgaagatggcccgggtggtctcatcgttgcgatgcgcctgcgcggccgcctgtgtcgcggtgggcgtggccgaggcagtgggtcctgttaccgttactgcaccagccggaacggcggtggtggtgcgggttatggtcgttgtcgttgccgtctccaccatcactcacagcttgttgcacccacaattggctaatatgtgatatgagatatatgtatctgtatctcaaatatctctgtttttagcccagaaattttcgcggtcaaagcaaatatggcactcgcggcgactccaaaacagctgcagcgcgtcgaagatcaggcagcagactaaaaacgccaacaagcgactgcgaatgccaaactacgtgtacaagctttcgactctatagcagtatttccccccattgagtgaagatcgccagccgctcgacgctatctggttttcgtatctacgagctgcagatttgagtgggcagcggtagcacctttgagtggaagcgccgagtcgcgagtgaagctactgcgtttcacctgacgtcttagcccggctttctgtggttgtttcctttttttgttgttttttatgtgtttgggccatattgttttccccacgcgcacagtgggaactgcggatgaagatcgtagccgataagagcccagccgtgtttgctttccctttatctggtccgtaaagatggggtatctgccagtttaaaatgataaacaactgcttgaatatagtatgagtcttaatatcttcccgaaataattatgtaaattatgagtcactgcctcccagtgtgcgccactttcgaattgtcaaccttttggcacccgccaatcaaagaaacgtatttaattgggcttctaaggcgattgcatcgcttgggaaaagtgcactgaaaaaaatatatactgaagtatatacagctgtgcttattctgagaagtgggtgatatttaattttagtggattttatttttacaacttttgttatcagaatgacttgtttggaaacctcgaataaataattaaacaaattatgatacatttatatttgttctttgtgctttaagtattacagatatgtttgcgtactttattattctgttacacaaagccgcatgtatgttcccagtgcagaaaggtctctcgaactc

SEQ ID NO: 32780 - DNA, 1086 bp, DROSOPHILA
atggtggagacggcaacgacaacgaccataacccgcaccaccaccgccgttccggctggtgcagtaacggtaacaggacccactgcctcggccacgcccaccgcgacacaggcggccgcgcaggcgcatcgcaacgatgagaccacccgggccatcttcaatctgaaagtcatcgtctttctgctcctcctgcctctggtcctgctggccgtctttctcaagcacctgttggattacctattcgcgctgggactcaaggagaaggatgtcagtggcaaggtggcactggtgaccggcggaggcagtgggctgggtcgcgagatctgcttggaactggcgcggcggggctgcaagctggccgtcgttgatgtcaactccaagggatgttacgaaacggtggagctgctctccaagattccacgctgcgttgccaaggcctacaagaacgacgtgtcatcgcctcgcgagcttcaactgatggccgccaaggtggagaaggaactgggtcccgtggacattctggtcaacaatgcctccctcatgcccatgacttcaacacccagtctgaagagcgatgaaatcgacacaatactgcagctcaatctgggctcctacataatgaccaccaaggagttcctgccgaagatgataaaccgcaagtccggtcatctggtggcagtaaatgccttagcgggtctagttccactgccaggagcgggcatctacacggccaccaaatacggaatcgagggcttcatggaatcgctgcgagctgagctgcgattgtccgactgtgactacgttcgcaccacggtggccaatgcctatctgatgaggaccagcggagatcttccactgctcagtgatgcgggcattgccaagagctatcccggactgcccacaccatatgtggccgagaagattgtcaagggcgtgttgctgaacgagcgcatggtgtatgtgccaaaaatattcgcactcagtgtatggctgctcagactgttgcccaccaagtggcaggattacatgctgcttcgcttctaccacttcgatgtgcgcagctcccacctgttttactggaagtag

SEQ ID NO: 32781 - protein, 361 aa, DROSOPHILA
MVETATTTTITRTTTAVPAGAVTVTGPTASATPTATQAAAQAHRNDETTRAIFNLKVIVFLLLLPLVLLAVFLKHLLDYLFALGLKEKDVSGKVALVTGGGSGLGREICLELARRGCKLAVVDVNSKGCYETVELLSKIPRCVAKAYKNDVSSPRELQLMAAKVEKELGPVDILVNNASLMPMTSTPSLKSDEIDTILQLNLGSYIMTTKEFLPKMINRKSGHLVAVNALAGLVPLPGAGIYTATKYGIEGFMESLRAELRLSDCDYVRTTVANAYLMRTSGDLPLLSDAGIAKSYPGLPTPYVAEKIVKGVLLNERMVYVPKIFALSVWLLRLLPTKWQDYMLLRFYHFDVRSSHLFYWK

SEQ ID NO: 32782 - DNA, 4170 bp, DROSOPHILA
catttcaggttgcagtgatagcataaataaaataaaagcatcaggacgaagccaaagatgagggaaaacgtggaaatatgcaaggaattcatagcgtatactgtatatttatgctgctgtgtgtgtgtgtgtgtgtgtgaaaagctcgcgctgaggaaaataagaaaaatggaaaattcctcgtctgccgccgcgccactgttgcaatatttctcttaatgtgttgcattaatttcaccagcataaagataaaggaacaaaacacaactgtgaactgcgaacaaaaagacgacggttttcttagccagcttctcgtttttttgtgcgcaaggaatcactttaaccaaaacacaatctgtcaagccactctcttctaatggatctcactcgaccctattaggcaacaatttcgtttccttacgtttcgtttgaagtggcaaaaacgctagtgcatatgcactactttcatccgattgctctaaaaaccgtgaatattttactggaaagcgcctaaagccgtatactttttctatgcaatccccagctggatttttcaccacctttcaagcggttttttttttttttttttgaattttgcaaaatatataaatcacacagcctcaatgaccccataaaagtttcataatgagattcagcaaaggggcggaaaatgggtgtatgctgaaaagttgtttccaccgcccatgccaactgacaaatgcaggcggagcatccagacggagctggaaaattaaagcaatcctgactgctgactgaaattaaatgaaatacacatgactgaagcccggtgagcacgtggtggcctgtggccagttgtccgtgaccagtcggccacagaaagtatctttaatcggattttaatggaacgcttttaagcagcgccgccacctgtaagcccccgcgcagtaaagaccatgtattccttatttttccgtaaccggaccaatatttttattcacctccatccgccggatcctcctcaggaatgctcatctcggagcttcttaaatttattcctgctgaacaataggataattcgatcttgccagtcagccggaagtatgagaatcactcggtagagtaggcatgccattcccggcacggtgatctcggcctcacccctcaccattccggccactatacgctgggcgacctcctctccggtgaacagtggatatacgtcgccaaatcctatggtatgcgtcagctgcgtaacatcactgttcgtgcgcagaaaactgggcagcacggtggtcacatggatgtccttctggttctccagatccaactccatgcgcagggtcctcatgtgcgccaaggcgccagatttggtggtggtgtaagtcgcactgtagggcaatgggaaaacacctggaacgagtttgcacttgaatgtatctaactatagaatatagatactttgtggtaagtctcgcacctgccaatgaactgattgtaacaatgaaacctttgcgcaattccttcattttgggtaggaaaaccagcttggtctaagcgaaataaattaaaataaatagtatttatattacctaagtaaaaatttaagaaaactcacccagaaatgcgacgtaaggttaacattgatcattagctgcacatcggccgggtccggattaaacatattgcgatgcatcatgacaccagcattattaaccaggacggtaactggacccatttcctcgaccactttggagttcagctcaactagatcgtcgtaattggttacattggcctaggaaattggaatttgaataagattataattacttgtagttagtttaataattgtttcgaactattgagtatttaaaagccttaattaaaatacatatatataagttaatataccttgtatgcctttgcgcgaaccttatagatatcttggatttgcttgacggtgtcttccgctccggaaacattgatatccaccacggcgatgtgacagccttttttagccagttccaaggatatggcacgacctagtccatgaccagctccagtgacctagatcgtaacgagataaacacattgattatataagttgtgagtcattgactgcagtaagcacgcaatcaagtttgccactcaatttctaagtcatgacaagctaatgaaacagtgacagtgacaattcatttattaaacaaagttttatgtgtttaaattgtgatttaaattaaattcaattcaaatttaaaagtaaagaaaaaacgttatataataagcgaaaattatttcataaaaatgacctaataagctaaattgcgaatatacttgcaacatttcctgagtgaaataaaaataaaattgaatttaaaagctgtttttaaaataaactaaagcagaatcatttgttggttgatacccccgctctacatgtatctcaataattgaatcaattaatcttttcaaatcggttcaaattgtgccagttattccagtttattacgtttttagtaaatctgagtaaagggccacatactttagttgcacaatagctctagccatttgtaagtggaatacaaattaaaatgatcatttagaattgcgtcaatatgtgcgcaaatggaaatttaaatgtatgaataaactgtcaaattagcagaataatgactgtccaccgtttgttctgaattaaaaactgcaattgcacgaatttaagagcaaattaatgtctttgaccattaaccctaccaggttctgcatggaaatccattaggttttcgccaaccaggttaaaggtgcctaattcgttctgtatctgattataattgaagctcatagtttgcagatacttttagtaagaacaacaaaacattgctaatattacaaaatacatccatacattgtctgaaatttatacgattcactgacttctcaactatcatgtaactaatacgctttcgacagccaagtttatatgaaattttgtttatctcatctatttggaccaaactcaccacggccacttctcccgcgatacttttcggcgccgagcaccagcagagtttggcgatcagtcggccgagtagtgctaccaaaatgagtagtggcgttatggccgccaaaccgatcagtgcgattatggcctgcagttttaccagagtgtttcgtactacttctgacatttttcttattttttaaccaccaacttttgagtcacaaccgtgccgagagaatggcgaaaacgcattgaatcgcaagtcgcgaatctcgagccgtcgaaagcggatcgatcggcaaaactggcttgccgtcgagattgcaattcgagtgtatccacaattgacccggttcgcggtgttcggcaattagccgcgactttcagcggaaccccaccaaatgaatgcgagcgtgtggcaagcgtccatttacacacctcacctattaaccagcgcgacctcaactccctggccatgtttttggagctctggagttgggggttattgtcagcaaataaacagaaaagtcacctcctgcacagatgagacagtcgcggcatcgcaccagcagcccattagtaataaataaatgccacttttttttttttgactacaactacaagtgtgtagcagctccacatatccaaacaaatatactcgtgtatacttactcaataaatgtggaaacaaaaaaaaagcggagagatgccaacgaaaaaatgattttctgacaataaagtggatatatccataaacgaagcggagcagcagaacatatagaaacgtatgggaaggggggagagtaccaacgatatagacagccaaaggataattttatattgcgggtgggagggggaaatgcagtggaaggggagagggggcgagtgccggctgtggttttagttaaaaataacaaagagcgagcgacaaaaacgagattcgtgaaaaacgtatatttcatattcagtttttcttttcgcagggtgcttcagctgctccataaagcttgccgttaattttcagggtaatgagagtattaccgatggagtaatgtgcaaaaacgatttactatatatatatataccgctgagattgagcgataaaataattcaggtatatattatagttgtgacgaactaaaatgggattcatcggaacatgaaaaaatatatatatacttgtattt

SEQ ID NO: 32783 - DNA, 966 bp, DROSOPHILA
atgtcagaagtagtacgaaacactctggtaaaactgcaggccataatcgcactgatcggtttggcggccataacgccactactcattttggtagcactactcggccgactgatcgccaaactctgctggtgctcggcgccgaaaagtatcgcgggagaagtggccgtggtcactggagctggtcatggactaggtcgtgccatatccttggaactggctaaaaaaggctgtcacatcgccgtggtggatatcaatgtttccggagcggaagacaccgtcaagcaaatccaagatatctataaggttcgcgcaaaggcatacaaggccaatgtaaccaattacgacgatctagttgagctgaactccaaagtggtcgaggaaatgggtccagttaccgtcctggttaataatgctggtgtcatgatgcatcgcaatatgtttaatccggacccggccgatgtgcagctaatgatcaatgttaaccttacgtcgcatttctggaccaagctggttttcctacccaaaatgaaggaattgcgcaaaggtttcattgttacaatcagttcattggcaggtgttttcccattgccctacagtgcgacttacaccaccaccaaatctggcgccttggcgcacatgaggaccctgcgcatggagttggatctggagaaccagaaggacatccatgtgaccaccgtgctgcccagttttctgcgcacgaacagtgatgttacgcagctgacgcataccataggatttggcgacgtatatccactgttcaccggagaggaggtcgcccagcgtatagtggccggaatggtgaggggtgaggccgagatcaccgtgccgggaatggcatgcctactctaccgagtgattctcatacttccggctgactggcaagatcgaattatcctattgttcagcaggaataaatttaagaagctccgagatgagcattcctga

SEQ ID NO: 32784 - protein, 321 aa, DROSOPHILA
MSEVVRNTLVKLQAIIALIGLAAITPLLILVALLGRLIAKLCWCSAPKSIAGEVAVVTGAGHGLGRAISLELAKKGCHIAVVDINVSGAEDTVKQIQDIYKVRAKAYKANVTNYDDLVELNSKVVEEMGPVTVLVNNAGVMMHRNMFNPDPADVQLMINVNLTSHFWTKLVFLPKMKELRKGFIVTISSLAGVFPLPYSATYTTTKSGALAHMRTLRMELDLENQKDIHVTTVLPSFLRTNSDVTQLTHTIGFGDVYPLFTGEEVAQRIVAGMVRGEAEITVPGMACLLYRVILILPADWQDRIILLFSRNKFKKLRDEHS

SEQ ID NO: 32785 - DNA, 2354 bp, DROSOPHILA
ttgcaagtttaatctgtttaacgggtcaatctggcacacattttgtgattcaatgccttcggcattgattgaaatggactttccatgccaaccacctgtgtagctgcacgtatgtgtgtgtgtgtgtattctatgttaggtgtgtgtgcgaatgtcctggctggccttaaatttggactatcaccggcgaggacatttaggtcaattgaattgtaataaagtacacataatgtgtcaagaacgaaattgcgttatttcgattcaattgcatttaataaagtaaacagcttctcggttggcagataaacaatttacaactacaccgatgccgccaggacatccgcacggctgaacacctcaaggattacctcgggcttccagtttacctatacattcgagcttcaaataaaagactaggtcattcgttgactttttaattgagaaacttttgataaatcgaaggtcctgcggtgtggctttaaggcttgatattgttattgacaatcattatgtgaatgccagcgatgtgcatacaatgcaatatttgaattgattttaaaacaatgaatgctgcacaagatgaccctcgagaaccgaatcactttgaaatacagaaaaacaaacttattaattagatttagcttatgtaaaggctcatcttaacgcaactaagcttccctttacgaaattaagcttaagttagtatcatttgatgaccagtcaattacaattacgtgtggctatgccagaactattagttgcaggctagtctgcagttttttctctgtgcacagtaaccttggaatggggctctattatttcgcccgccaaactgcagtaggcccacaaagcaagcggaccaagctgcagatactaattactaattagcagtagcagtagcagtcattaagccaatcagaattacgtaacgctcagcggcgcactgatgcaagacaatggcccatataagcaacacactcctccgctcatcttggcccaattaggccaacaatatggagcacaagtggcgactacttaccacagcatgtgatgcctcggcaggatcctcattggggtcgatgttcgcctgctggcgccacatcatcagggtcacgacctcggcgccgctctgccagtgatcctgcaaccgattggccaactcactgatttttagccccaggacatcggctccattcagctccagcagggtgtcgcccaaacgaactccgcccctttccgcactcgacttggcctgcaccccgctaacccaaggatacggatcccagggggcacggctcaaattcagtcccaatgtgccgttcgcgcaggcgtagatggtgcacaactgaagcatattggctgtaacagaaagtgggttcaaatcaaaacagacactcaagccacaaggtcgctcataaatttggccaattttcaacaccggagacgcacacactcacactccctcgccgcgctcatctaattacctgggctaacaacacatacatatataaacaacacctaggcgaggagagctttgaaaaatgttgccaaactgttttacttcgtttgtcagagggccaagatgccccaacactagttgacatgcccatcacgtacacactcgcatttattatgcccccgagtgtgtgtgattggggcaaccggaggccggagaccggagtcctctgatttctagttccaacacttggactcatttgcacctttcgacgggcgattccttcacctttcggcagcttcgagacgaaacccaattaattagccagaaagtttcggtgccaagtggtcgtaattacgcatacgccacgttcgccaggcgtaaaatttgcgcacataaatcaaaagttttgcggagcccagtcaaataaaaaacaaaaaccaaaatagaaagggtttctttcaaactttttagcaccaaggaaaatcaattaagcaacaaagccaagccggaactcatatatatatatgtacatatatactgtatatgtatggtattagctgttctaccaactggaattctttagcttagtcacaaatcgatatcgaagtcatcagattcgcttggctgtcagtttaaaagattctcactgcgaaattgattatgtttcttgcactcgagaacattgagtagactgagaatttatagcttcctccttggctgtctacgcacgcggatacagatgtgagtttgagtacgactatgagttcgagtgcgagtatggcaaacttgttcaaatcacttcacttcacttctactgacattggccatgaaatcgctatgacgtcggcttattgaagtgggcacagcaatagttaaggtaatcattgaacaataa

SEQ ID NO: 32786 - DNA, 354 bp, DROSOPHILA
atgcttcagttgtgcaccatctacgcctgcgcgaacggcacattgggactgaatttgagccgtgccccctgggatccgtatccttgggttagcggggtgcaggccaagtcgagtgcggaaaggggcggagttcgtttgggcgacaccctgctggagctgaatggagccgatgtcctggggctaaaaatcagtgagttggccaatcggttgcaggatcactggcagagcggcgccgaggtcgtgaccctgatgatgtggcgccagcaggcgaacatcgaccccaatgaggatcctgccgaggcatcacatgctgtggtaagtagtcgccacttgtgctccatattgttggcctaa

SEQ ID NO: 32787 - protein, 117 aa, DROSOPHILA
MLQLCTIYACANGTLGLNLSRAPWDPYPWVSGVQAKSSAERGGVRLGDTLLELNGADVLGLKISELANRLQDHWQSGAEVVTLMMWRQQANIDPNEDPAEASHAVVSSRHLCSILLA

SEQ ID NO: 32788 - DNA, 3041 bp, DROSOPHILA
gcactgtatggagttgcagttgcactctcactctataagatggccattatgacgacgatgatgatgactatgatgatggctcaaaaaaaacaggacattgtgaggtgcggggcgctgcaaaaaggataatacaactttctcgctctatttgccacgcacacacatgttgttacagtgccgtgatttttgttgcatcaaattggaattttttccttaaatatggtaaacatcgatggggcagagatttatgtatagtgcagcggcgcgttgatgaaaatgactcgccgctgcattgaccgtgtttactgtttgtcagacagggcagcaatttacgcccacatgcaaaaaacattaatttgcatgcaagtcaattatcaggaggcagcaaacagacaggcgctagttaccagttttcagtattcagttttctgttttgagttttcagttttcagtttttcaatttcttttgcacaaacattggtgttattattccgccataaggatgcaaggactaatggagatactcttgaaatgggtcatgatattccaaaagaatcgcatatggcgcagaaagatttattttgtttttcattaaagtaccatacaaaccattaatttagctcgctactcttatagagcatctgcaggttgttgagctcaacgtggacactcaatggcgaggactttcaaactgccaggccagcacatttctaaatgtttttattaattaaaaatattgcaaattaaacacatttccaaattgcgttttgcatttttcgtataaatacgcggtcgatggaaaaaatgcaaatataatttacaaagcatacatttcacattttattcttattttatgttcattgcattttggtttgctctatcgccgctttcgcagccatcagttcttaaacttgcctcaaagctcttaaacacgattactacctgctaattagcttagaatacctatgttttgggaccagtcttgggtgcatgatggggtctacctgcttttgatggtcacctcgcacttggcagccagattgcggagggtgaggaactggccggatgccctaatctccggccagctgcaccggagcgagtgagcaggtcccaggaatcggtggcccggagtctcgatgacagtctcgaaagtgggtccatgtggcaggtggtctaggtgccacaggaagacggcgtgctcatcgccgccgccgatcgcaatgacagccaagaaaaatgtgtgcactctgacgtggccaaaagtggaggactcctcgctcagccgcaggcaggccacgccctccaggggcagctgggggcggacgtgcaagcgttcgccgaacgtgccgtagatttgcaacactgccagccggtggtcgccgctcaaatgtcgcaacaactgccattcccgccgacctattgaccccgcctccagtggcagctcctgatttactccggctgccggcgcctgtttatggctccccgctgataaggatgcacctcccgagttctcaaccaccgccagcgcctgcatcgcgactgttgacaatttgttggccactggctggccaagttggtaactgtggctgctgcatgatttcccagttgggcaatgataattttgatactcgctctcgctgcttgctgacttctcatgccccagctgctgccgctcctgctgctgctgttgctcctgcacctggacaccattatttatggtggcaacttcatcgcagcgcaatccgtcttgatctggcccagtaatccgccaacttttcttactcaactttaactttggtttaacgagcatattgttgtgaccttcctccgaaaagtgctcgacagcggcctcctgatgctgcacttttatcagcgtgcaacgtggcaggacagcctcctgcaccgcctgctcctgctcctgcccctgctgactctttcttctgatttcccgaggactttggtccaccaaaactgtttcgagttgcctggagatttgcttgccgcacttggacttgccggaactcgtcttcgccagcgccattttcggttgattatgatattcatttgtgcacttgttgacgctgctcagctttccatggccctgggaggcagccaccttgttggttttccctgaaaagaggcaccgaaacggaggaccattacaaaaagtacgaaatgtaaatataataaatacaactgggacaactggatggatatgcacgcaagttgtccatttgcgctcgtttgtgttttgcccccaaatcccttgacacaaactcccttgaacttcttcaagtggcaaatgaaaatagagcagaaactaagtaaatatccgcgtacctgcatctgtataaaaatggttgaactatggctgaactatgggtgaatccgggcgaatcataaagaatgcacacttaatgtagacgcaataaaaacgcactaagcacggcataatctgggaaaaaacaaagcgaaggaccctgaagtgggtaaaagtggcaaaaaatgaagaccagcagggaaaaacaaatgcagacaacggcggaaaattctgttgctgcttgttacctccgctgtaaacttcactccaagttaacttggtcgacacagattgaaaatggcaacaagggcggctaaactttaaacgaagccgcccagtggcaaagcaagaaaagcaacgccaacaacaatcttccggcaagatggcaacgcagctaagcgcgaaaaactttagcaatttatgttacataattatgccataaaaagaacaacaagcgaagatgagccattgcgctcaatttcaagcactcttgactcggctccgctttctcgtcacatttttctttcatttgcgccgcatctcggtcgagatttaagtgaaacattgacacttgccgctgtcgaaaagttatggcccacacaaatgaggattccccgctcccagccaggatgttgccattaccgcaggatgtattacagcggggcgggcacaaaggttatttccacagggttttgcattacatgaaatagaatacctttcg

SEQ ID NO: 32789 - DNA, 1041 bp, DROSOPHILA
atggcgctggcgaagacgagttccggcaagtccaagtgcggcaagcaaatctccaggcaactcgaaacagttttggtggaccaaagtcctcgggaaatcagaagaaagagtcagcaggggcaggagcaggagcaggcggtgcaggaggctgtcctgccacgttgcacgctgataaaagtgcagcatcaggaggccgctgtcgagcacttttcggaggaaggtcacaacaatatgctcgttaaaccaaagttaaagttgagtaagaaaagttggcggattactgggccagatcaagacggattgcgctgcgatgaagttgccaccataaataatggtgtccaggtgcaggagcaacagcagcagcaggagcggcagcagctggggcatgagaagtcagcaagcagcgagagcgagtatcaaaattatcattgcccaactgggaaatcatgcagcagccacagttaccaacttggccagccagtggccaacaaattgtcaacagtcgcgatgcaggcgctggcggtggttgagaactcgggaggtgcatccttatcagcggggagccataaacaggcgccggcagccggagtaaatcaggagctgccactggaggcggggtcaataggtcggcgggaatggcagttgttgcgacatttgagcggcgaccaccggctggcagtgttgcaaatctacggcacgttcggcgaacgcttgcacgtccgcccccagctgcccctggagggcgtggcctgcctgcggctgagcgaggagtcctccacttttggccacgtcagagtgcacacatttttcttggctgtcattgcgatcggcggcggcgatgagcacgccgtcttcctgtggcacctagaccacctgccacatggacccactttcgagactgtcatcgagactccgggccaccgattcctgggacctgctcactcgctccggtgcagctggccggagattagggcatccggccagttcctcaccctccgcaatctggctgccaagtgcgaggtgaccatcaaaagcaggtag

SEQ ID NO: 32790 - protein, 346 aa, DROSOPHILA
MALAKTSSGKSKCGKQISRQLETVLVDQSPREIRRKSQQGQEQEQAVQEAVLPRCTLIKVQHQEAAVEHFSEEGHNNMLVKPKLKLSKKSWRITGPDQDGLRCDEVATINNGVQVQEQQQQQERQQLGHEKSASSESEYQNYHCPTGKSCSSHSYQLGQPVANKLSTVAMQALAVVENSGGASLSAGSHKQAPAAGVNQELPLEAGSIGRREWQLLRHLSGDHRLAVLQIYGTFGERLHVRPQLPLEGVACLRLSEESSTFGHVRVHTFFLAVIAIGGGDEHAVFLWHLDHLPHGPTFETVIETPGHRFLGPAHSLRCSWPEIRASGQFLTLRNLAAKCEVTIKSR

SEQ ID NO: 32791 - DNA, 2381 bp, DROSOPHILA
tgaacgcagtggagaaaacagcgggataaacagtgcaaacaaaatattaaataaaaatttagagaaacatttaggcataaataacttgaagtgaactcaatgtttcagaatttgtgcttagaattaacaaatatttatgctgattacttatgaatgtgtcatgagttcaagccgattaaacaatacataactataaaattctctttaaagcttatcaaaaagcataaatatatatgaaatgtgcgaacaattatatgtggtttgataactattgtagttagcagttgtaataatgcatagaaatagtgtttgcgtttaaacatttttaaaaaatttctgtttggatagtaaaatatgtgaatatttttatgttattttaaactcataaacgaattatggccgtctgcaaaaaattttaacacccaaaatattccattaaaaactagattgatttagaagaattttatagggccgtgcaacacaaaatcgccagttggttccattcgagacgagcacctcaagacgagacgataataatgataacgataatgaataaaaaccgcagtttgtacaattcacgaattttctaaccacaaaatgaaacgaactttaggactttgttaagtgtgttaaagactttaaagcggcaagcgagatgaaaacgttgaaaagtgtgaactttattgtatgaggtgtgacaatatgcaggatagaatccagatgtttaaacccaatatatatgtgcatttaaactgaagtctaactcgcattcgtgttccatttcggttgcagagaacaacgtggccgccagcaaagaaccatccatgattggcccgcactcttccagattgcaaaagaaacgcgccctcaacagctattcaaattttcccttataacgaataattctccccaaattggcgactaatcgagatatataccaaagatatcgcagtgcagtcagtaagtttaaacttttagccgtaactagtcaatgccaaaaatgatagtggataaatcggaactggtgggcgagaatgcctgggcaaaactactgcccgatgagaaggataaggccatcattgtgaagatgaacaaaagtagtagcaataacaacgattccaaggagacgacgcccctcaatgtggatcaactggtggcagccagcaatccagcagttgccggcgagcaaagtgccgtctgcctggaggatacctacaagcgtacctcaacttatgcctcaaacatcaattcaacgggcggcgagtctagcggcagtggaactcaactttcccgcaaggagtccatcttgggcagctttcatcggcaaatccggcgatccataaaagcggttagcgaatcgcccggcccacttacgaggtgagtgagataagatctttcaagtattgaccaacatggcgtatgagtaatattccattactcatacgccccgttgagagctatgttataaaaccagggggtttctttcgcgtgctcttggtaacaaaagctaagctaattttaagccaatattaaaaggtatttttactaacaaacctgattagcgaacataggaatgtaggaattttctctttacctctgacgttctggtgccacttttttcccaatatttatttgcatacttttaatcccaaaatattttgaactcaagcgactatttctgaaaatttcagcatgggttatttgtagttatcctttgtggattaaacggctcatttatctgtgtaaattagttgtgtaactgattccaagaagctctttgtaatgcaaaatcatagcaatgctctaaataagtaagctatcagcaatatttagcattatactggaaatttccaagaacttgcagtcatgcaagaccacaaattcgaatatatccactcaatcggtgcccacacacctcgatggcaatgtgttgttggtaaacaaacagcatttgctgcacttccccactgacttgatttcaagactctttttcatctttttcatatgttatgtctgatatgcaaatggagctgacgtctgtctgttggtcagttgagaatggagaattgagaacggagaaccgagaatcgagaatcgagtcactagagcgagataaaccttttgacttgattgcctgaaatgacaaaattgaattattttgatttgagcaccgacagtgggtggacaattaaatattatttccgcctgttgattctggctcagcgtgtgatttagatccagatatatgtacatacatgtgttgtggagatactgattcagatgctggctgccttaattgggaattgagactcgacggtatctgtgtactatccgtgccgaaatgaacgcccctgacattacgcatgtgtctgtttaccgag

SEQ ID NO: 32792 - DNA, 381 bp, DROSOPHILA
atgatagtggataaatcggaactggtgggcgagaatgcctgggcaaaactactgcccgatgagaaggataaggccatcattgtgaagatgaacaaaagtagtagcaataacaacgattccaaggagacgacgcccctcaatgtggatcaactggtggcagccagcaatccagcagttgccggcgagcaaagtgccgtctgcctggaggatacctacaagcgtacctcaacttatgcctcaaacatcaattcaacgggcggcgagtctagcggcagtggaactcaactttcccgcaaggagtccatcttgggcagctttcatcggcaaatccggcgatccataaaagcggttagcgaatcgcccggcccacttacgaggtga

SEQ ID NO: 32793 - protein, 126 aa, DROSOPHILA
MIVDKSELVGENAWAKLLPDEKDKAIIVKMNKSSSNNNDSKETTPLNVDQLVAASNPAVAGEQSAVCLEDTYKRTSTYASNINSTGGESSGSGTQLSRKESILGSFHRQIRRSIKAVSESPGPLTR

SEQ ID NO: 32794 - DNA, 2672 bp, DROSOPHILA
tgtgtgtgtgtgtgtgtgtgttttgtatttgtgcacatgttgcactgcatttgaagatctcgtcgtgcacttaatcacttgagccgtcggcaccatatggggtcctttcttttacttcttgttgtctgtgccccgcggcatctggtgcatggtatatgtagtagactgagcggtataacctgttaatcagatatgcagattgacccaaaaattatgccacaaagcagctgctgggcgacagcgtttaattgacaattaataaaacttttaatttgagcccaattggcacattgcacattatggtaatggtaatggtagtggggtagcatggtagttggtcaattggataatgcccacagatcccagccatttgcactggtaattcttcattaatcggctacgcaatcatttacgtaaagcgcagagccaccaaacctaattgcaagttatgaatatctcatcggatattaaatcgatggccatcgcttaactccgaccagcaacgaccacgatgacgatggaaataataatgaggatgactgcgatgaatggattgaatggcctgaatggtatcgttcgacgaccatccatccgtccgtttatccgtccatttgtccgcttgtccgtccgtttgtccgcttgtccgtacggaagtggcgacacttaattgcgaattgagtgcattttcaatttttattgaaccggcgcccagtcgagcattatgctgcggtgtggtatcattaaatactcggttgctttgctgctgctgcgaagtatgctacgaaaatgcaaattaccgagaccgcccagagtgggcgtggcagttactgccatgtgctcattagcggtatctaccagacgataaccagcgtagtaatcgatggaataacttgtcttctttatcagttggagcacatgcaaaaatatactcaacccatcatcgatgaagtcagtctacagaagtcatcccgctatttcggtcgttaaaaaaataaatgaaatgggagctgtaaccttcttaacaattattttggtgaccttgctgggtcatcgatccagtgccctggagttcgaagagtgtgccagtgctccacaattgggagtttatgtcgccagctctagcaattgctccaaatacatatattgtgccggtccaggatcctttgaggccgagtgcttggatggtcattactacgacgaaaaattggaacgctgtttggatcgaaagttggtgtcgagatgccgggatcccgtaggcataaccactaaatccccctcgatggtcaagaagccagctcagaaagcggaaccattggcgattaccctgcgacttttacccaatgccggaccatgttatccttatatggtctgctacgagggggctggactggccaaggcctgtactcctgctcatctagtgtcctgcaatcgcatgcaaacgcgagagaatatcatcaactgccaggagggagtctatggctttatgccacatccacggaactgcgcctacttctactactgctccagtggctccaagctggtccatcgatgccacttgaactacacttggcactacgaacggaggtcctgcgtccagcagtccgagaggatgtgctactccgaacaacttcggcttatacgaaataaaataggaaaggccaaccggacgtaattctaatgttaggatatagatttaatttaagttaaagattcgtataaatagctaaacatgtacacctagcgtaagcaacagttgaataaagaactgcaattgggaaacaaacaggagtaaatgcttctgggtggggatgtgccttctcctgtgccctacttccagtaaaacaggtgggagctgcgcacatcgaagtggtagaagcgaagcagcatgtaatcctgccacttggtgggcaacagtctaaagcaaggcgacaacaataatcgttagaaataatcgctggttacctgggctaattcaattctcacctgagcagccatacactgagtgcgaatatttttggcacatacaccatgcgctcgttcagcaacacgcccttgacaatcttctcggccacatatggtgtgggcagtccgggatagctcttggcaatgctaaatgtagtagccgcatgagaccaagtgatctgcccaaactataaaccaatcttaccccgcatcactgagcagtggaagatctccgctggtcctcatcagataggcattggccaccgtggtgcgaacgtagtcacagtcggacaatcgcagctcagctcgcagcgattccatgaagccctcgattccgtatttggtggccgtgtagatgcccgctcctggcagtggaactagacctaaatgcgagttatatatacataggtatcaatgaagtggtaagcactttaaccaagtaagcttacccgctaaggcatttactgccaccagatgaccggacttgcggtttatcatcttcggcaggaactccttggtggtctgcaaaatcaagaagttttatatttgtcccattttcagaagcacacactcaccattatgtaggagcccagattgagctgcagtattgtgtcgatttcatcgctcttcagactgggtgttgaagtcatgggcatgagggaggcattgttgaccagaatgtccacgggacccagttccttctccacctt

SEQ ID NO: 32795 - DNA, 672 bp, DROSOPHILA
atgggagctgtaaccttcttaacaattattttggtgaccttgctgggtcatcgatccagtgccctggagttcgaagagtgtgccagtgctccacaattgggagtttatgtcgccagctctagcaattgctccaaatacatatattgtgccggtccaggatcctttgaggccgagtgcttggatggtcattactacgacgaaaaattggaacgctgtttggatcgaaagttggtgtcgagatgccgggatcccgtaggcataaccactaaatccccctcgatggtcaagaagccagctcagaaagcggaaccattggcgattaccctgcgacttttacccaatgccggaccatgttatccttatatggtctgctacgagggggctggactggccaaggcctgtactcctgctcatctagtgtcctgcaatcgcatgcaaacgcgagagaatatcatcaactgccaggagggagtctatggctttatgccacatccacggaactgcgcctacttctactactgctccagtggctccaagctggtccatcgatgccacttgaactacacttggcactacgaacggaggtcctgcgtccagcagtccgagaggatgtgctactccgaacaacttcggcttatacgaaataaaataggaaaggccaaccggacgtaa

SEQ ID NO: 32796 - protein, 223 aa, DROSOPHILA
MGAVTFLTIILVTLLGHRSSALEFEECASAPQLGVYVASSSNCSKYIYCAGPGSFEAECLDGHYYDEKLERCLDRKLVSRCRDPVGITTKSPSMVKKPAQKAEPLAITLRLLPNAGPCYPYMVCYEGAGLAKACTPAHLVSCNRMQTRENIINCQEGVYGFMPHPRNCAYFYYCSSGSKLVHRCHLNYTWHYERRSCVQQSERMCYSEQLRLIRNKIGKANRT

SEQ ID NO: 32797 - DNA, 2276 bp, DROSOPHILA
ttaaaaataaattgaggcaccttgttctgcggctaaactaaatagtggcaccgcattcggtggagcccacttccaattttcagtaccaaactggtgcgggggtgggggggaacgcgaccaccgcagtatggggccaaaaaaattgatttcaacttcggttgccgccgcgtatttataggctgaattgtcattttctcctcttttctggttgctgcattttttttattatttacttcaacccaatcctgaatgctaacaaagagttctcgaaaggagagcgtaaaacaaacaaatcacggaccgatatgcacacataaaaattcataaatattctattttgagttgacattttgacaagtgaatatgaatattgcagtcgcagcgcacaaatttataattgatatgtataaataatggacaaagccattttgtaaatgggtttaatgaaatgaacgagtgtagctcttgtaatagctcgccaattacaaacaaagcaaaacaaacaatagtcgaaaaagaagagtggactttctggtgccctgggcgcaaatatttttcaaaacatttaatttattgtatttgaaaagttgtaacgatttttcaaaaatatcctcctaaaatggcaagcaatttactttcatttttttaagcaatagactttaataaacgtttgatgaaaaaaaaaaatcatcaagttcacccatttaatataccccttaaatctcaatttacaggtgccatcgcttaaataaaatatacttaatatttcacatttggcgttaaaagcaaaagtacccaaaagccagttagctgcaattacaattaaattaaattggtttatggtaagcaactttaattatgttcgatagcaaaacaaaccaagtcaaatttgctttacacttcggatcgcatggcacaaaataacaccgaaaatcatgatttagggtgaaaaaaatttaaatttaaatcgaaagttgttttcccagcccttaaagcccagatggacagcgccgatgagcagctgcagctggatctggacaggatatcgatggagagtcgccaggccagcagtttcgatgacctcatcgagctgaccaacaactcggagcgtctgatggccagagtcaattccagcttggatgacctaaacaccgccctcgacaacctggaggctcgaacggaccgggttctggtcgagattcggaggctaatcagctcggaaatgccggcacaaggtccgcacgatggatgtggcgatccagatgccagggcgtaggcgggcgaatggctgtgatacgtaatgtgataataaataaatgtattttattttcatatcgaaatcaattgatgctcaactgctcataggaattgaaaagtgattggtcgtagctcttcttcggtttcgaatcgaatggggatcgaaaacttcgcgggggcattgaggccatagaggcagaagatccataaaacgcccgacagtttgtttgttttttatgagaactgtaaccctagcacacaaataattagtgagctatttttatggatcttcggatgcggggctgcgcatgcgcaatgcgcattgagcagaagtatcaaggtgctgggggtcttcatccacaatcttaattagaatttacatacattttcaatatgcgtgtgtgtgtgtgtgtgtgtgtgttttgtatttgtgcacatgttgcactgcatttgaagatctcgtcgtgcacttaatcacttgagccgtcggcaccatatggggtcctttcttttacttcttgttgtctgtgccccgcggcatctggtgcatggtatatgtagtagactgagcggtataacctgttaatcagatatgcagattgacccaaaaattatgccacaaagcagctgctgggcgacagcgtttaattgacaattaataaaacttttaatttgagcccaattggcacattgcacattatggtaatggtaatggtagtggggtagcatggtagttggtcaattggataatgcccacagatcccagccatttgcactggtaattcttcattaatcggctacgcaatcatttacgtaaagcgcagagccaccaaacctaattgcaagttatgaatatctcatcggatattaaatcgatggccatcgcttaactccgaccagcaacgaccacgatgacgatggaaataataatgaggatgactgcgatgaatggattgaatggcctgaatggtatcgttcgacgaccatccatccgtccgtttatccgtccatttgtccgc

SEQ ID NO: 32798 - DNA, 276 bp, DROSOPHILA
atggacagcgccgatgagcagctgcagctggatctggacaggatatcgatggagagtcgccaggccagcagtttcgatgacctcatcgagctgaccaacaactcggagcgtctgatggccagagtcaattccagcttggatgacctaaacaccgccctcgacaacctggaggctcgaacggaccgggttctggtcgagattcggaggctaatcagctcggaaatgccggcacaaggtccgcacgatggatgtggcgatccagatgccagggcgtag

SEQ ID NO: 32799 - protein, 91 aa, DROSOPHILA
MDSADEQLQLDLDRISMESRQASSFDDLIELTNNSERLMARVNSSLDDLNTALDNLEARTDRVLVEIRRLISSEMPAQGPHDGCGDPDARA

SEQ ID NO: 32800 - DNA, 2216 bp, DROSOPHILA
taccatcggttgtcatgcgaccgcagcagcagcaactagaaccaaaagcttcaaaggcggccagaacatcaagttcattctaagccgtttgcattgcaaattctgcatcgcctggcgaaaaagggggacaactcgatgctggttggccccacaatcacttttcaattaaatggcattctttcctctttgccattattttgtgttttttttttgctttagccatggctctagctttttcaaccagctcggagccaaatgattctgccacaaaagcaaaaggcgttaaaatgcgttaaggggtgaaaaaggggaaaaaggggacaactctgctttgaaaataacgatatcaatttgggtccatttatttacttgaccaactcgacgagtgaacgccttaatcggcctctattcgcattaacattctgttcaattgtcaatcattaatacggattgtcatcgacatgtcacaaaaactcgcaacagattgacacgaagtaccatttaaatccacccaaattaattataaaaccaattagcaagggctcggtgctcgggattaacacagatcctgtcataattaggtgccgaaaagcttttcttatttgcagcgacaggaaaaacaataaaatcccagtcggccaagttgcccatttgggggcattagtcctgcgggattagggccaaactttgttaattcgccgaaatttaagggcccggccccgtacaagtaagcaaataactgggaatttccgaaccataaaaaaaggtgcgcttcgcatcgaattgggaatgaattgaaaaaaatttgaaaccttcgagcaaaatatgttgctaacttttcgcatttacttttatttgaacagcgtaatacctaagtacacgtaagtataagtacgaatgaaatggctacataagtacggcatggattaaaagtttcggctccagatcaacctgaagctatgtccccttcgaggaattggtgctgcccagcgtgggggcgatgggcgtggttggagagtcaaccgcctccactgcatctccatgtttgagccaatatggcgccaaccgcagcatgagaatggcgcccagcggggcggtgaatataatcgccagcaccgagatgatgagcaaattcccggccagcgcaagctgttccggactggccacgctggcagcacgtgccatgtccaaagccactggacccaaggcggcctaaggggaaaagagagacagagagagagggttagctggggctcatattaagcagcggccaccgctgcgtatgagtgatatgtgatttgcagcggggtcagattaaatgcagtttgctgtgcaattttaattaaatcagtacgaaaaaggtggacactgaaatatgcaccgcatattagggcaaagttagacggacgcacacatgtgaccgccgtcctggtttttttttttggttgtcttcctctggattttttggacgaagtaagtaagccagcgtaacatttaaatttctgtaaaccacagacgcacactcgcctgctcaggcgacataaacaaaatgttcgcttgcggttaaactgcaaacaaaaggctggcatgccaactgcagccgcaggagcaggagcatgagcaggtcctgcgatgactctgactctgactctgtctctggccaagagaacatgacctgcaaatacgtgtataacttaagcatggggaaaacaccaggccagaacaaccagagcggccaggacgaccaggacaagcaggacaaccaggacgatggtcagtctgctcgtggcaagcgagtgaaatggccggcaatgaaataaaaagcgccaccaggccgggagacaacgaatggaaaatgggaaatgaaaacgggctggtagggtaaaaggggactcggattgggaatggggaatgggaatgggaaccgcagcaacatgacacgcggaacgggaaacttacttggacagttgctttgggaaaaccggaaattgtaatgtaggcacgttcctttctcgacagatttccgccatatgtggataaatatgcaaaagccaggcgaaactgaaaacaagaacaagaaagtggtcatctctagatgtttttctccctccgtttctttttttttgcattttctgtgtgcttgcaggtaacatttgcattgcggtcccggaacattttcatttcagttcacccaccacacccaaccggaatctcca

SEQ ID NO: 32801 - DNA, 216 bp, DROSOPHILA
atgggcgtggttggagagtcaaccgcctccactgcatctccatgtttgagccaatatggcgccaaccgcagcatgagaatggcgcccagcggggcggtgaatataatcgccagcaccgagatgatgagcaaattcccggccagcgcaagctgttccggactggccacgctggcagcacgtgccatgtccaaagccactggacccaaggcggcctaa

SEQ ID NO: 32802 - protein, 71 aa, DROSOPHILA
MGVVGESTASTASPCLSQYGANRSMRMAPSGAVNIIASTEMMSKFPASASCSGLATLAARAMSKATGPKAA

SEQ ID NO: 32803 - DNA, 2480 bp, DROSOPHILA
ttgccagctattaatatcaattattcaaatagttcggcaaccagctgacgaacttcaaggcaatgccccccacattaccaataagctgattcattactgtccgttggttatgtcatcagagtgctccttttgttactttttcgcctatcgaagatgcagacgctttgttttcaataatgagcaacatctgatgcgtttaaaatgttggccatgttctttggtagcctaggtttgctctcaaagacttgtggctctagggcccagacgatagcaatgttcacaaaagtataacattgcaccagaaggctctttgtatataccataatatgccataaaggatgcagagaaactaaatgatttagaacagaaagcaagaccatacttgctgtgggttgtgtttcctacatttgtcaaagagcatttcaaacaaactcttatcaattgaatccacttaaagaacaatttacaaatcactcgcttattgacattatcattgaaaattcgtttcgattttcaatcgtgcttcctgccccgttcattttctatgataccaaaatagcagattggttgaccctccgcttttcacatggcagctcaaaattatgcgtgcacatgtatgaaataccgaattgactaatatttatttatacaattttgcggttcacagaatgcagataattcaattccagtgtcaaatttgccaaaatgtgcgtgtggctggctcagcccaccgctcacctcaaatgcaattcaatttggcgataaaccaatttaaagccgaccaaaaatgaacgaaaaactgtatggaattaaatgtacacatactcacactcgcatattccactgtgtgtgtgtgtgtgtgtggatgcgggtagtctgtttatctctcagtcgcggcttcggggtcagaggttatcgagtggcgaccgtcgaccgaagctttggaaaccgtgcaaactgttggtagtcgaacgtctatcgcagtgccaacaagtcggcgatgaagcggtttcttgtggccttattggccgctctgctggtagccgccgtccagggcggaattctgggcagaattttccacagggagtccacctccacaacaaccagcacaactacgacgaccacagaggagccccgccgacccttctacatcaacaacaatattcccgaaatcccgaaggactgtgtggcgcagttcaagtgcaaaaagaagctggcgaatgttcaggctccaaaaccgtgtgtgaaatactgcctgcacaggatcacctgtcccaataaccagaccagtcccgttcagcccaaccagtgtgtcgatctcgacgagcaacaggtgctggccgtccacgaggcaaacacggagcctccggtcgccggccaaaccaccaccgagaagaccatgatggtggccatgatcgacttcccctgccagcccggctatctgcccgaccatcgtggtcgctgtcgggaaatctggtgattcgatggcttcgtgacacgtgtttactgcataattatacctgtggaattttcgtttttatatacatgcctgctcccaataatcacaataaaacccaaacgaacggcttttgcccaaagatcgaacacagtgaacaatttgataagtgtttcgggtgtaaataccaccaatctgccagtcacaacaaatggctgcggtttgtgactagtgattgtgttatcagtgagttgaaaacatttcaaatcaaactggtattttcatatatactagtgaaaaaagtgtggactcaaaacaatgcactcgctgttggcaagaataaaaagagttttggccatttttaaaataataaataaatagataaataattaacaacttacatgccctaactctatttcgtttgctgtttagaccagctgcttataacctctagaaataaattaaaatttctttaattgttttttgaacatatttttgtaagtgcattctccgccgtgagtggtcactgttcgggaataatacttttgctgtcccgacacgccaagtgtcaaacacacctcctttggttggttgggaatcggtggactcagacatgagtggcggaattagggactgaatgaagtgggggtgggggggcttacctccaaatgggcggggcactgggcggagtcgtggcagtcaacaattttgtctaattacaacgggagaaacgagcagccagcgacaagccataaaaaatatgccatttgcacgaaaataactgtgatgtgctgtgacctgtagcccccgccattgatagcctccagcaaacaggataaggaggacgaggtcctggattgaaggaggagttgccgaaaaagccaaagccacagatatagctaacaaatggcttaattccagccagcagcttgaatgctcggaatgccgagcgataaaaagtacatgtattaaaattaacaaaacaacaagacgcagacaagagacgccttcttttttggcccat

SEQ ID NO: 32804 - DNA, 480 bp, DROSOPHILA
atgaagcggtttcttgtggccttattggccgctctgctggtagccgccgtccagggcggaattctgggcagaattttccacagggagtccacctccacaacaaccagcacaactacgacgaccacagaggagccccgccgacccttctacatcaacaacaatattcccgaaatcccgaaggactgtgtggcgcagttcaagtgcaaaaagaagctggcgaatgttcaggctccaaaaccgtgtgtgaaatactgcctgcacaggatcacctgtcccaataaccagaccagtcccgttcagcccaaccagtgtgtcgatctcgacgagcaacaggtgctggccgtccacgaggcaaacacggagcctccggtcgccggccaaaccaccaccgagaagaccatgatggtggccatgatcgacttcccctgccagcccggctatctgcccgaccatcgtggtcgctgtcgggaaatctggtga

SEQ ID NO: 32805 - protein, 159 aa, DROSOPHILA
MKRFLVALLAALLVAAVQGGILGRIFHRESTSTTTSTTTTTTEEPRRPFYINNNIPEIPKDCVAQFKCKKKLANVQAPKPCVKYCLHRITCPNNQTSPVQPNQCVDLDEQQVLAVHEANTEPPVAGQTTTEKTMMVAMIDFPCQPGYLPDHRGRCREIW

SEQ ID NO: 32806 - DNA, 3362 bp, DROSOPHILA
ctttagacccaaagtgcattgtcagctttgagtgagtgaaggcgtggctggtaaattatgcaagagcaacgataccaaatgtcgtcgaatgcatccagatgaaaattgaaagtgctgcaatccgagatctcagacgcgtttcaaatctccggcgattgcacttggcaaagaccggaccgcaagcacatgaagcgcacgtcaccatttgtgcaatcaaacatcggaatggccgcgacattgaccgcaagctgccacacagtgtgaaatccgatgcggctgggagccaaccggtgcacagtggttacagctatgttgaaaattatcaaatattatgctagcttaaaaaggaagcaatatttatgcactcaaaacaaaacttacttaatttaataacttcatttttaccatttttatcacatccacaatagattttcttttttaatttttgagccctattagaccacagtgcataggtcgatgtgcattgcgggctagcaattgcggtatagctgcgtattttgtgattgcgaattgtgcggacagcggatcgccgcctcacttgcatctgaaaggaacaaccagaaagggactatctggaacagttggtgtgtgccgccgagtgaaagtgagtgcctgggcatgggcttccacttacacaatccatggtggattggccaatgaacttgaagtgccaacgaggatatccaattacaagtagagcgctccaagcatttgaagagtgtgtgtgtgctataaaaacagcatcgcgatgtcacaaatttgcatttcaaagcggagcaacacccacgccagctgcatccaaacacgcactccgttggcggattggaacaaaggatataggacacaggagttcaggatttcaggacacacacaaccacccaacgttatggggcggccaaaatccggccaaggctttgggtcacctgccaccagttcattaatgatctatgcattaatgtggctcgctttggccatgacaatggaggccatagatgccccactgcccctatccctggcggagtacccgctcggcctgtcgctggaacatggcagcaaacaccattaccaggatgcgggtgtggactcgttgccgggattaacaggatatacgcgaaattattatggccccactgacactgcagccggcgatgacttggcaacatatggaaattatgctcacaaactcctggccgccacccatcaacagcaccatcgccattcgcaatcctcccttggcaccacggccaatggctttgtgcccttctactacaacagcaaactgcactcgccattcaccgcggatgaggagccgcgtcgcgacccatccgccaatatcgattttgtcattaatacggcaaattatgagccaaattccgctggctacgatgtggagccacatcatggggagcagcactacgaaagctatgcatatcggccgcgggtgcagtttgccacatcgctacccggtcccagcgattaccatttcgaacaaatttccaattaccgggagaatcgccagcgggagcaggaggtggagcaacatcagcagcagcagcaccaggagcaggaggatattactagtatctatgcgcggctcaaagaactccagacaccggccaatccagttaagcgtcagcaggaagagtccctatcgagtcatcatccaaaccgggagcaaagccagccactggagcagcgacattatcagcaacctgaaagcagacagctgcaacagccacacttgcaacaacatctgcaacaaaagcggccacatgcgctgcaatatcctcaggatcaacggcatcaccagcgcctgggagttgcccaggaccagcagatgttgtactctcacaaggatagccagattgcagatctcccagccataaccaccagtgtgcaccatactccggagagcagtaaagcggtagccggattgccgttggccaagcacatcgagatcactaagagtgtgcccatcacccactatcagaagcagcatgtgcccttcaagcagaacgtccaggtgcaagtgccacgaaccgtgatcgcagccatacccaagcccatgcccatcaaaataccagtggcccaaacggtggccgtgccccagatgcaagaggttaagattcccatcgaacgggtgaagccggtgcccgtggagcggcccattccctttgtggttgagcgcagggtaccctaccgagtggagaagccggtggtctcgccagtttattatccgtatccggtcaaagtgccagtggtgcgcacggtggtgcacaagcagcgcccccactacgtggcacccggctggagtgccaacggcaatcatctgctgggatgagtctatcttaagaataaattcttaagccagttttatacccttgcaaaaggggttttttgatttgtaaagtaaaagtacaaactgtagggtagtcgataaatatatttttggtggaatgttcttaagttgaattaaatacatttattaatttttcatgttatgcagtttgattaacggctagagtatttcaaattcagcttatgccttaatttctagtgactgaaccccaaaaagtaattgcaattagcaaaacaagaagacaaaaaaggccaccgacagcaactgcagtgtggctgcaaaagcatccagcatgcaactccttgatcccaaatccaagtttctaactcccagttaacagctaccaaacaaaacaacacattcggagtcgaagttgaagttggagtcacagggcaggtcccaaaccgaaatgaagaaaagtagccgagtaaaactttttaattgagctaaaatccaacaaatgcggctaataaatatgtattgaagtgcgatgggcagaacgaggctgaagtccggttgcaatgcaaaagggggctgcagcgaaagtgcaagaaaatgcagcggctaattgccaaatgtaactccagttgaaacaacttttaactgaaacagcagaaggagcaacaatgacgcacaaataaacgcgacgttcaacttcgccgaggcgttaacgaaacagcaacaaaattagccaaaaagtaaagttccagcaagggtcgcgaaaagtcgggccagtagtttctggttggggaaagtgctgcaagttattgccggctaatgaaattagccctaattgacgtgggagccattcgactccatttttagggaggcgaagtgaggaagaactccgcacccaccacacacaatatatgtaatattcggcagcaaaggagaatttaaggaaaatgtttggggaaaaatgagttcaaagatttggggtttaaagcgctttgactacttacttaatactcattactcagcc

SEQ ID NO: 32807 - DNA, 1362 bp, DROSOPHILA
atggaggccatagatgccccactgcccctatccctggcggagtacccgctcggcctgtcgctggaacatggcagcaaacaccattaccaggatgcgggtgtggactcgttgccgggattaacaggatatacgcgaaattattatggccccactgacactgcagccggcgatgacttggcaacatatggaaattatgctcacaaactcctggccgccacccatcaacagcaccatcgccattcgcaatcctcccttggcaccacggccaatggctttgtgcccttctactacaacagcaaactgcactcgccattcaccgcggatgaggagccgcgtcgcgacccatccgccaatatcgattttgtcattaatacggcaaattatgagccaaattccgctggctacgatgtggagccacatcatggggagcagcactacgaaagctatgcatatcggccgcgggtgcagtttgccacatcgctacccggtcccagcgattaccatttcgaacaaatttccaattaccgggagaatcgccagcgggagcaggaggtggagcaacatcagcagcagcagcaccaggagcaggaggatattactagtatctatgcgcggctcaaagaactccagacaccggccaatccagttaagcgtcagcaggaagagtccctatcgagtcatcatccaaaccgggagcaaagccagccactggagcagcgacattatcagcaacctgaaagcagacagctgcaacagccacacttgcaacaacatctgcaacaaaagcggccacatgcgctgcaatatcctcaggatcaacggcatcaccagcgcctgggagttgcccaggaccagcagatgttgtactctcacaaggatagccagattgcagatctcccagccataaccaccagtgtgcaccatactccggagagcagtaaagcggtagccggattgccgttggccaagcacatcgagatcactaagagtgtgcccatcacccactatcagaagcagcatgtgcccttcaagcagaacgtccaggtgcaagtgccacgaaccgtgatcgcagccatacccaagcccatgcccatcaaaataccagtggcccaaacggtggccgtgccccagatgcaagaggttaagattcccatcgaacgggtgaagccggtgcccgtggagcggcccattccctttgtggttgagcgcagggtaccctaccgagtggagaagccggtggtctcgccagtttattatccgtatccggtcaaagtgccagtggtgcgcacggtggtgcacaagcagcgcccccactacgtggcacccggctggagtgccaacggcaatcatctgctgggatga

SEQ ID NO: 32808 - protein, 453 aa, DROSOPHILA
MEAIDAPLPLSLAEYPLGLSLEHGSKHHYQDAGVDSLPGLTGYTRNYYGPTDTAAGDDLATYGNYAHKLLAATHQQHHRHSQSSLGTTANGFVPFYYNSKLHSPFTADEEPRRDPSANIDFVINTANYEPNSAGYDVEPHHGEQHYESYAYRPRVQFATSLPGPSDYHFEQISNYRENRQREQEVEQHQQQQHQEQEDITSIYARLKELQTPANPVKRQQEESLSSHHPNREQSQPLEQRHYQQPESRQLQQPHLQQHLQQKRPHALQYPQDQRHHQRLGVAQDQQMLYSHKDSQIADLPAITTSVHHTPESSKAVAGLPLAKHIEITKSVPITHYQKQHVPFKQNVQVQVPRTVIAAIPKPMPIKIPVAQTVAVPQMQEVKIPIERVKPVPVERPIPFVVERRVPYRVEKPVVSPVYYPYPVKVPVVRTVVHKQRPHYVAPGWSANGNHLLG

SEQ ID NO: 32809 - DNA, 2796 bp, DROSOPHILA
ggattttatagcgttacattaactaccaattcacatcatatatagtttctagtcctcctacttggctgtgtggcatttgccaacgcttttggcttcagcctgcgatttttaaacccatcaacggaccctgtccagcctgcagaaaatccaaaactatgcacacctatggaggaggcagcaccttcggaaagggttcactcactgatctcgccatctgaaataccaagtagtacgccgaatgatcctgtagtcgtaaatggaagacccgtggtacctctacccacacttgcaccgatttccacttcaactacaacacagctcaacagaggaacatatgagggaaatgtgcccaatcttccggtggactgcgaacccacaacattggatatcggaagtcggttaagttcgcagctcctgagaatactcacagtcttgggctaagaggatacccttagcattattttcttaaaatttatttgtcttgagatttgtatatcaataactaactaaagggtttaagataatttaaatttcttattgaataataaatctgaagatcgttaaacgcgtttaattaggaaatttctttcctaaaacattgctttaacagaagattttccagggctttttccaaagctagcgatgacacagaaaacccccagagactagacgctccaatagtttcaattactgtcaatcagcattgctggggccaattattaaatccagtcaatagtcacagttccaatagcaatggaggaaacccgtttgccggggcgtttgccgacagcacatcagaaaaatcagaaatatcatagatatatatctctctctatatctgtccaaagaataattggtgcgaatcggcagtttgagaactctcagttgcaatgttacggaccggttttactagttccgttgtatagattgcaactactgcaagaacacagaacaaataaatacgtaatctcatctgggattccattcattcagtgcctcaaagcagcttaaattagaatgatcagagttactacggtgagtcaaagtcctctaaaaacaaatatgaagagtaaacataagtttttttttaaatattttcagtgcctgttgatgttcgtattctttgttttgtacatccatcaaaatcatgccgacaccaaagtgctttacgaatttcagtgcgtagttgattgcgttttattttgatattgattttaatttcactattatattttctcttcccagcatcagggaagccaaccagcagcgcgatgaaatgggagagttcaaggatacgtccgaggaatctgacgaggaacccgaactgatcatcacgggcaaacgaacctcttcgtacgtttttcccgccaaggataacaactatgtgtacgtggaaacggccacctatgtggcggataacaatggctatcatgtcaagtacaacatcaccttggataccgtggagcttgaccgtcgcctcagcggacaagcacttaagaccaccgctggttaggcgacacatcgagtattaaactagtgactaagtcgtagctgtagtcaatactacattatttattcgaactttaaagtgacacgttctcaaagcaccattgcaaataataaaaggaactttgaaagcgagtttggggctaacattaagtggttcccaaacggatgacagtgcagtaagttatggcactttgttttggctttgttccaaagctgccactttggcattttaatttacgagtgcgaaatacatacttaaactatgatacacgatctacagatgcggtcaatttgttttagagtaagtgttagtaacaacccgcaaatataaacaggattttagtcaaattgaatttgagccaaaacagttaatacaaataacccaggaaattggactattatcttgaccgcagctgtgcgcaaatataagaatgtaaattcccttaccgtgtgtgaagtttccttgatggccgttgtctggtgatgattgctagctggcaatttctagtcaattttccgtggttaaaatgtatttagaaatctagcttgaggaaaagttcaatctgcaattagaggaagaaggaagggggcaaaaattagtaacgacgcgagcagactctgtgagcacaaacaacttttaattatacgctacaggatgatgatgagtcggtaccaaccttgggcccggaaaagccattagctcattaactaatacgtttacatacgagtatatatatacacataagacttgaagctcggataggcagctaccttgagggtcaagtgcgaatacagcccacggaacgcgattatcagatgcgagagtgggagaatgggaggaaaatgagcactcaaattagaatttaggaattttaggtcagtcgcgtaattgagaggctgagcaaattcactgcaacggttaatggaactaattaaccaatcaagcggcggtggtgacgataagcctcggttcaagtcaaaaatcgacgcatctctcgattcccgctcagtttcgtttcggcaatcattcggatcacacggaaaacgtagaagcctcatttgccgtacattatggcctctcaaccgcttggactcctgctgggagccatcctgttttcgatatgcgcaatagatgcttcagtgcctcatcctttggcggccaactattcgatagacatcctgcgactggccaaggctgctcacatcaaagcctatatgggcgatgaaaaggagcaggcttgcaataatttctacaactatgcctgcgccaattggcctcgtttgcat

SEQ ID NO: 32810 - DNA, 663 bp, DROSOPHILA
aagcagcttaaattagaatgatcagagttactacgtgcctgttgatgttcgtattctttgttttgtacatccatcaaaatcatgccgacaccaaagtgctttacgaatttcacatcagggaagccaaccagcagcgcgatgaaatgggagagttcaaggatacgtccgaggaatctgacgaggaacccgaactgatcatcacgggcaaacgaacctcttcgtacgtttttcccgccaaggataacaactatgtgtacgtggaaacggccacctatgtggcggataacaatggctatcatgtcaagtacaacatcaccttggataccgtggagcttgaccgtcgcctcagcggacaagcacttaagaccaccgctggttaggcgacacatcgagtattaaactagtgactaagtcgtagctgtagtcaatactacattatttattcgaactttaaagtgacacgttctcaaagcaccattgcaaataataaaaggaactttgaaagcgagtttggggctaacattaagtggttcccaaacggatgacagtgcagtaagttatggcactttgttttggctttgttccaaagctgccactttggcattttaatttacgagtgcgaaatacatacttaaactatgatacacgatctacagatgcggt

SEQ ID NO: 32811 - protein, 120 aa, DROSOPHILA
MIRVTTCLLMFVFFVLYIHQNHADTKVLYEFHIREANQQRDEMGEFKDTSEESDEEPELIITGKRTSSYVFPAKDNNYVYVETATYVADNNGYHVKYNITLDTVELDRRLSGQALKTTAG

SEQ ID NO: 32812 - DNA, 4840 bp, DROSOPHILA
aggacgatggctcctgggcgctgggcgacaactttctgatcttcgtgcagcgcgtcctgcgtgacaatcaggccttctcgccggacacacggatacacctgatccgcacgctggcctatgcggcgctcaaagatgatgtgatcatcattctgcaccaggatcgaagggatcacacactgatgaactacgcccaggacattgacaagcagacgcccgaggagcagcaggcctgggccatgtttgtaggtcccgcaatgggagaatgaatatataagtttgctatatattcaatatgtttcagatgtgcaatctctttgagaacctgggtccctccgaatggctgttgtacatttcggagtgggaatacaatggtcagaccatctccaacatacgagtgaccaccaaggtggccgtccactgcatcctctccaattgcccgcagctgaaaaatattggcagcatgatcctgtacaacattgctattaaggaagtgaagactgtggtatgtggtatgcaaagtattggaaaatatcgtagatacaagatatatatctgcaggtattcgacgatatcgccgtggagctggccatggccattcttcagttcttccagagcagtcccaacgaagaccaaatcttccgcaccctgagggccctcgttcgattcctcgaggtagtgacctatattcggggtagcccaaattgacagctgtcaaatattcgaatattttgctatttttcaggtctcgcaagacgtaccgatgatcattcaaatgattggaccgcatccaaaacaattcgccggcaagagcgagcgcgtggatgagctgataaagatcattagtcgcaaggtgcccgcctaaagggagatttccacataagagaataaccataaccatagttaccctttttctaatatatattataatatattctagaccctcacttttgtaaagcattttagcggctcaataaacatttgtaccccctgacgaggtcatctacatgccaatatcgccgcagcaaagtttcaggaacggaaatccattgcctccactggctctcagttgcagccagtgtttctgattggagacgaacatctccgaaggcagctgtgtgtcctgggcagaggcatcctctacaaggagaccagaaaaacataggatccacatagatattcaaacacaacttacgcgcctttttgtcgtatttcggcgactgggtgatggagatcacatcctctggctttcgaagcaatatcttgcccacacccttgcacatgcgcagcacctcgtggttgctcagcttatccagctgctcctcatccaacagactgcaggccagaatccactcacgcacatcgtcgaaatcgttgagcaaccgaaccgctccgtttacactgaagcgaatgcgcttctggtagataaagtccagccaggcctcacaaatcagcttcaggatcagcttgagtatgacaatgtccttggtggcacgtatggtgggcagatagatctcgtccagcacatagcccacatagaggctcttctcatcgttgttgtaaacctcgcgttgccagaaactggcggccggaaaacagagcgtaaagttggccaggctgaggactcggcaaactgcggaaagtatctgaacacactcgtcggtggttttctggaggattaggaattagtatcgtctcactactagcatgcgaataagtcacctttagcttgtctatattggcgttgacctcggcgatgagtttggtgcgcagggcaacgcaaactagcatcagtatatcgctcaggtcggcagtgagtttgggcagttggaaggtaatgaagacattcaggcacagcttgacatcgtgctccagaatctggaagaagcggtccattttccactcgcagcaaaggagctttgcctgctcggtgacccagaggcgcatcgaatgcaccgaatgatctgcaagtggatcgatatattgtgagtctgtggtgtagaacctatgccaatcttacccagcctatggagtatgggtatctgttcagccaccggcatcaggctggaattattgtgcgcctccagattggagaaatattggttgctcagattgacgaggttggcgaatatactgatccatacggtgccggttggagtaccaaattcctgaaagaatagaagcctttgggtgatgggatatattaagatatatatagagtatataatatcacattcttagggcaatcgcgatattgctcagctaccacatccaccaaacgattcgtattattggaagatattagggtgagacgaaagagttgatcccaaatggtgttgcaaacgaatcctgtaaggatctcaccaattccacggagtgttgaaaaaacaggctcgggaatatctgcaaagaaatgttgtatattcttattgatgaatatatatctatgttataatttactgaccattaacactctgatgatagagccagctgcgtatggagtcgatatgggttaagcgatagcaggatacgggattatcaatccaccagagcagtatgtgatccaagataattcctacatacgaccagagcagtcgcaatcccttcacaatatacgcattcatatcgacaggaccttttttcccattatctatcaggatgcacaaaaaatcggtttacaactgattgaaattgaaatgcctaggaactcaccgaatatggttggactaatttcggtggccttggctatcagttgggcaataaacacgcgctccttctgcagaaagctctccgtgtgcttgcagcgcaaactctgacgatcctgatcctgcggactctcctccgccatctgcatctgcatggacttgtaatcctgggcggaatcgcaatacggttggtaatcgccggcggcgaaggatatgttcagggtgcgcagaatctccaggctggaggaggtggactccagattctgctgctcccgccaggcatcctgctcgcccatgttgaagagtccaaaaaccaaatccagggcattctgctccacccgagtctgagccaccaactataccaaaaaaaaaagctctttaaaaaggagtaggtcataggttatctaacagattgaacctgcaacacgtagccaaaatcaatggatttgagcgccaggagcagagcaggatacatattgctgcacacattggcgggcatctcctccttcctcttgccactcaacttgggctcctcctccagctcttcgtcacccggtggcttatccacctcgactgggaccagtggcttctccaccttgcggcatttgttgtacaactgagtgatgtgcaatgcccaattcagccacatctccgattgcatggacttgcggagcaggaagctcaactaaacgggatttaagatcattccgcatccaggataatcgattcaaatacacaccgttcgcttcagcacaaaggtgagctggcaaaaacgtcgatcattgagatccattatcaaatggaacttcttcatcagcagctgattgtagggacttcgcttaatcttctttgatagcgattggaagtcagcatttttagtctcgtccttgaggttccagtactgctcaaccacccgctcgcactcctccaaaatggtgtccttcgaaggcagcttatgggctaacaatttaaattagaactgcaaaccacttacatgttcactgaaaatcgccgagttgacatcgatcacaatccgtttggtaatccgacgcagctccaggcccaatttgccgatttccgcgaacgtgtgcatcggctgggatttgttgcggcagtaccacttcggtgtggtgctcattttcggtggcgcctatccgccggaggcggaaccacgccaagccccctacccactaaccactggcttcctaaatccacctggttctagacaaatcgctttttaattattgtgtcttccaggcacgcatccatccgcacactcgccaacccgcttctttcctatctcccaagcctttcgaatgcaaattttccttctgttggatcgatggcgagtctcgtgacccccgcagccaggcaacgcacgcatctgacagcgggtggagacccggaaagggtacggaatatccacggaaattgggggtgctcaagctcccgagtcgtggcacccatgtgtgcccattgaacatcatcgacagacacgcattcgtcggcctgctcgttatgcaaatgggttatggggtcggttggggaaaccccaaacaaaatgcttgtctagcgatgtcataaccagaaacggctcagtagtcagttttgcctcgcgaacttcatcagaacttgtacggttgaaagttagatacccgacgataacctactagtcgtatacgtaatatcggtagatccacattgaacttccaatacattcttaaatataatttatactggtataaaaatattattttattgtggagttataggtgtatcattgatacagggccagcatatttcagctaagatagaaatgcaaattgatattctggcacataatccggaccgatctaagcctgactgtcctgagctaagttggcattattggtaacagcctggactggtgctctcggtgtaggtttgtccttcttcgtgttggccaggaaacccttggctatccaggagcacacaagcagcagaatgataaagacatgggataccaggaggcggtctaacgattctcgcaccttctccaaggaaccacgattgatcacaaagtagcagaagtacaagctcatggcgtcgttcatcaggaacaggcagatgaagatagaccggacattctttcggccaaa

SEQ ID NO: 32813 - DNA, 2328 bp, DROSOPHILA
atgagcaccacaccgaagtggtactgccgcaacaaatcccagccgatgcacacgttcgcggaaatcggcaaattgggcctggagctgcgtcggattaccaaacggattgtgatcgatgtcaactcggcgattttcagtgaacatgacaccattttggaggagtgcgagcgggtggttgagcagtactggaacctcaaggacgagactaaaaatgctgacttccaatcgctatcaaagaagattaagcgaagtccctacaatcagctgctgatgaagaagttccatttgataatggatctcaatgatcgacgtttttgccagctcacctttgtgctgaagcgaacgttgagcttcctgctccgcaagtccatgcaatcggagatgtggctgaattgggcattgcacatcactcagttgtacaacaaatgccgcaaggtggagaagccactggtcccagtcgaggtggataagccaccgggtgacgaagagctggaggaggagcccaagttgagtggcaagaggaaggaggagatgcccgccaatgtgtgcagcaatatgtatcctgctctgctcctggcgctcaaatccattgattttggctacgtgttgcaggttcaatctttggtggctcagactcgggtggagcagaatgccctggatttggtttttggactcttcaacatgggcgagcaggatgcctggcgggagcagcagaatctggagtccacctcctccagcctggagattctgcgcaccctgaacatatccttcgccgccggcgattaccaaccgtattgcgattccgcccaggattacaagtccatgcagatgcagatggcggaggagagtccgcaggatcaggatcgtcagagtttgcgctgcaagcacacggagagctttctgcagaaggagcgcgtgtttattgcccaactgatagccaaggccaccgaaattagtccaaccatattcgataatgggaaaaaaggtcctgtcgatatgaatgcgtatattgtgaagggattgcgactgctctggtcgtatgtaggaattatcttggatcacatactgctctggtggattgataatcccgtatcctgctatcgcttaacccatatcgactccatacgcagctggctctatcatcagagtgttaatgatattcccgagcctgttttttcaacactccgtggaattggtgagatccttacaggattcgtttgcaacaccatttgggatcaactctttcgtctcaccctaatatcttccaataatacgaatcgtttggtggatgtggtagctgagcaatatcgcgattgccctaagaatgaatttggtactccaaccggcaccgtatggatcagtatattcgccaacctcgtcaatctgagcaaccaatatttctccaatctggaggcgcacaataattccagcctgatgccggtggctgaacagatacccatactccataggctggatcattcggtgcattcgatgcgcctctgggtcaccgagcaggcaaagctcctttgctgcgagtggaaaatggaccgcttcttccagattctggagcacgatgtcaagctgtgcctgaatgtcttcattaccttccaactgcccaaactcactgccgacctgagcgatatactgatgctagtttgcgttgccctgcgcaccaaactcatcgccgaggtcaacgccaatatagacaagctaaagaaaaccaccgacgagtgtgttcagatactttccgcagtttgccgagtcctcagcctggccaactttacgctctgttttccggccgccagtttctggcaacgcgaggtttacaacaacgatgagaagagcctctatgtgggctatgtgctggacgagatctatctgcccaccatacgtgccaccaaggacattgtcatactcaagctgatcctgaagctgatttgtgaggcctggctggactttatctaccagaagcgcattcgcttcagtgtaaacggagcggttcggttgctcaacgatttcgacgatgtgcgtgagtggattctggcctgcagtctgttggatgaggagcagctggataagctgagcaaccacgaggtgctgcgcatgtgcaagggtgtgggcaagatattgcttcgaaagccagaggatgtgatctccatcacccagtcgccgaaatacgacaaaaaggcgcaggatgcctctgcccaggacacacagctgccttcggagatgttcgtctccaatcagaaacactggctgcaactgagagccagtggaggcaatggatttccgttcctgaaactttgctgcggcgatattggcatgtag

SEQ ID NO: 32814 - protein, 775 aa, DROSOPHILA
MSTTPKWYCRNKSQPMHTFAEIGKLGLELRRITKRIVIDVNSAIFSEHDTILEECERVVEQYWNLKDETKNADFQSLSKKIKRSPYNQLLMKKFHLIMDLNDRRFCQLTFVLKRTLSFLLRKSMQSEMWLNWALHITQLYNKCRKVEKPLVPVEVDKPPGDEELEEEPKLSGKRKEEMPANVCSNMYPALLLALKSIDFGYVLQVQSLVAQTRVEQNALDLVFGLFNMGEQDAWREQQNLESTSSSLEILRTLNISFAAGDYQPYCDSAQDYKSMQMQMAEESPQDQDRQSLRCKHTESFLQKERVFIAQLIAKATEISPTIFDNGKKGPVDMNAYIVKGLRLLWSYVGIILDHILLWWIDNPVSCYRLTHIDSIRSWLYHQSVNDIPEPVFSTLRGIGEILTGFVCNTIWDQLFRLTLISSNNTNRLVDVVAEQYRDCPKNEFGTPTGTVWISIFANLVNLSNQYFSNLEAHNNSSLMPVAEQIPILHRLDHSVHSMRLWVTEQAKLLCCEWKMDRFFQILEHDVKLCLNVFITFQLPKLTADLSDILMLVCVALRTKLIAEVNANIDKLKKTTDECVQILSAVCRVLSLANFTLCFPAASFWQREVYNNDEKSLYVGYVLDEIYLPTIRATKDIVILKLILKLICEAWLDFIYQKRIRFSVNGAVRLLNDFDDVREWILACSLLDEEQLDKLSNHEVLRMCKGVGKILLRKPEDVISITQSPKYDKKAQDASAQDTQLPSEMFVSNQKHWLQLRASGGNGFPFLKLCCGDIGM

SEQ ID NO: 32815 - DNA, 2429 bp, DROSOPHILA
tgtagccctgctgacgttggaatcctcggaacagggcggtttggttgtggccaccggcgttgcggtggcaaccgcattcgggtggtaggccaacaccacattgtccacgtgcgtcacactaagtatgtggagcagctcctccaccgcctgattcacagactctgtggagtggcgattgaggaatatcttggcaccgatacttatctcattccgtccattctccgtcaagcgggtggtcaactcctgggtggccctttgcacccgcccatgcagctcgtcgatctccttttcaaccaccacgcgctccgcagtcgagtcggtgtggagcgttatcttcaggccgtcgtacagctcctcgttcgatttgcgctgtcccagttccgtggcgatgatgttgcccgtgctaatcaccacgttctggtacttcttcgttatggtcggtatcatggtgacaagtgttctccttatttggtatctgctactttcgcgaccgtccagacaactgcagccctctcaggtgtgtgaaacgcgtgtgttctcgagcaccgaccgcttggccacttaaatacactttgcaccgaagtgtggagagagaaataaattctgctgacagctggtgatggacgttggccgattggcttcgataaggttatcgaaaagtatccatgcgccgccaggggtactagatccaaatgaaatacaatttaaaattcgaatgtataataataattacagtgttgcccaactaataagtctagtgccctcattgttcataaaaagcatgaccattgaaaatgtatttaaaatttgtattttaagcttatatatttaggtagctatttatttaataaggaaaagcagccggttaataaaacaattttattgagtacgtatgccttaaaatgtcatatctaaccggtaaattgtaacggtttccagttgtaactgttgtttaaagtgttcaatttggagatttagagattataatagaagaactaggatgtgtggacgggctgtgcgcgattggttggtgctattgaccatggagaagtacattggtaaattcctggagcgggggtacgacagcattgaacgctgcaagcttattatcgtaagcgatctgatcatgctgggagtggataatcccgctcataggaagctcctgctcgagggagtccggttcttggtcaacgcacccgagcagttcatctgcaaggagccgtgtgagctgcatgaggagattgaactgaaattagacccggatgttgagttgtttgcttcgctaaagtgcctggaaaatgttgatttcctagaaacacctgttccatattcgctaacatctccacaaaagacgctcacaactcgggactcttgcaaatggaatgtcaaaggtgtggatcagttaccttccgataacatatttaactaaatacaaacaaagcaaaaaataatgcgtgtgataaggatctttatatatttttaagaaccaataaaacgacaattgaaaagctgttttacaacactatcataatcaaccaatataatttcgtaaatatttttcagtttaaataaatacatatgtatctattatattaaagtaaaaaaaatggggtgagcagattacaagaaactcatactcctgtgttttttaatttaatgaaaattacttaaacgtaattaaaggattcaacaaagcgttcaacaaatacttgatgcctctcatcaaatcttggaggcgtgcatccatgggtgaagcggccaccactcgctcgatgctggccgtacccaaatcccgcgaccggcactccacacactcgatggttttcagcttcacctgcacgttgtcagccaaaagccgagaattgtgcaggattccatagaatagtacaacatcgccctcgcttaggagccgtgtgaagttcccaaagtcatggtgagctcgtaggataacatctgtggtggtggaacgacccagtagacggccactcctcttggtgcccaccttgaccagcagctcgtactcgtagcgattccatcgctgcagtgtgcaactaccgctctgagcattgaatgtcttgaacacgctccgccactcctcgcactgcgcatccaatttgggatcgcatttgaagtgctgcgatatattctcgccatgcaagcagcgcagcatcctgcccagccaaacgggcaaatagttcgcaatggtatcctccaaaaaattggacacccgcgagatttccactttggtgacgctgccctcccatatcacgggcattccattcagaagggagcaacgcagctgggcttttatcttattcggctgctcgtggacaggttgagcacaaagtgcatgaaagcgatcccagggcagagtattcgtctcggaaagcgagtgcagacccgctctgggcatggcattgaagcgcggc

SEQ ID NO: 32816 - DNA, 429 bp, DROSOPHILA
atgtgtggacgggctgtgcgcgattggttggtgctattgaccatggagaagtacattggtaaattcctggagcgggggtacgacagcattgaacgctgcaagcttattatcgtaagcgatctgatcatgctgggagtggataatcccgctcataggaagctcctgctcgagggagtccggttcttggtcaacgcacccgagcagttcatctgcaaggagccgtgtgagctgcatgaggagattgaactgaaattagacccggatgttgagttgtttgcttcgctaaagtgcctggaaaatgttgatttcctagaaacacctgttccatattcgctaacatctccacaaaagacgctcacaactcgggactcttgcaaatggaatgtcaaaggtgtggatcagttaccttccgataacatatttaactaa

SEQ ID NO: 32817 - protein, 142 aa, DROSOPHILA
MCGRAVRDWLVLLTMEKYIGKFLERGYDSIERCKLIIVSDLIMLGVDNPAHRKLLLEGVRFLVNAPEQFICKEPCELHEEIELKLDPDVELFASLKCLENVDFLETPVPYSLTSPQKTLTTRDSCKWNVKGVDQLPSDNIFN

SEQ ID NO: 32818 - DNA, 2673 bp, DROSOPHILA
gacatgttgtacggacacacacacacacaaccgaatctcgcattaatatatgagctttcattggaggacaaactggttacgagtagctggcatagagaaagttcatctcaaggctggtgcgtgcttaatgcggtcgagtttgccaacttgactctgattatgcaaatgctgtaaatgagcaaaagagcacaaaggggagggggggggaggttaactcaatttgtgtgtgcggcttgcaaatgaattctgggcggtgtaaacactgcacaatatgatgcagcaaaaggaaaacaaagttcgctggcaaagttcaaattcacgctgcagtcaattcacgaagtgccagcccatcaccgattcccaggcagatggcaaattaatccattactaggccgccaagtggcccgtaaattgcagtttactctgacccatcagccacatcactcacctccattcgcaggccataaacttggcaagtcatgggcaaaagcgtgccagtcgcacgcaaaaaaaaaaaacgaagaaaagtgcgggaaaagcgcagaaaagtgtttgacttgaataaagaaacacgctcgaccggcaaagaacatgcgtcaactttgtcagcattatccgcggcatcgcattagcaccagctgtccactgtagtggctgcacttggaaaaaatcgtacaaaactaaaacttaaaatccctatccacctctgaaagcagaagacattcgatggctgctgctttgattttagaaaggaagcctctcattttggaaatcgcatgattttttccaagtgcaccctcgcagcagtggcgacacttgtaccgctgccccgttgagcggctttctcctcttggcctggccataaagtacggtcgcattatggcaactaggccggtcggccagtgaccgcagcggcacttaatggtcggcgggcagctcattaaaatgtcagacagcgtaaagtaattacgatactcggcaagtttgcacttgttagaggatgcccagtgccctccaccttagggaatccccgccagaatccattgagttgctcgtcgtgtttcatggctttggtttatgtgtttttttttcattctttgttcctgttttatttctttgcaggcgcaaggacagcagtgctctgcagcgttcggccagcattgattcctttgccgagattgtgtttagtgagtcgccacgcccctcgctggctgtcacgggaccaggtgcctgcgcctccgcatccggcggcccttcgccattcagcaaacgtccttcggccagcagcctgtactccacctcaacgtccagctccttcgcatcgcagatgcaggcccagctgaatgtcaattacggcgactcggcactgggatccggatcagcaacgggtggaccgggctcgggtcaccaccatggggcatctggtggcggcaacgggggcagcagtgccagcagcagtcggcgcgaaagcatgctcagcccctcatccacgcgccgctccaagctgaccagaatcataaacggtgagtgcggggtaaatcggatgcggaatccaaaaatttattgccaggcgatgcgtgccctatgcatggatagtactatccaaacaagctatctatatacgttattaaccatctaaaagataaaatttccttacagcctatgctttgtaaaattgtattcccactttatggctatttatttgtttttagacagaacattacaccaaaacaagctagataaaaccaaaaatatcgcactctcgcatcactgttgcgttggaaaagctcacttcctgaccaaaaaggggaaatggaagtggacggaaagagctcgtcgttctagtcatcggtggcttatttatttcgctgcagccggctgattgaaattcaaatgcgcacttgagttttccggatggaaaaccgggcaggcgcggaattaaatcgattgccacttgggccaagtgcctaaaagattgaaaatcgcagagcggcgcataaatcagaaacattcaatttaatgcgcactagcgcactagagaatctgcacaaactttgtttaaagttgaaacattagcatagacgccgatgaaaacaaacttccaaggccttaaaatactcaacacactaaaggtgaaaacttgtggaggtagtgcttcgcggttcaatccgttgaaatggttactaggctaaaaccaaaagttgttcaaaatgctcaagcggcttccttttagcaaaactttgtagccaaaacttttcctggaagtgcacttcaaagaccagcctatcggagtggaagcaataaaaagccggaacaaggctacgattaacacgaatcagtaaacccagcggattataatcacatattgagaaattagcacataccacttgtataagatatgatctcacaacaattatccagcacattttagtaaagtagtgggttaaagctcctgagccaattgtttgttattaggtattttccagataacatttccaaatttcctaatatgtcaatttatagtaatttttcctgtgtaatttcatttatcggtttcttcgagaaatttcttgtgataaacgaattaacaaagccgagcttcctttcaaaaaccccaatggattatgcttttgctgcgatagcaagaaatagactttctgagagcggaatctt

SEQ ID NO: 32819 - DNA, 462 bp, DROSOPHILA
atgcccagtgccctccaccttagggaatccccgccagaatccattgagcgcaaggacagcagtgctctgcagcgttcggccagcattgattcctttgccgagattgtgtttagtgagtcgccacgcccctcgctggctgtcacgggaccaggtgcctgcgcctccgcatccggcggcccttcgccattcagcaaacgtccttcggccagcagcctgtactccacctcaacgtccagctccttcgcatcgcagatgcaggcccagctgaatgtcaattacggcgactcggcactgggatccggatcagcaacgggtggaccgggctcgggtcaccaccatggggcatctggtggcggcaacgggggcagcagtgccagcagcagtcggcgcgaaagcatgctcagcccctcatccacgcgccgctccaagctgaccagaatcataaacgcctatgctttgtaa

SEQ ID NO: 32820 - protein, 153 aa, DROSOPHILA
MPSALHLRESPPESIERKDSSALQRSASIDSFAEIVFSESPRPSLAVTGPGACASASGGPSPFSKRPSASSLYSTSTSSSFASQMQAQLNVNYGDSALGSGSATGGPGSGHHHGASGGGNGGSSASSSRRESMLSPSSTRRSKLTRIINAYAL

SEQ ID NO: 32821 - DNA, 4631 bp, DROSOPHILA
gggtgcaagttttttttttttgcaatagcgaagcaattgaaagtgtgttgtccctagctggcatcttgtaaatgcctctgggtgggaaaaaactttgctgatttctgttcgtttgacagaccctcctgccatcctgccgtccagccatcctgccatcctgccatccttctatccccgactatcatcatcaaaattgcaggagggaagttgttgttggtaagaatggcagatattcgggcgccttggccaaatgtcaaagtcagaaataaatcaaataaaaagttttccattttttgctagcatacatagatctcgtgctgttatttttttattgcatgcacatacacatgtacgtgtgtgtatagttcgagtggtaagtgggtggttgggtggttgggtgtttgggtggtggagctgttccatccgattgacaattgccggcgaagggcctggacagacgcatctgttgtaggcgtcaagttgggaatcgagttcgagtgccaggaattcaatcaaacatcaggctgcagaaatggcgggggtatcatcgtttcaacgtttcgtcatggaaaattcgtgcaagcgagaaactcacagttgtcgcaggcagccgaatgatatcagaatggattttatacggaggtcttatgtacagtggaggtgttgaaagtaatttccacacaacaatcaaatgtaattcacatgcgaggggcgcacaaaaaaaaaaaatgcgcaaagcgacagctgacaatgacactctttcaacgcaacccgtgttgcaagtaataaacaaattaaattcttgacacagcggtgtgccacagaaaactggttgaatcaaatgttaagtgggcagacacaaatttcttcttttttttcttaaaacaatgcataatttatattcagaaaggaactagagtcatcttatgatgcagtaattaagttatgatgcaatatacatataagtaagcaagcgttggaagatttaaataccatttgaatggtgcccttttttcgctcagtgtacgcgggagtacatatggacggaaaaggaaagaatgcctcatgcaaatgaaacggaaatggcatggagctgtgcaatgagaacgggatataattgcatttgcctgctgacactaccgactcgtcgcacttaataaataatagcattaacttattattgtcactttctttggctctttcgcaccctttgctcagcctctcaccacctttcaaaccccgccttctctttcatttcagagcccagcaaagtgccgccgcagcggcgagtggtgccggcggtgcgggtggtgccggtggtggtggcggtggctccgggtcacaatcgcgaccaggcagccggaagctgccgccgccattgttacggtcgcgcacactgcccgccatcattgtgccaggacttccggtcgtctcgctgcacacggataagcaaacatttcagctgggtgcgtactatacgtttttatttcgaagtgggttaatttataaaaaataaagcttattctttgcacttttcacactgcaattaatcaaaaattccatacgataagttaatgttgcataaataatagtgacataaggttgttcaatacttgcggaataatttatttattttttattgaatacaatgcacacaagttggccatttacatgcagtcttaaaattgtttaaacaacaatagttaaattgaaagctgaacaatgctagattattttatataattcacttcagcacaaagtataaatcggcttaattaagatcgattttcgagatttcgaattaggtcaagggcttgcacataattttcagctgatttgagagcagcttttaaaggcatgtaggtatgctataaaatgccagctctcgaaaccctacactttctggtcattgaatgcatgagtgcattttcatggcaacatgaccatggccagattcgattaactaattgagaagagtgaagccaatttaaatacaatttccgcgctgtaaagtgtgctacagaaaatgcatacatacacaaacgacaaaagctgatctagacagaagaattttaatatatatcttatttcagaaataaatacgattaactcaaaagtcaaagaagtagagattttaatttgagttctttccagaaattgtattttccggaagaccttaaatccaactggttgagtgcaaaataaagcaggatattagtgaaaacgttttgaaacgtttttatctggcattggcaaagtgccacacttggcacgttgcaccaatagaataagtaattaaaaacatttgacaggttatcagcacaagttgatatttgtgcatatatagatgtaatatccacatatttaccctgatttatttttatccgattttccaatttcaattcagacgaacgtttgttgggcagcaaaagccgcagtggcagcgccagtggccatcgatggtcgctgctcacacgtgccaccaacagcagcagcatgtgcagcaacaacaacccggccagcagtagcagcagcagcagcaacaacaataacaatttacacatggccaacaacaataacacactgatggtgaaatcattgaatttgcccaaagacgatagcaatttggtctatcgccgcaaatcctcgggcagcacgccccaccaacatcagaatgcgcaccatcatcatcaacagcatcatcacctgcagcagcagcagcaacagcagcagcagcatcagcagcagcaactgcaacagcagcagatgctgcagcatctgggggacagctcgctgtttcagctgtccgacgatttcgagtgccacgcggatggttccctgctcctcaggtgggtaaagtggagtagcaactgaattaacgcttaattagaaaatccgaaatgggaatttaactaacatcagacggacaaagtaaataaattagtaagctgagtacttaactaataggatttgctgtagtaactttataatattataatcattgcaaccaagtcagtcaaaccaaagcattcttaactaacataatatgcataatattttcatatttcctatatattccattatatttcataccaatattaccttacagaattccagctcctcatgtggtcgccgcacgagcctatcgactggcagctcgaaagcgagctgccgcctcctcggaggcctccacaccgatgacccgtgagcacacgctccacgagatgccgctggcggagtcggcctgctccggatctgccactggttcgggcacgaccttcacgcgtctggccaaattgctgcatcaatcaagcacgctggcgggcaggtccaatctgcagccaccgcccatggctgacaatgcggtccagagcctgggcagaggattgggcctgggactgggcgaggaggcgccacgtcgtctgtcctgggagaggtgcgtatacgtaatttacggtatttacacccgaccacgacaacgctgtcaactttcaccttgactccaccctgactcctgatggcgaactggtgcaattagctaatttcatttacgccctcaagctggaaagctgatctcggtcgtgtgtctctggctgcgccacctaatggacggccacatgaggttggttagctgctcggttagttggtttagagaaacgaacggatggacagacggacggacggatggatggatggttggatggatggttggatggatggttggatggacttgatgataggacagcaggctgctctgcgttcgagtgccgcatttgtctttattcgttacgccttacgggttggactaatggagacacatgcagacgcaagattaacacgcccggagcagctacatcctccgctcgatactttcctctccgaaggatgttggcttaattaacgtcactcgctccgcacgataagttgcacaaatcaaaccacagctggccgacttgcaggtggcattagatggacttaatcgtgctttgcaatgtgaagtttacatcacactcgaaaggaatcattcaattaggaaataattcgaaacaatcctcttaagttgaaatctatgggagataagatgattaattctgctgctatataatcctacttaattatgtgcaaatttagatatttaatattttcatattttattgtctaggtacattacaaattaagagctcaattttacaacggcaacaattaaatatattaaattaaagcgaaatattttagtgagcatgtatcgctattaattataaaatatatacgcctttgcgtatgaaccgcgaacaatacgcggagccaatcgaatcacacttgttaaattgtggtttaatttgtgttttgttaagccacattgaattattgagtgggggggggggggggttggcgctacatgttagatgggtttgcccaatttcgacgcgcatgctgtttcgaaattcacaagcttcaacggatttgtgggcgcatcaaaactagtcctgattaattatgcaagcacatttatcgatgtgcagcagcagccaaaggatatacgaaccgaaccaataccacatttccctgatggaattaagcaatttacgagcggaaaggactacgccttgaactctgcagtccgcactcaa

SEQ ID NO: 32822 - DNA, 1068 bp, DROSOPHILA
atggtgcccttttttcgctcagtagcccagcaaagtgccgccgcagcggcgagtggtgccggcggtgcgggtggtgccggtggtggtggcggtggctccgggtcacaatcgcgaccaggcagccggaagctgccgccgccattgttacggtcgcgcacactgcccgccatcattgtgccaggacttccggtcgtctcgctgcacacggataagcaaacatttcagctggacgaacgtttgttgggcagcaaaagccgcagtggcagcgccagtggccatcgatggtcgctgctcacacgtgccaccaacagcagcagcatgtgcagcaacaacaacccggccagcagtagcagcagcagcagcaacaacaataacaatttacacatggccaacaacaataacacactgatggtgaaatcattgaatttgcccaaagacgatagcaatttggtctatcgccgcaaatcctcgggcagcacgccccaccaacatcagaatgcgcaccatcatcatcaacagcatcatcacctgcagcagcagcagcaacagcagcagcagcatcagcagcagcaactgcaacagcagcagatgctgcagcatctgggggacagctcgctgtttcagctgtccgacgatttcgagtgccacgcggatggttccctgctcctcagaattccagctcctcatgtggtcgccgcacgagcctatcgactggcagctcgaaagcgagctgccgcctcctcggaggcctccacaccgatgacccgtgagcacacgctccacgagatgccgctggcggagtcggcctgctccggatctgccactggttcgggcacgaccttcacgcgtctggccaaattgctgcatcaatcaagcacgctggcgggcaggtccaatctgcagccaccgcccatggctgacaatgcggtccagagcctgggcagaggattgggcctgggactgggcgaggaggcgccacgtcgtctgtcctgggagagctggaaagctgatctcggtcgtgtgtctctggctgcgccacctaatggacggccacatgaggttggttag

SEQ ID NO: 32823 - protein, 355 aa, DROSOPHILA
MVPFFRSVAQQSAAAAASGAGGAGGAGGGGGGSGSQSRPGSRKLPPPLLRSRTLPAIIVPGLPVVSLHTDKQTFQLDERLLGSKSRSGSASGHRWSLLTRATNSSSMCSNNNPASSSSSSSNNNNNLHMANNNNTLMVKSLNLPKDDSNLVYRRKSSGSTPHQHQNAHHHHQQHHHLQQQQQQQQQHQQQQLQQQQMLQHLGDSSLFQLSDDFECHADGSLLLRIPAPHVVAARAYRLAARKRAAASSEASTPMTREHTLHEMPLAESACSGSATGSGTTFTRLAKLLHQSSTLAGRSNLQPPPMADNAVQSLGRGLGLGLGEEAPRRLSWESWKADLGRVSLAAPPNGRPHEVG

SEQ ID NO: 32824 - DNA, 2135 bp, DROSOPHILA
ggaaaatgggcagagaatgaggctggcgttcaagacattcaacttaatgctgtgcgcattgtcggtaaatccggggattgcctttcccccttttgcacaccaataaacttgacagttaatccgtaattgatctggaaaaaggtacgattatgataatgagaagctgacaatgagcgcatgctgatggaactgaaactcatcgactgacccaaaataaacccccgaaaaaccctcaaagtttatgctcacttggcggtgcgcttaaactcccataccgaaaggcacatgaatttcaatttttatttgacaatcgggagggagaaaaaaaaaataaggaagaaaacgggaaacgtgtcaagacaaatgtccttggggtcgaggctggggaaattcgtttatggaaatgcgtaaaacgcacagaaattcacaacttacctaagcaaccataacagcagatcataaataaaacaatatcatatgaatgcttacgcgtcgtatgcgtaatgtcgacgaagtggatattccgctttcggtggcacgggggttggtttgaaagtgctgctgcgacaagtaagcaaaatgttatttgctccttggcacgcaattgtacagacaacacaaacgaggcagctgggaacacgtgcaggtcctgccaggatatgtaaatcgacgcgtgtgtgtgcatagatataaccatgttccgcatctaaccaaccctacgctttctcagctccgaacaacatggtcatagtgcaggtattatagtgtaaaagccaaaagtgagaaaaccagcagccaaaggactacgccacgagcatacaaatgccagccatgccgtcgcaacttgtcataagcggcaccgccggcttaccagcaaaataaacagcgaacacagggacaccagccagcaaactcgagacgcagcagcagcaaacgcagcaggataccagccaggagcagcagcagcagcagcagcagcatcagcattcgcacagccaacatggagcaggatgccgcagcaggtcctgcaaagaaaagcggcaccaccctatccgtcgaccgggccgccttccttttgctgcgcgtcaggaaagtgttcaagaagaagcgacagcagcgcaaggagcgacagtaagtcgaatgtttgccattacttaaccaccgcgggcggtaatgggggttttaagggggtgctacaagggtggggggagtggtaactagagggggaaaactgttgtcgggatttgccggatttccctcgcaatgaattgtgtctgccagccgaaggcaaacagaattaacagtctgtttgaacggcggattgaaagcggattgggccgcaatcaagagcgatttagttgccaatcaatatgcgcggtccgaaactagatccaattttactgaccagagctgcagatgttttaatagtgcatttttgagggagattatataatattatatgataaactttcactataaacccattttaaggatttattttatgcacttcgaatggaatctattggaatctgcattctacttttataatcaggaaaacaaacagagcttatttacaatttacttttagattcaaaataatcttgaataagtagaaatgggatataaaaacatgcatacggatttcttgcttttcttgttattttcttcaaagaaaggaaaccgaagatttcctgaaactgaaactaaacagatgcaataaaaaaatacgtaaaattcttgtgcttcactataaaggaaatttccctttacatgctgtttaatcccagctattgccattcacatttgtaagaattaaatttcctattagaactcaagttgtgaaatgtgccgccacaaaaccccattttcagtgccacagcaatctgtggcaacttatttgggaaatccttaaagactctttacgttgagcaagtgtgtgtacactactgcaaattgccaaataccctgcggaaatggctagaaagcagctttcagttctcaggtacttgcattttgagtcaactttagttttcagcttttgcggcaaatgcatttggtggccaggatgcggcatttgaaggaccccccccacccccccaaaaaaaaagtagctgataaatatagcttgtggagtc

SEQ ID NO: 32825 - DNA, 135 bp, DROSOPHILA
atggagcaggatgccgcagcaggtcctgcaaagaaaagcggcaccaccctatccgtcgaccgggccgccttccttttgctgcgcgtcaggaaagtgttcaagaagaagcgacagcagcgcaaggagcgacagtaa

SEQ ID NO: 32826 - protein, 44 aa, DROSOPHILA
MEQDAAAGPAKKSGTTLSVDRAAFLLLRVRKVFKKKRQQRKERQ

SEQ ID NO: 32827 - DNA, 3137 bp, DROSOPHILA
attttaactggcttaagagggcatcacttagtttctaaagcaataccctttcgataacaattcatttaagacaacttgccaacttgtggcgagaagggaaacaagaagacgaacgtggagacggtgatttttatgtgaacatttattactaactgataagctttgattaaacttaggaaagccgttatactatgcatatacacatatatataaatatatatatgaactatatatagtatatatgaatgctcgtgtgagcaaccaaacaattacgatatgaatcattaaatacttccgaaagcattaaatccctgcagtttgtctaatcctccgccttgaacttaaacgaggtatccgtctccatcagcatattttccaaacgtaattccaactggcgtcgcttcagatccacctttaccaccgatgccacaatgcgatcgccaacgctcagctgcgaattattcatgttactgttgtgtatgaggccattgcgctccactccaacgtccacgaaggcgccaaactgggttacgttggtcacggcacctgtgtgtcggaatagtttcaataagtacatatatgaaatgactatcatagtctccacttgccagtgaccacctcgcccatgctaagatcatccagcctagttagaccttgtttgaacagtggcctcttgtccagatctgctcgataatcctgaagtaattcgcgctgcagggcaaccaacaggaactccaactgaaaggaaatttattttaaattatttgaacattgcaataggcctgtttagtatagattgagtggcacttactcgctccatgggcagcttgtgctgcttggcaatgcgatcgagattaggctgggatgaggcaaactgcttgatgctagctataaaggcagccttgcccacatccgacagctttaagtcacattctccgacaatactgaaagcacaaaaagtatttggttttagagttaagttttcaaattttccattataatgattgccaagctaaagcaggaatatgcggagcgctggcattatcctccaattgtgccgccagccaagcttcgatatgttgcatgtggaaaggtagcattctacggccacaacgataagccgaaatacaagccctgctggcagcatccgctcaatgtgcaggatcaaacccgctttggagtttgctgggagtatccgccggagcggtacaagcgtcgtccgcttccgccaccgtgccggggatcgaccattcccatccatttgctgaagccaaccttcaagcattgtgagaatatctactcccgctacgattttaagcttgagcagtgtgtgcacgagcaaactctagtagttgaccagaaaatgaaggccctgaagaatgagctggagcaggccaaaccatttcagattgagagggttaaggagatgcgttaccatggagtgcgttatcgcattttagccagctcgaccggatgcactaagacctatcccgagtacataagccggatgaccgaagagcgggccctttgcgagtttcagagagcctacaatatcgtcaatcagtcaaagtaagtctattaaaaatacacagccactgctaatttaaaactttttagcaccgatttgagcaatttatacctggacatgagtgagtcgaaaaaggagctagatcaacgcgtagccaggttggaccggtctttaggaagtacattcttgaaagagctagattcggtgctgcaaataatcgaggacttaaacacgtatttctttggcgtgatcgtgaagctaaagacgtgggcggagctgatggaccctatgaaagagcactctatagaggactatctggggcttttgagtcaggagacggacttccggacttttatgagtgccggcatggagaactgcacctgcaagcgttgcgacaagaaggatcccttgaagccgtaccttccgtgctggtgtcaaatggaatctagcgaggatgttacaaatcttaagaattttgacgacgattgtccaaagaacatagctggcatcacgcaacacgaaagtgacattgtgacacctagtgacacctccttgttagtgagggcagcggatgaaaaggccaggcttgcgatgaatcaggcggaataaagtctcattattattggttaatgaagtcaattgaatattggacttacctttccacaacgttgtagctctcaggatgcacccaagtgcaatctaatggattctgtagttgtcctccaacgcttcggggttcgatgcgcacaaaaccggcgcactggacaaacgatttctcacctatgcttcgcacggagagcagatccttccgtgtcttgaatggtcctttctgcgtacgatgctcaatgatcttttccgctttcttttccgacagaccagcaatgtgcctatatggtggagaatattaaaaatatataacttatttgacccttaatcacacatacttgagtacactcagactggctgtgttgagatcaacgccaacataactgacacactcggacacaacgtcattcagcgatgccgtcaaaatcttctcgggaacatcgtgctggtacataccaacccccaggtgacggggctctattttaacatattcactcaatggatcattcaaacgacgcgctatggacactatacaaaatatgtttgtttgtgttgcttttaatttgatcttcgtccaaacctgcgctcctttcgtttgtatccattttgggaaactccttggcggccacattgctgcaggagtaaatagatgctccattctcgttaacgatgctgtagcgaatgatcctgctgtccagaacgccggcatgaaacataccagttagccagtgctcagtttcgcgacaggcagtaccattgcccaggccaataattttacagcttttgggaaaggcaaaaaagacatattaataactatctttgcaaatcgaattcaaaatatatatatacttatgatctgaaagaagctgaaccaatttctgttcggcagcccgcttgtttgacatggcaccatgagggtaaataacaccagtgtacagcacatcagcagtctcggatataagtgccagcttgcatccatttataaaacccggatctatgccca

SEQ ID NO: 32828 - DNA, 1089 bp, DROSOPHILA
atgattgccaagctaaagcaggaatatgcggagcgctggcattatcctccaattgtgccgccagccaagcttcgatatgttgcatgtggaaaggtagcattctacggccacaacgataagccgaaatacaagccctgctggcagcatccgctcaatgtgcaggatcaaacccgctttggagtttgctgggagtatccgccggagcggtacaagcgtcgtccgcttccgccaccgtgccggggatcgaccattcccatccatttgctgaagccaaccttcaagcattgtgagaatatctactcccgctacgattttaagcttgagcagtgtgtgcacgagcaaactctagtagttgaccagaaaatgaaggccctgaagaatgagctggagcaggccaaaccatttcagattgagagggttaaggagatgcgttaccatggagtgcgttatcgcattttagccagctcgaccggatgcactaagacctatcccgagtacataagccggatgaccgaagagcgggccctttgcgagtttcagagagcctacaatatcgtcaatcagtcaaacaccgatttgagcaatttatacctggacatgagtgagtcgaaaaaggagctagatcaacgcgtagccaggttggaccggtctttaggaagtacattcttgaaagagctagattcggtgctgcaaataatcgaggacttaaacacgtatttctttggcgtgatcgtgaagctaaagacgtgggcggagctgatggaccctatgaaagagcactctatagaggactatctggggcttttgagtcaggagacggacttccggacttttatgagtgccggcatggagaactgcacctgcaagcgttgcgacaagaaggatcccttgaagccgtaccttccgtgctggtgtcaaatggaatctagcgaggatgttacaaatcttaagaattttgacgacgattgtccaaagaacatagctggcatcacgcaacacgaaagtgacattgtgacacctagtgacacctccttgttagtgagggcagcggatgaaaaggccaggcttgcgatgaatcaggcggaataa

SEQ ID NO: 32829 - protein, 362 aa, DROSOPHILA
MIAKLKQEYAERWHYPPIVPPAKLRYVACGKVAFYGHNDKPKYKPCWQHPLNVQDQTRFGVCWEYPPERYKRRPLPPPCRGSTIPIHLLKPTFKHCENIYSRYDFKLEQCVHEQTLVVDQKMKALKNELEQAKPFQIERVKEMRYHGVRYRILASSTGCTKTYPEYISRMTEERALCEFQRAYNIVNQSNTDLSNLYLDMSESKKELDQRVARLDRSLGSTFLKELDSVLQIIEDLNTYFFGVIVKLKTWAELMDPMKEHSIEDYLGLLSQETDFRTFMSAGMENCTCKRCDKKDPLKPYLPCWCQMESSEDVTNLKNFDDDCPKNIAGITQHESDIVTPSDTSLLVRAADEKARLAMNQAE

SEQ ID NO: 32830 - DNA, 2604 bp, DROSOPHILA
tcacactcaataagagcgactattatgaggaagctggccattcgacctgccggacttcccataaaacccagcatagatattgccccacttccatccatcaatttgaggcccacggtgcttggtgcctcgtgcaatgaagcatttaagcgccaacgttggctttcaacggagcgcaagaggcaaacttgcccggttgcagttgcagttgccatcttggccaacatgcagtggtaatggaaacctgcagcgcttggctggccagcgtaatattttgtaggtcatcgaaaagtgcacaccaccgagattggtacacagagaaaaaaagttttaataaacataagaaatagggagaaacaatgtaaaacccttgctaattaagatatctgataagatacaatgctcgtgtcttaaccatcaacgataaatcaatgatcattagcttcggcattccatttaatttatacatattattcctatggctcacttcgccgttcttgaatctagttacgtttactggaattttagactaagcaactagctcattgacattctttggcttctgagtgcttgtacgattaaaaggctagaatcttgtcgtcaactctttagcatgcagtgggtgtgggtgccattagattatcttatgatcaaacattatcggtaactataaaagcccataacacgcgccaaggggtcgcacaggggccaatcggagccagcttgttggactgggctaagcatagctagtcagcagctagttaatagcctcatatcacactgacactccggctaattccaatcaatgtgcgcacattgtagccgcactgagtgctttttgattgcccgcccagctcaagggtgctccactgccagccgttttattagcagcattcaaagagctgtaacccggactgcaaaaagtataagttatgactcggcagttagggaactggctaattgaatgacgttacaacttccgtaacgagacaagctccactcaatgcccttcgacagcgccaatgaccataaagaggtgggtcaagttgagctttgattgcgagcaagccgctcgaaggaggcgtgtgctctctcttcggaactttcccagaattcaagcgtaacaagtctgtttgccatatggttcccacaaccttattcttaatatgtgtgattagacaagacaacgttaatctgcttggacgcacgataaaaattacatcaacaattagaaaacaaggtctagctgtgcaacctactataactagggtataatgagtatatgatctctgtaaaattcatattatttttccctttttttttaggcccagttcgtgctgtgcatcttccacaccctccgcgccctcttcagcaaccagtgccagttctccaagttcatctctgcgctgctcctattgaatgcatccattttcttctgcctcttcatgaacttctacatgcagagctacaggaagaccaaggcggcgcagcaactgcagcagcagcagcaacagcagaagcaacagcagcaactggatgccacgccctgcaaggcggacagcaacaataacacggcgatgctggcgcaaaagctgaaagccaactgaattgaaaatcgaaagcagtgagaaaagtgcttccagggattgcccaacattggggggaacaaattttacataaacggaccagattggtgatggcaacggacggaacggaagtagttttggtacaaaggtttcaactaacgctaagctaagcttaagagccataaatacacgagcgtgcacgcacacacacacacaaccacagaagagaacgaagaagaggaagtccgccttccgatgatcgatcgatcgagcatggggaacacggggcgtatgcgcaacatcaattataacttggcgattatcccctcgccagcttcgcttgattgcttcgcttcgcatcgcatcgcattctcgccatctgtggctgcattcgcatgtgtagaaccgtacaacaaactgggtcaattttcgagatctgcctaatgtgtaagtcgcctaattctagaacctcacgaacgaaacgcgtttagtctttaattcccttaggctaagtgattattgtaattgtaattgtgtatagacgatttgtaaatagcctgttaaatgttaaatatttgtagtcctaagccaactagtctaacttacaaaattcgcacgaacaaatacggcgagcacgaaattaaaagccaagacaaataaaaacgaagaaaagataaataaaataaaaccgaaaaccaaccaactgggtttcaatatgttctaaattcacagcggaaaaaactgagctgtatattggcagggtctttcggtgcgaaagagataaataaattttagaaacatatcaattttagaaacttccacaaacgaatctagtgcatattaaaaatatatgtaaccgaattgactaaaaatgctttaatagaaatatatatggttaatttggcgcataattaagctaacaggaattacaaaacataaattcaaatatagtactcgctaatactataatcgagccggcaacgccgacgttcagtttaaaaaggttcgcgccactgcttag

SEQ ID NO: 32831 - DNA, 315 bp, DROSOPHILA
atgcccttcgacagcgccaatgaccataaagaggcccagttcgtgctgtgcatcttccacaccctccgcgccctcttcagcaaccagtgccagttctccaagttcatctctgcgctgctcctattgaatgcatccattttcttctgcctcttcatgaacttctacatgcagagctacaggaagaccaaggcggcgcagcaactgcagcagcagcagcaacagcagaagcaacagcagcaactggatgccacgccctgcaaggcggacagcaacaataacacggcgatgctggcgcaaaagctgaaagccaactga

SEQ ID NO: 32832 - protein, 104 aa, DROSOPHILA
MPFDSANDHKEAQFVLCIFHTLRALFSNQCQFSKFISALLLLNASIFFCLFMNFYMQSYRKTKAAQQLQQQQQQQKQQQQLDATPCKADSNNNTAMLAQKLKAN

SEQ ID NO: 32833 - DNA, 2896 bp, DROSOPHILA
caagcgggttactctctgacggatggaggtggccatttgggtccggatttgcagcatggcaatcgagtgaccaacatgtttgccaatcaaacgccgccaccgccgccgccaccaccgccactaccagtggcatcaacgccgcaccacccgcatcatcaccatcacttgggacaaccgttgcccaatcttttggtgcagcaccatccggcgccatcgcacatggagcagcatggcagctcggcgagcctcttgcataatccaaatctgatgcacctgcagaccccgacgcaccaccaccaacaacaacaccaccagcagcattcgccacacaatccaccgcctccgcagcagcacaatctggagctgggaggtggctcgggatcgggagcagtgcttctctcgccggcgcatcttcagcaaagtccgcaatcgaatcggagcagtcattccctccaggcgcagagtccacctccacagtcagtggaggaacagcagccacaccagcagcagcagcagcagcaagaaggagccaccactgaggttaccacggatcccagcacggctcacgtgatcaactccatcaccatatccccgaacaccaggcacaccttcaagatggagaacatgtaaggctgtcgccggggaatctccccacatcgcactgcctcaaaagcggatgagtaatttatttttgcctagctagagtttttagtagaaaattgaatttgattcgaccgaaggagagatgagatagtaatgtaaatacccgtaccaatgtccataatgtatttgataaactaatgcgaaacgataaaccaaaagctactaatgggcgctgtgaaatgaatcccagattaagctaaccagagtaattttggatatgtttcgtggccctgtgcgtatatcaatgggtagtccaatggccaagcactaaccaacttcaaataggcttatctctttaagatagactaaatgtcactttcgatccgatatattaataatgctatgccaggtccaatggtatctttctttaacttataaattcaacgaagcaggtaagtaaactaatgcatgaacacataaacacacataattttgggctcattcgtgtatgtcctggcatccaaaaccaaacataaccagcagagggagcggagagtacaactccaagcataccccccatcagcagaatcagacccaaaccgatcctcactagccttctcgtcctgtattgtagtcgcacccggcgagcactggttccagggcaagctggagttcatgctgagccagcgaggcaagccgctgctggtccacgacgggcacaccttcggcattcagtacgtgcgcaaggacaagaagtactggcagtgcaacctgtcgcgcaagttcaactgcaaggcgcgcgtgaccaccacggacaccggcgacataatcgtgaccaacaacgagcactgccacacagagatacgtcagcacctgcgcaaggattaccagcggaacaaagtgatgatgaatgcactgattaacctaagtacgagtcacatgcggcgaaacaatatgggtgggctgggtgccttgcccatggtgcccgaggtcctgacccagggtacacccattcacgagatggtccaaaacttacatgacatggcagcaaaagtatcggcggggcagcaacatcatcatcaacaacaacaacagcagcgggcacatgacgtggaggagccactagactgcggactccgatcgtcggcggcgctggaggagatggcacgcagcttcatgaccaacaacaaaccctcaattgcctttccgggcagcgaatctggtcataaccagcatggtagcgataccaaagaggaaccgtcgtggaaggagaagatcgagggcgacgcttaggcttaaatttacataaatagcaggtcaaatgacagttaagtacaaaagtggaatgattgcaataatactcaaatacactaaagacggcgtaaccaaaacaattccaaagaatttagttaatacataataagctaacgtacaatctgctagagcatttccatgagttttatatcgtttttattattgtacgttgcattagctttacactgtaataaatgttgaatttgaataaatctttttatatgaactacattagatgtttatcacgcggctcaacttctggatgcggttgagcagcagatcgccctgcttgatggtcgcctggtactgccagttcttgttgtcaggccgattggtctccacaatgccgccaacgcgatccaccttggcatgcagccgtccggcggcgatgaagcgtgccagctcctggtcaatgtattccactgttacgccgaacgactcggccatatactgcagggtgagggagcgatacgactccagcaactgggtgtagcccagaatgcgcatctcgcgcacgtagtagcggtagtggggatgaatgaggtagtccaagcgcaattgcttctctacgccggccaggtgtacgtagaagttctcatattggcagttgtacaaggaaaacaggaactgtttcacgtcgggcaggccatggagcacctcctggatttcggagcccttgatcactttgtcgcgcagctcattgcgcggcagggcaatcatggccacgtaaacggtgtaacgcacgaaggtggggtagtccatcagttcgtatgaggtgaaggtgcttacggtgtccaggaagaacgtggccgccgccttgaagtcacgcaccgccaccgagtaaacaccctggtagaccttcaaccggttgcgtcggtcccaatcgccgccttcctcgatcagatacttggccttgtcgatgttgcgagtgatgagatcgtggtcaaggtaaaacagtcccaagcggatcagatggaac

SEQ ID NO: 32834 - DNA, 714 bp, DROSOPHILA
atgctatgccaggtccaatggtatctttctttaacttataaattcaacgaagcagtcgcacccggcgagcactggttccagggcaagctggagttcatgctgagccagcgaggcaagccgctgctggtccacgacgggcacaccttcggcattcagtacgtgcgcaaggacaagaagtactggcagtgcaacctgtcgcgcaagttcaactgcaaggcgcgcgtgaccaccacggacaccggcgacataatcgtgaccaacaacgagcactgccacacagagatacgtcagcacctgcgcaaggattaccagcggaacaaagtgatgatgaatgcactgattaacctaagtacgagtcacatgcggcgaaacaatatgggtgggctgggtgccttgcccatggtgcccgaggtcctgacccagggtacacccattcacgagatggtccaaaacttacatgacatggcagcaaaagtatcggcggggcagcaacatcatcatcaacaacaacaacagcagcgggcacatgacgtggaggagccactagactgcggactccgatcgtcggcggcgctggaggagatggcacgcagcttcatgaccaacaacaaaccctcaattgcctttccgggcagcgaatctggtcataaccagcatggtagcgataccaaagaggaaccgtcgtggaaggagaagatcgagggcgacgcttag

SEQ ID NO: 32835 - protein, 237 aa, DROSOPHILA
MLCQVQWYLSLTYKFNEAVAPGEHWFQGKLEFMLSQRGKPLLVHDGHTFGIQYVRKDKKYWQCNLSRKFNCKARVTTTDTGDIIVTNNEHCHTEIRQHLRKDYQRNKVMMNALINLSTSHMRRNNMGGLGALPMVPEVLTQGTPIHEMVQNLHDMAAKVSAGQQHHHQQQQQQRAHDVEEPLDCGLRSSAALEEMARSFMTNNKPSIAFPGSESGHNQHGSDTKEEPSWKEKIEGDA

SEQ ID NO: 32836 - DNA, 4655 bp, DROSOPHILA
tattgagaacaagtgataatattgtttttaactagatgttgatgctgctagcgagacatgcacagtgggcaggggttgatgggaaagcgctgataagaatcagtttcagatcagcaaattcgaaataatctgtcagaaagaagtacgaacctaatctggaatcgggttcaaacactttaattcacttgtgaatcctacttttggcgggaatgaaatgctaaatgatgaattagcataaataatgaccttgcatttttggactcattaaaaaacatatttatatttaaaaacgattgggaacttatattatcacggctaaaacatatgtataggcatttttgaaacacataaaaccactttgatggcccactgtgaactatgaaatattgaaacttatgtggcatgatctcgaaccacccctgagataacagatccgcaccactgtggagccgatccgattcgaatccggacagctccacagcttcttaggacgagtggggagcacgcggatgatatgtcatgctacttattttataattattgctgtgctactgctactgcgttgctgttgttgagtttatatttaagttttcagatttcttatcatagctgtttttatgtattgatttagtatttgagcgtttcgatgataacatctccactacgaatgtgacctcctttcctactgatgttattattgtcgttttcagtctttatgtaaacaagcaattacgttgaattatttttgggagagggaaaaacataaaaacggtttgtaatcagtctggaatcatttaaaaaatcccctttggttttaaacgcaattcgaatattctttgccttgttgataaacacgtttttggatttttccaaaaatgttgtttgctacttatcttaaaaaaaataccctgtctaataacaaaatgtgatttttgttataacttgttttgtatattcccaaatctttctagtaatactcaaggatgtgagtttcaacattatgatggagctactggagtttatgtaccaaggagtggttaatgttaagcacacggagttgcagtcgttcatgaaaattggacagctgctgcagatcaagggcttggctaccaattcgaattcctcgccaggatcgagtgtctcggagaagtcctctagtcagccaccggcagaagaatcaagcaacaccaacagcaccaatcatcacaactctagcactaatagcaataacaatagcaaatcggaaacggatcacaatgagtccaaaggccagagcaattcaagaaccacttcgccaggtggtgccagcagagcctccaacgatgccagccacctgtacacatcgaacaaacgtccgatgccgtcggattttggcagcgattccctgtccatttactccggcaagcagttgagacgctccctcaaggatcacggttccggcggaagcgaaggcggcggaggcgatcacgcggataccgcagccggattggacaacagcatgaattcagaggagttcttcttgccacccattccacaaatcacgatgggagaacagcgctacgatctcggaggtctgaaacgggaatcggatggtcaccaccacggtcccttgtcggctggcggaggaaattcgggcagcgttggcagcctcacctcctcggcctcaccgtctgcacccatccgtaatccctttgccccgaacttcatggacagcttcaactactacaagggcggcaacagcagtggtcccagcggtagttccaataactcggttggcccaggtggcgtcaataacaatggctccgtgggccttggctccggcgccgagtaccccaacgaactgtatatgcccaacgattactccaagagctttgccaaccacatggacattccctcaagtaggtggcctccagatttgtgccactggcactatttttatcacttttctgttgcatgtagcttggcattcatattgacttattgttttattctttataagattgggctattattttgcatccatcattcggcacataatataacacgatcattcacaccacgtacacactagcccactgaactcattgtcactaaccaggaatggagccaaatggagacctaacagagctgtcattgattgtagagggatatttgctgatttaactggggtaaaagtattaacagaagtaaatacttgagcgtatagttagataaacatcagatagctctgattgcccgtgagattcagttgttcgatcgacctggcagactggtgggcctcaagtttttccacatgttttgctgcaattgtatccaaggggttgaagactattcgatttactagagcaaccacacaatgcggggttaaatatttggctcaaagtttgctttaaatcgaaatattttaaattaacttaaaatgagaacatactaggaaaaactagagagaacacttacttaaagtacaacactttcagctgcattttgaacacacattaagtagtgctttcagtttaaatacatttagtattggctttataacgtggtaaaatcgaatccctgtaacgcctaacaatccgcacagtatcgagaacacgcacacccaatcgcatattccaaacggaggaggagcgtgactcctcccccactatccaatagcttgcctctttcccctgtaaataacaccctttgagagtccagcgaagaacagaccactaatgatccaccattgtccggagcaggcggcagcaacatggtgatgctgtccaccacctctctgctccacggcaactgcgtgttcaaccggaacaacacggtggccacgcagcagggcatgaagacctactggctgtgcaagtcgtaccggatcagcatgtgccgggcgcggtgcatcacccacttgggcaggatcatatccgccacgggcgtccacaatcatacgccgcacatgcgcggtggtcagggatcttcggcgccctccacagcgtcagtttccggaaatccagccccgacgcccatttccagccaagcgggttactctctgacggatggaggtggccatttgggtccggatttgcagcatggcaatcgagtgaccaacatgtttgccaatcaaacgccgccaccgccgccgccaccaccgccactaccagtggcatcaacgccgcaccacccgcatcatcaccatcacttgggacaaccgttgcccaatcttttggtgcagcaccatccggcgccatcgcacatggagcagcatggcagctcggcgagcctcttgcataatccaaatctgatgcacctgcagaccccgacgcaccaccaccaacaacaacaccaccagcagcattcgccacacaatccaccgcctccgcagcagcacaatctggagctgggaggtggctcgggatcgggagcagtgcttctctcgccggcgcatcttcagcaaagtccgcaatcgaatcggagcagtcattccctccaggcgcagagtccacctccacagtcagtggaggaacagcagccacaccagcagcagcagcagcagcaagaaggagccaccactgaggttaccacggatcccagcacggctcacgtgatcaactccatcaccatatccccgaacaccaggcacaccttcaagatggagaacatgtaaggctgtcgccggggaatctccccacatcgcactgcctcaaaagcggatgagtaatttatttttgcctagctagagtttttagtagaaaattgaatttgattcgaccgaaggagagatgagatagtaatgtaaatacccgtaccaatgtccataatgtatttgataaactaatgcgaaacgataaaccaaaagctactaatgggcgctgtgaaatgaatcccagattaagctaaccagagtaattttggatatgtttcgtggccctgtgcgtatatcaatgggtagtccaatggccaagcactaaccaacttcaaataggcttatctctttaagatagactaaatgtcactttcgatccgatatattaataatgctatgccaggtccaatggtatctttctttaacttataaattcaacgaagcaggtaagtaaactaatgcatgaacacataaacacacataattttgggctcattcgtgtatgtcctggcatccaaaaccaaacataaccagcagagggagcggagagtacaactccaagcataccccccatcagcagaatcagacccaaaccgatcctcactagccttctcgtcctgtattgtagtcgcacccggcgagcactggttccagggcaagctggagttcatgctgagccagcgaggcaagccgctgctggtccacgacgggcacaccttcggcattcagtacgtgcgcaaggacaagaagtactggcagtgcaacctgtcgcgcaagttcaactgcaaggcgcgcgtgaccaccacggacaccggcgacataatcgtgaccaacaacgagcactgccacacagagatacgtcagcacctgcgcaaggattaccagcggaacaaagtgatgatgaatgcactgattaacctaagtacgagtcacatgcggcgaaacaatatgggtgggctgggtgccttgcccatggtgcccgaggtcctgacccagggtacacccattcacgagatggtcc

SEQ ID NO: 32837 - DNA, 1860 bp, DROSOPHILA
atgatggagctactggagtttatgtaccaaggagtggttaatgttaagcacacggagttgcagtcgttcatgaaaattggacagctgctgcagatcaagggcttggctaccaattcgaattcctcgccaggatcgagtgtctcggagaagtcctctagtcagccaccggcagaagaatcaagcaacaccaacagcaccaatcatcacaactctagcactaatagcaataacaatagcaaatcggaaacggatcacaatgagtccaaaggccagagcaattcaagaaccacttcgccaggtggtgccagcagagcctccaacgatgccagccacctgtacacatcgaacaaacgtccgatgccgtcggattttggcagcgattccctgtccatttactccggcaagcagttgagacgctccctcaaggatcacggttccggcggaagcgaaggcggcggaggcgatcacgcggataccgcagccggattggacaacagcatgaattcagaggagttcttcttgccacccattccacaaatcacgatgggagaacagcgctacgatctcggaggtctgaaacgggaatcggatggtcaccaccacggtcccttgtcggctggcggaggaaattcgggcagcgttggcagcctcacctcctcggcctcaccgtctgcacccatccgtaatccctttgccccgaacttcatggacagcttcaactactacaagggcggcaacagcagtggtcccagcggtagttccaataactcggttggcccaggtggcgtcaataacaatggctccgtgggccttggctccggcgccgagtaccccaacgaactgtatatgcccaacgattactccaagagctttgccaaccacatggacattccctcaaagtccagcgaagaacagaccactaatgatccaccattgtccggagcaggcggcagcaacatggtgatgctgtccaccacctctctgctccacggcaactgcgtgttcaaccggaacaacacggtggccacgcagcagggcatgaagacctactggctgtgcaagtcgtaccggatcagcatgtgccgggcgcggtgcatcacccacttgggcaggatcatatccgccacgggcgtccacaatcatacgccgcacatgcgcggtggtcagggatcttcggcgccctccacagcgtcagtttccggaaatccagccccgacgcccatttccagccaagcgggttactctctgacggatggaggtggccatttgggtccggatttgcagcatggcaatcgagtgaccaacatgtttgccaatcaaacgccgccaccgccgccgccaccaccgccactaccagtggcatcaacgccgcaccacccgcatcatcaccatcacttgggacaaccgttgcccaatcttttggtgcagcaccatccggcgccatcgcacatggagcagcatggcagctcggcgagcctcttgcataatccaaatctgatgcacctgcagaccccgacgcaccaccaccaacaacaacaccaccagcagcattcgccacacaatccaccgcctccgcagcagcacaatctggagctgggaggtggctcgggatcgggagcagtgcttctctcgccggcgcatcttcagcaaagtccgcaatcgaatcggagcagtcattccctccaggcgcagagtccacctccacagtcagtggaggaacagcagccacaccagcagcagcagcagcagcaagaaggagccaccactgaggttaccacggatcccagcacggctcacgtgatcaactccatcaccatatccccgaacaccaggcacaccttcaagatggagaacatgtaa

SEQ ID NO: 32838 - protein, 619 aa, DROSOPHILA
MMELLEFMYQGVVNVKHTELQSFMKIGQLLQIKGLATNSNSSPGSSVSEKSSSQPPAEESSNTNSTNHHNSSTNSNNNSKSETDHNESKGQSNSRTTSPGGASRASNDASHLYTSNKRPMPSDFGSDSLSIYSGKQLRRSLKDHGSGGSEGGGGDHADTAAGLDNSMNSEEFFLPPIPQITMGEQRYDLGGLKRESDGHHHGPLSAGGGNSGSVGSLTSSASPSAPIRNPFAPNFMDSFNYYKGGNSSGPSGSSNNSVGPGGVNNNGSVGLGSGAEYPNELYMPNDYSKSFANHMDIPSKSSEEQTTNDPPLSGAGGSNMVMLSTTSLLHGNCVFNRNNTVATQQGMKTYWLCKSYRISMCRARCITHLGRIISATGVHNHTPHMRGGQGSSAPSTASVSGNPAPTPISSQAGYSLTDGGGHLGPDLQHGNRVTNMFANQTPPPPPPPPPLPVASTPHHPHHHHHLGQPLPNLLVQHHPAPSHMEQHGSSASLLHNPNLMHLQTPTHHHQQQHHQQHSPHNPPPPQQHNLELGGGSGSGAVLLSPAHLQQSPQSNRSSHSLQAQSPPPQSVEEQQPHQQQQQQQEGATTEVTTDPSTAHVINSITISPNTRHTFKMENM

SEQ ID NO: 32839 - DNA, 8232 bp, DROSOPHILA
ccatcgaatattaatacaatccatcaagcgctataatatgagatgatttccgagatcatttggtttctttatttgcttactcccatcttgtttatgccttgagccaatcaaatttatacatttattcgatccactatatttttcaggccaaaagatacatttgatacgttttggctaacaaaatgccaggcaatatcaatcaattatgtcgcatccagccgcatctgcaactccagagcccaacccaaccgcgagttttatgtaacaaagtggcttagatttcgagacagctagtaagatcataaatcttgtgaatattttcgttcgtcgattgcgtcaactttgcgcactttgctttacatattagaaatccaaagaccaaaaattattcgtttccatcttcttttggctaagctctttgtggtgattaacattttgttgacccaacaaattgtaggtgggtctggggtcgcgaaagatgcatgcacaccttatggatgctgggtgggcatcggtggacgcccacttgtggtgcgtgtgaaaacggattggccaaattaacaaacgctaaagggttttgccatggtccaatactttgtctccggatttccatctcttttggcccaactgatcttttgttatgctgattgtccgtaatttgtcatacgctgcgggccgactaatgaaggctgagggtgcttttggatcagccggagacatgacagttcgttttcaacacatctttaagtgattcgctttcgagtgactcccacaaatattgatacagaatgagttacggcggtaatcagtcagtctggagctctaagaggaatactccatcattatatagtatttcactgaattattatttacacaggaaaaagtataagatttagatttgtcgtttcattgcatacaatttaatggttcgatgattttaagtgcctatacagttaacacaattttatagcttaacctaagcaaaaacaataaaaaatcgctactccgttggttccaccagcagcttggtttccccgtcactctccgatttatgcgcttgcgcccagtcaatgacatattcccgcagactggacaacgcgaggacggcaggagtctccagcttttgatccttggccagccagtcgcagtattcggaacgcgaacaggcgccagcgctgccaaagctccgtacataacgcacactcgccagctgatcgggccattggcgtgaaacgcactccagcagggtatccatttgggtggcggacacggcacgatgctggccacaggccgagccagttttccacagaacgttgaacaggcgacccaagccaggaactgatatccgtggagagagcagcggcagtagctgcaacaccagacggtaaactcgcaactggatgtggtcgtaatccgtcagttccgaacgggacgcggccaaggcataccacagattgttgaggatgctgatgacaccctcgatgatatcgaactgatggaactctgtgtcgcggattacgcccaccagccaggacaggatgcctacgtgctccagcatgattttcacagctccgggaattttgacgcatgtggagagcaccgaaagcagcagcagattcgtttccaaactggccaaactggagccgtagaatccaaggaggaccttgaacgtattggtggataccagcaggaaaaggtcggcgctgcacttaatgccgcatctaagcaactccacgataaactcgcggtactgctggtgctctggttcctgggagtagaagaaaacattgaagtcgggtatcgtttgaaagttgaagctctgtttcagccgcaaatacatcatcagtcgcttgtacagcaaatgcgttggctctgtgctcaaattaaagctgtgagcgataaacaggccaggaatcaaaggaactctaggcgttccgccatgcgttctcctctgtgccagccaggagtttctcagatcagccaatcctgcctgaatgttctcataggcctgcgtccacagcggacgctcgtagaaattggagagctcgaaatgagcacgatagcgttgctggcaactggcagccgccagtctcatgtccttgtccagagatgatagaccgcagaaggtgatcgccagtaatccattctggacaggccaacgggcccacactacggactcgggtgcaaagcagtgcatcatcaggggtaacaggaaggcgggatcgtagcaggtctcgtatatagtctcgcgcttcgggcaaattcgtcgtaaatcctgtgggaaatctagctgaccctgctccaccatttgctccaactgattgtcgccaaagctcatggatttcttagcaggattttgaaactccgtggagggtagttgttggctagcatggaggcttctccaaatcgggaaattttcaatggtgtactcgctagtctctcgaacaatcagggctagcacctgagccacattcgtctcctgctgttgcagcctggttcgcacatcctcgtccgcagccctcagggcataatgggccacagcactttcgccccaaatgaaaggtctaaacttatccaagcccacgtcaaagcgttcgtagtgctccagcagtgctaatccatatcgatccgcaggtgacagttttgcatgataggagccaaggattacgggtatgtgatcagattgcagggcactaggagcctttctggccaacacctccattaggtgtaaaatgtgcgttttggtttcacttggcttgcctaagagatggtcaaaacagcaggagtgcgtgcaaatcatttcgtatagaagtgttggtgttgcatcctcctcctgctgtgcatcctccttatattcatcatacattccatcacacaggaaggccatcagctttagaacaagcccatttgtttcatcctgaagtggcaatcgttcctcgccgaggtgaagggccaactttaagctactcttgcaaaagttaagccactgcgggttcttttgcaagcgactccagtccaagggtagatcgtcggtccgattcgtcttccaccactcgtaacagttccacgagatttgctctagcttaggcagatccaaagcctgtttcttcaaatccagtgctaacagttgaacattaaggtttatataattaacaaagacggtggccttttgcttttcatccttagcggcagcaaagccctgccagtaaatctcacgcaggactcgcacctggaaaagttccacggaatcgagcttcagttgtttctggcagtaatcgaagcactcagactttggcatgcaaagtgcaataagaagagcgctagcctccgaatgctcccggtaaattagggcagccttctgtggcttctcgatgctcttcatgaagccgttcttgtaggtctgatagcaacgttgaagcactggtagaggtatctgatagttcttcgtcagagcaatatccaggagggggtacaccaaatccttttgctccaaattgcttggcagtaactctgcgaatgtttcagctaatcggggctggcgctcgagcagcaagcaggccaaacgaatggcggatttgctgagttttcgagaggatgtaaagaaacaggcaaagaactcactgtcgcactcatccatgtgatgatggtaattgagcaaaaactccaagacggccaactcaaatggttccagttgctgttcattcagctcgccgaagtccttgtagaaggtcaggattaatttaaatgacttcccgcaatcaatgggctcctttaacgtgttcaatcgacccagcaaacgtagaagtagatcaaagtaatgatttggtttaccattcggaatgcagtcctttgcttgcactttggttgttagcaagtccagcatttgagagcattgatcagaattgaattcaaatgaatccaccaatttcacacactcgtcgagctgctgctgatttcccaactggtccaccggtgtatccaaagcaatatccagggtcttaatcaagtgcaagcgatagttggcagtataggtctcgaatcgaggcaagctgcggcaatgctccattaatctcctgaggaagataacatagttcaagcgagattcgctcgtctcactaagcaattcagtggggtgcaattgccacagacgatggttaaatatatagtgcagcatactttgagtaaaattttcgtcctgctgctcatcatccgactcctgaacttcttctggcccatctacctgactggcaatttgaaggaatttaataagaaaatctgctgtcagctctgcttgaggtttgcttaatttctggctggtgaagaaatggctaaaaacgaaaagcaaatcctggacgtagatcatattgcgacgtggatttccgagggaggaatgcaacaacattgtctggccctcttctagttgtagctcgaagttgttttccgtatcatccattttaaatacctgctcgaatgacatgttttcactttcggtgctaacctttcgcatttgcttaagcaagggccatttatcaaatataaggtggggaagtttctttggtttaccatttccttcaccaggcagccaactcttcatatagttagtgtgcttgcttaagttatcctcgtacatttgcagcactatttccggcttgctgtgatagtggaaaagcagaacaaatactagctccacatattcgtcgtatggttcctccaattctacaccctttagcaacagcggcatcatcttgctaagggtaagagtttccacataagcttgcactgtttgaccttgctcaatttgagcaaacaatttgctcaggttcttggtgattatggcagtatccgtaacgctttgttcaggaagctcaatctgtctccaatccaaacagagtatggtcagcagaatctctactacgttggtcaccgtagcgggaccgaatccaataagggcctctatccagatattgatctcatgcctgcaggagtcaaacatccctgtgttttggaacagccgactcaatatgtttccagactccgatttgattgatttttcctccaacatgtaggcttttatgaatgatttgaatacgttcccgaaaagcggttgggttgggttcaaggagtgcggaaagagcagcaggatggttttaatcgacttcagttctaattgaatcttcaagagctcttccggttgattcagtttgtcaaaatcagtttcgtataggggtcgcaacacatccaaataatccagaatctgacttgtcttattcacaaacgctcgattctccttgcagagtagcatcaccagatctaaagtgattgataaactctcaagtacattcactccttccacgtttttctgtttgatgaacatgtaaagcgaatataggatggactcgatagtgggaaaatgcaccagcagatggttaagtaaatcgaacttaaatttacgcagcgagttgccggctttttttgattgctctcggacagcaatggcattcatatagttgctgtactgtttcatcatggaaagcagcagacgcagtacagccaatctcaaattgaagtctggatcgctcaggtacttcttacccgtaatgtgaagcaaagcttcgatgggcaaacacagctccttgatccaaaatgagaaatccgttagggtcatcttatcgaatgctgctgatagagcactgggcgggactgcattaatgatttgggcgagaaacgccacagctatgggcaaatctttcggcttggttttgaccggactgagcagagaggaacaattcctcactgtattgcgtcccaagtctggacaagcagttagtgtttgaataaccaaatccactttgcgcggattatcgtagggcttgaatagagagccaagtaatctgccctgcagtttgttttgcttttggcggtagtgcgtcatcgcatcaaagcagatgccgtgcttgcgggaagtcaaaaggactagcaggagttcgtgaacggcagccgataccgcttccgcctcctgtgggtttggaggtatcttagaaacatgtttcgatttagcaaacatcaccttgagtcccatgggtccctcccaatcgtagaggcgacgcagatttttgcagcactctaaatcgaaaaccagaacctttttggtcttctgtatttcggggttctccagcacatattgccgtagtgcgttaagcaccacgcagacggttacgtggtcatcgtaaaccaatcccttggccagcacaccaattagttgccctcgatccaggatgttccggataagtagagtattgccctcgaccaggaaggccaaaataaagagaataaacgctttgcgcactgtatcctcgcattggtattcacttttttcatgggacagcaatttctgcgtcacagtcacgttggaaagcacatcatacgaattcagaacttggcgggccaattgaggctccacgcacacaatagcggtgagcagttttagggcattacgccgatggcctagctgcattgatttcatttgattttcgagcactcctccgtgaaccttgagaaaatatctacacccgtggacagccgactccatgtggctcttctggttggtaagtatttccatcaaaactcggtgcaaagcctctgtgaggtagtccacgtgaaataaattagtcttatcgatcctttcgaatgcttctgctaactccaagggctttccacgcttttctatgtacttagccgcaagcttaggacgcgtggttgagcacatgtgcaggaagtgtcgcagttctggaattgggattcgtgagttagcgatcttttattgaacgtattaacccacctgttatgaagttattgccgcgaagcttggttcgaaagtgcatcatcttaaagtcgttgggaaagtgtatgcgggattcttcgggatcaatcccggaatcgcgacttatttcatcctcagccatctccacttccacctgttgttctacacttgtgtcggatgtctttgtctttttagacttcttctttgatggagtggagtcagcaggatcggtttcagtgctttccagcgtggattcatcgaatgattccttagttttatccttctttttctttttcttcggtgtgtcggactccttggccagttttttgggcacctccacttcaccttcatcctcttgctcagcagttgtctcctcgtgccttctctttcttcgattgggttgaatggccattttgctttaataataatattataaattatatttgcctatttacagcataaatcgtttaaaatttaagttaaacacaaaaacagccgcacacacgtgctggcagagaatggtatgaccctttttaaaataccgaaaaataccgcccttgtttcagtgttgtatagggcgacacttggcgcgctaaaatataaactggcgaaacaggaaaaaaaacagaacagcaacttattcaaagagattaaagttatgatttaatttaccaacaattttatactctccaacaataaacaacgtattttactacaatactaactacaaagggtgcacaactttgaaaaaaccacatctcggcacggaatgactcataatccaatctgccatttggcaaatttacagttttccctggacgtgaacgttttttctgttcctttaaccacgtctagtcatcctcgagggccgcattggtggctcctccagatccatatccagatcctgcaggagccgtgctagtcaccgatccagaaatcgggaattctggcagagtggagcgttgtttggctggagccggcggaaccgcgggcaaatcgactgatttacttttgcctgcaagtacacaactattattagtcgctgttattgccttctgaagatagctgcaaatcacttaccaaaacaacaacccattatggtatactctttactgattctcgggacgagtgggctaatttgctgaaagttctttgagcactaaatcgggcaaatcaaatcggtggccaattgactgggtgcgtatgtgtgcacctgaggcgtacaaacgactcatggctaattgataagccctgctgttacttttattctctttttgtttaaaatgtaaagtgggttatttatgacaccatgggtaggtctgctatcaacagtgtagttccccatcggccgtattagcatcgtgcaaagaaccgtagaactgtgataaaagcggacaatgccggtcggatat

SEQ ID NO: 32840 - DNA, 6090 bp, DROSOPHILA
atggccattcaacccaatcgaagaaagagaaggcacgaggagacaactgctgagcaagaggatgaaggtgaagtggaggtgcccaaaaaactggccaaggagtccgacacaccgaagaaaaagaaaaagaaggataaaactaaggaatcattcgatgaatccacgctggaaagcactgaaaccgatcctgctgactccactccatcaaagaagaagtctaaaaagacaaagacatccgacacaagtgtagaacaacaggtggaagtggagatggctgaggatgaaataagtcgcgattccgggattgatcccgaagaatcccgcatacactttcccaacgactttaagatgatgcactttcgaaccaagcttcgcggcaataacttcataacagaactgcgacacttcctgcacatgtgctcaaccacgcgtcctaagcttgcggctaagtacatagaaaagcgtggaaagcccttggagttagcagaagcattcgaaaggatcgataagactaatttatttcacgtggactacctcacagaggctttgcaccgagttttgatggaaatacttaccaaccagaagagccacatggagtcggctgtccacgggtgtagatattttctcaaggttcacggaggagtgctcgaaaatcaaatgaaatcaatgcagctaggccatcggcgtaatgccctaaaactgctcaccgctattgtgtgcgtggagcctcaattggcccgccaagttctgaattcgtatgatgtgctttccaacgtgactgtgacgcagaaattgctgtcccatgaaaaaagtgaataccaatgcgaggatacagtgcgcaaagcgtttattctctttattttggccttcctggtcgagggcaatactctacttatccggaacatcctggatcgagggcaactaattggtgtgctggccaagggattggtttacgatgaccacgtaaccgtctgcgtggtgcttaacgcactacggcaatatgtgctggagaaccccgaaatacagaagaccaaaaaggttctggttttcgatttagagtgctgcaaaaatctgcgtcgcctctacgattgggagggacccatgggactcaaggtgatgtttgctaaatcgaaacatgtttctaagatacctccaaacccacaggaggcggaagcggtatcggctgccgttcacgaactcctgctagtccttttgacttcccgcaagcacggcatctgctttgatgcgatgacgcactaccgccaaaagcaaaacaaactgcagggcagattacttggctctctattcaagccctacgataatccgcgcaaagtggatttggttattcaaacactaactgcttgtccagacttgggacgcaatacagtgaggaattgttcctctctgctcagtccggtcaaaaccaagccgaaagatttgcccatagctgtggcgtttctcgcccaaatcattaatgcagtcccgcccagtgctctatcagcagcattcgataagatgaccctaacggatttctcattttggatcaaggagctgtgtttgcccatcgaagctttgcttcacattacgggtaagaagtacctgagcgatccagacttcaatttgagattggctgtactgcgtctgctgctttccatgatgaaacagtacagcaactatatgaatgccattgctgtccgagagcaatcaaaaaaagccggcaactcgctgcgtaaatttaagttcgatttacttaaccatctgctggtgcattttcccactatcgagtccatcctatattcgctttacatgttcatcaaacagaaaaacgtggaaggagtgaatgtacttgagagtttatcaatcactttagatctggtgatgctactctgcaaggagaatcgagcgtttgtgaataagacaagtcagattctggattatttggatgtgttgcgacccctatacgaaactgattttgacaaactgaatcaaccggaagagctcttgaagattcaattagaactgaagtcgattaaaaccatcctgctgctctttccgcactccttgaacccaacccaaccgcttttcgggaacgtattcaaatcattcataaaagcctacatgttggaggaaaaatcaatcaaatcggagtctggaaacatattgagtcggctgttccaaaacacagggatgtttgactcctgcaggcatgagatcaatatctggatagaggcccttattggattcggtcccgctacggtgaccaacgtaaacctgagcaaattgtttgctcaaattgagcaaggtcaaacagtgcaagcttatgtggaaactcttacccttagcaagatgatgccgctgttgctaaagggtgtagaattggaggaaccatacgacgaatatgtggagctagtatttgttctgcttttccactatcacagcaagccggaaatagtgctgcaaatgtacgaggataacttaagcaagcacactaactatatgaagagttggctgcctggtgaaggaaatggtaaaccaaagaaacttccccaccttatatttgataaatggcccttgcttaagcaaatgcgaaaggttagcaccgaaagtgaaaacatgtcattcgagcaggtatttaaaatggatgatacggaaaacaacttcgagctacaactagaagagggccagacaatgttgttgcattcctccctcggaaatccacgtcgcaatatgatctacgtccaggatttgcttttcgtttttagccatttcttcaccagccagaaattaagcaaacctcaagcagagctgacagcagattttcttattaaattccttcaaattgccagtcaggtagatgggccagaagaagttcaggagtcggatgatgagcagcaggacgaaaattttactcaaagtatgctgcactatatatttaaccatcgtctgtggcaattgcaccccactgaattgcttagtgagacgagcgaatctcgcttgaactatgttatcttcctcaggagattaatggagcattgccgcagcttgcctcgattcgagacctatactgccaactatcgcttgcacttgattaagaccctggatattgctttggatacaccggtggaccagttgggaaatcagcagcagctcgacgagtgtgtgaaattggtggattcatttgaattcaattctgatcaatgctctcaaatgctggacttgctaacaaccaaagtgcaagcaaaggactgcattccgaatggtaaaccaaatcattactttgatctacttctacgtttgctgggtcgattgaacacgttaaaggagcccattgattgcgggaagtcatttaaattaatcctgaccttctacaaggacttcggcgagctgaatgaacagcaactggaaccatttgagttggccgtcttggagtttttgctcaattaccatcatcacatggatgagtgcgacagtgagttctttgcctgtttctttacatcctctcgaaaactcagcaaatccgccattcgtttggcctgcttgctgctcgagcgccagccccgattagctgaaacattcgcagagttactgccaagcaatttggagcaaaaggatttggtgtaccccctcctggatattgctctgacgaagaactatcagatacctctaccagtgcttcaacgttgctatcagacctacaagaacggcttcatgaagagcatcgagaagccacagaaggctgccctaatttaccgggagcattcggaggctagcgctcttcttattgcactttgcatgccaaagtctgagtgcttcgattactgccagaaacaactgaagctcgattccgtggaacttttccaggtgcgagtcctgcgtgagatttactggcagggctttgctgccgctaaggatgaaaagcaaaaggccaccgtctttgttaattatataaaccttaatgttcaactgttagcactggatttgaagaaacaggctttggatctgcctaagctagagcaaatctcgtggaactgttacgagtggtggaagacgaatcggaccgacgatctacccttggactggagtcgcttgcaaaagaacccgcagtggcttaacttttgcaagagtagcttaaagttggcccttcacctcggcgaggaacgattgccacttcaggatgaaacaaatgggcttgttctaaagctgatggccttcctgtgtgatggaatgtatgatgaatataaggaggatgcacagcaggaggaggatgcaacaccaacacttctatacgaaatgatttgcacgcactcctgctgttttgaccatctcttaggcaagccaagtgaaaccaaaacgcacattttacacctaatggaggtgttggccagaaaggctcctagtgccctgcaatctgatcacatacccgtaatccttggctcctatcatgcaaaactgtcacctgcggatcgatatggattagcactgctggagcactacgaacgctttgacgtgggcttggataagtttagacctttcatttggggcgaaagtgctgtggcccattatgccctgagggctgcggacgaggatgtgcgaaccaggctgcaacagcaggagacgaatgtggctcaggtgctagccctgattgttcgagagactagcgagtacaccattgaaaatttcccgatttggagaagcctccatgctagccaacaactaccctccacggagtttcaaaatcctgctaagaaatccatgagctttggcgacaatcagttggagcaaatggtggagcagggtcagctagatttcccacaggatttacgacgaatttgcccgaagcgcgagactatatacgagacctgctacgatcccgccttcctgttacccctgatgatgcactgctttgcacccgagtccgtagtgtgggcccgttggcctgtccagaatggattactggcgatcaccttctgcggtctatcatctctggacaaggacatgagactggcggctgccagttgccagcaacgctatcgtgctcatttcgagctctccaatttctacgagcgtccgctgtggacgcaggcctatgagaacattcaggcaggattggctgatctgagaaactcctggctggcacagaggagaacgcatggcggaacgcctagagttcctttgattcctggcctgtttatcgctcacagctttaatttgagcacagagccaacgcatttgctgtacaagcgactgatgatgtatttgcggctgaaacagagcttcaactttcaaacgatacccgacttcaatgttttcttctactcccaggaaccagagcaccagcagtaccgcgagtttatcgtggagttgcttagatgcggcattaagtgcagcgccgaccttttcctgctggtatccaccaatacgttcaaggtcctccttggattctacggctccagtttggccagtttggaaacgaatctgctgctgctttcggtgctctccacatgcgtcaaaattcccggagctgtgaaaatcatgctggagcacgtaggcatcctgtcctggctggtgggcgtaatccgcgacacagagttccatcagttcgatatcatcgagggtgtcatcagcatcctcaacaatctgtggtatgccttggccgcgtcccgttcggaactgacggattacgaccacatccagttgcgagtttaccgtctggtgttgcagctactgccgctgctctctccacggatatcagttcctggcttgggtcgcctgttcaacgttctgtggaaaactggctcggcctgtggccagcatcgtgccgtgtccgccacccaaatggataccctgctggagtgcgtttcacgccaatggcccgatcagctggcgagtgtgcgttatgtacggagctttggcagcgctggcgcctgttcgcgttccgaatactgcgactggctggccaaggatcaaaagctggagactcctgccgtcctcgcgttgtccagtctgcgggaatatgtcattgactgggcgcaagcgcataaatcggagagtgacggggaaaccaagctgctggtggaaccaacggagtag

SEQ ID NO: 32841 - protein, 2029 aa, DROSOPHILA
MAIQPNRRKRRHEETTAEQEDEGEVEVPKKLAKESDTPKKKKKKDKTKESFDESTLESTETDPADSTPSKKKSKKTKTSDTSVEQQVEVEMAEDEISRDSGIDPEESRIHFPNDFKMMHFRTKLRGNNFITELRHFLHMCSTTRPKLAAKYIEKRGKPLELAEAFERIDKTNLFHVDYLTEALHRVLMEILTNQKSHMESAVHGCRYFLKVHGGVLENQMKSMQLGHRRNALKLLTAIVCVEPQLARQVLNSYDVLSNVTVTQKLLSHEKSEYQCEDTVRKAFILFILAFLVEGNTLLIRNILDRGQLIGVLAKGLVYDDHVTVCVVLNALRQYVLENPEIQKTKKVLVFDLECCKNLRRLYDWEGPMGLKVMFAKSKHVSKIPPNPQEAEAVSAAVHELLLVLLTSRKHGICFDAMTHYRQKQNKLQGRLLGSLFKPYDNPRKVDLVIQTLTACPDLGRNTVRNCSSLLSPVKTKPKDLPIAVAFLAQIINAVPPSALSAAFDKMTLTDFSFWIKELCLPIEALLHITGKKYLSDPDFNLRLAVLRLLLSMMKQYSNYMNAIAVREQSKKAGNSLRKFKFDLLNHLLVHFPTIESILYSLYMFIKQKNVEGVNVLESLSITLDLVMLLCKENRAFVNKTSQILDYLDVLRPLYETDFDKLNQPEELLKIQLELKSIKTILLLFPHSLNPTQPLFGNVFKSFIKAYMLEEKSIKSESGNILSRLFQNTGMFDSCRHEINIWIEALIGFGPATVTNVNLSKLFAQIEQGQTVQAYVETLTLSKMMPLLLKGVELEEPYDEYVELVFVLLFHYHSKPEIVLQMYEDNLSKHTNYMKSWLPGEGNGKPKKLPHLIFDKWPLLKQMRKVSTESENMSFEQVFKMDDTENNFELQLEEGQTMLLHSSLGNPRRNMIYVQDLLFVFSHFFTSQKLSKPQAELTADFLIKFLQIASQVDGPEEVQESDDEQQDENFTQSMLHYIFNHRLWQLHPTELLSETSESRLNYVIFLRRLMEHCRSLPRFETYTANYRLHLIKTLDIALDTPVDQLGNQQQLDECVKLVDSFEFNSDQCSQMLDLLTTKVQAKDCIPNGKPNHYFDLLLRLLGRLNTLKEPIDCGKSFKLILTFYKDFGELNEQQLEPFELAVLEFLLNYHHHMDECDSEFFACFFTSSRKLSKSAIRLACLLLERQPRLAETFAELLPSNLEQKDLVYPLLDIALTKNYQIPLPVLQRCYQTYKNGFMKSIEKPQKAALIYREHSEASALLIALCMPKSECFDYCQKQLKLDSVELFQVRVLREIYWQGFAAAKDEKQKATVFVNYINLNVQLLALDLKKQALDLPKLEQISWNCYEWWKTNRTDDLPLDWSRLQKNPQWLNFCKSSLKLALHLGEERLPLQDETNGLVLKLMAFLCDGMYDEYKEDAQQEEDATPTLLYEMICTHSCCFDHLLGKPSETKTHILHLMEVLARKAPSALQSDHIPVILGSYHAKLSPADRYGLALLEHYERFDVGLDKFRPFIWGESAVAHYALRAADEDVRTRLQQQETNVAQVLALIVRETSEYTIENFPIWRSLHASQQLPSTEFQNPAKKSMSFGDNQLEQMVEQGQLDFPQDLRRICPKRETIYETCYDPAFLLPLMMHCFAPESVVWARWPVQNGLLAITFCGLSSLDKDMRLAAASCQQRYRAHFELSNFYERPLWTQAYENIQAGLADLRNSWLAQRRTHGGTPRVPLIPGLFIAHSFNLSTEPTHLLYKRLMMYLRLKQSFNFQTIPDFNVFFYSQEPEHQQYREFIVELLRCGIKCSADLFLLVSTNTFKVLLGFYGSSLASLETNLLLLSVLSTCVKIPGAVKIMLEHVGILSWLVGVIRDTEFHQFDIIEGVISILNNLWYALAASRSELTDYDHIQLRVYRLVLQLLPLLSPRISVPGLGRLFNVLWKTGSACGQHRAVSATQMDTLLECVSRQWPDQLASVRYVRSFGSAGACSRSEYCDWLAKDQKLETPAVLALSSLREYVIDWAQAHKSESDGETKLLVEPTE

SEQ ID NO: 32842 - DNA, 4708 bp, DROSOPHILA
ggaggaagaagtgcaggttctcgaaggtgttgcatccgttgatctgcggattggcgacgagccagtcgctgagatcctggacctgcgccaaaaccctttcggggtcaccatcggtggtggccacttgtcttttggaactgctgctgcgcgaccacatggcgctcctttggcggtaacgactgtcggcgaactaaagcaattgtttataaacaaattgcgacattcactcgccaaatgaaataagcttttcaagcttttacgcgtactcagcgttttttttaatcgctcgtctcgtcggcatttcgcataggcaaatcgcattctaaaattacataagtgctgatccgttgcaagcttaattgttgcgttttggctcaattggattaatttaattcgaattgattggtgagaaaagctgactttgtcacattgtattttaaatttgccgatttcgattgacgccgatgcacgcatgttagggatgggagaattcgaatacgtttacagactctgttaatgcgctgttaacataaacactgtaccggttttctggtcgtaatacttcgtagttttcaaaaattataacccaaaagataagtaccatgatggtaagtggttcatcagaaatctttatttttatgttatcattatgaaaatatatctaaaaacaagctgctgttgtactttaagataaactttattcacatagaaaataaataattgttacatttcaacacattgctttaccataattctcatatcctccgcattactcatcctgctcatttttatatgtttttcttaggtcgatgcttacgctttaaaatagattgtatatttacaaagatgttgtacgcaaaacttaagtcaacgtgtagggcggtagatacttgtttctgggtaaaaaggactcagaggagcaggaggtgtttggagttcgtgctggttgtggagcgggatggtggtgctggttggtggtgctttttggtggtgcaagtgctcaaaaggccccgttgaagtgcaggttttgtgaggcgaactgcggtatcccatggttgagagctaaaactttactgattactttcaattcgtcaagatttcttaagctgctaaattgactaagatgattgccactggggccactcggtctgctcttatagtgtgcattacctggactaatgtcgccgctggcttttggctgctgcaactgttgctgctgctgctgctgctgctgcagatattgctgcgcgttttgctgcaactggttgctcaactgtggcgtcaagtgctgcctgtagaagttctggttctccagactgggattggaattgaggccaggctgctggctaacaatcgtggtggcgaaggagttgctcggctgaatctccacattggaattcaaaccgaagttacctactcccgtctcctggcggaattgccgcgccctttgctgctgctgttgctgatgttgttgctgctgctgctggaacaccgcattgctgacgtagttgggcagcagcaactgttgctgctgctgctgttgaaatggcttgtaattgttatggggcaaggcctgtagttgcgacgcctcggccggtgcaaagttgaactgattggagggctgaacctgggggctttcgttcgatttctgtagagattgctgcaaattttggaaaatctgctgcactgcattcgctggcggcttctgatagttattcgcgtttatgttgccattgtgcagggcgaatttatgacccgaaacggcatcgcgcagcggcaattgctgctcaattggatatgtgggataaataacagtcttggtatgtgtgctgggtataaattcgaccgaaggtcttatggagtaacccgcgcccaaagtgggcggttgcagacccgtctgaatggcctccagcggaccatgttgctgctgtacttgcggcagttgctgctgtacttgcggcagttgctgctgctgttgttgctgctgtggctgcaatgtgctgggttgggcaatcggtgagccctggaaacggctttgggtctgctcctctaacagcttcagttgacgcaggatcagagcctgctgctgttgtgcctgcactttcaactggtagatctgctgctccagagctcgctgtcgctcgatcagatagttattcacactgggcggctcaggcagattgttcaggggctcctgctaaaataattatcatttgacattaatgaagaattattattattaaatatcaatcgaaaggtatttgctagtcaataaaaaatagcgatttagttttgagcagcataccttcacataattgctcgtagagctggccaggaaggcgggagtggtggagaaaccaccgccggcactggtgctcgtactgatctgtgtggtggaggtgctgccgcctgtgggcgggaactgggtgggcagctgagtagccggcggctctgtttccaaaacattcagcttagtgatggtgggtccgatgtggggcagctgttgctgctgctgtggcgctgcaaagttggcggtgcgctgatggagctggttgcccgccagcaatgggcggaacctttgagccgtaccacgctcgtccagatccaccgtgaaagcggtcacgagtggcgcttcctggatgcgaatgtcctgcttgtcgaccagctctatgttctccccatcctcattgtgggtgggccttggcgtggttgtggtcgtggttgtcgtcgttgtcgtggtgcgacgtctagtggtgcggggtctgggcgtagtggttgtggatgtagtcgtagacgtagtggtcgtgggcgtggtggtcttcctcacattgctgatctcgaatttgatctcgtgactgccgctgtcgtgggagatctcattgctgctcacggatccggaactggagctatccacgctccgggtaagctgacgattctctggaccttccgcctccgtggatttcggttcgagggacaaggtagcggcaggttgattcagtttccggatggtggtcttcttccacagcttggagcgatcgatgaaggaggaaagcagctgctcctgggcattcttctcgtcaaaggtggccgtgtagaattggacagttggcaccactggctccggatcgttgcccctggtgctctcctccagaatctcatccttttcgcggtgcgatggcagagtggagctctctgctcgcagaagcagggaatgggaaccactgctgctgggactttcctcaccactctccgtggcagccgcctcttcctgttccagcttatcgatggcccgaagtaaagcctgccttacggagtagtccagcttttgaatggcctccctgggaatgatctcgttgctctccgtgctggcgctctccacctccccctccttgtgatcgccactggattccgcattggtcacatgtaacttcagagcagccagcagaagaaccgccagcaaagcccaaggcaggctgttcaaatgtctctgtttgcgagataaaaaagaaatagatatgaagatgcagccaacaaagaggaaacattaatgggtacgcttaaattttaataacttaataagttcgacagccttctcctaatgggcgtcttagtttcgggcctcatttgctctaatggcaattggtgcacggctagttggagacaccttgggcaaattgcctgtgacaccttaaccatttccaattgcatggcattagtcgcaatggcttttgccggaaattttgtaacttgttgggaaattataaattatgatatgttcatttatcttaagctaatggcttgtttttgttaaggccaattccaaattttccacctgatctacactagtaaacctactataaacgcatcttaaaaaaattataagtgcatcaaattgcagactagcaaatcaaaaacttgaagtgaagtgtgtcaaatgtctatacaattatttaacattttagccgtgactgaatgtttatataactctgttgcattcgaaatttcctgattttcctgaactaatacaatactttattaattgagctcctcgtaatttcgagtgcattttattcgccacattagaagccaagcccaatggcgggaaacttttgcaagctggtggaaaatggaaaatccatgcttcgtctgcagcctgtgaccccttcatttttgtaagccaaagtccgctaatctcggcgtggtaatctttccgccatttgcgccgatggaaaatcataacgcattacacttcgtttttgctgcccactattgctatgcggatttcttgattttttttgggggaatctaaagctgcgtttgggcctttgccttttcgttttcctttgaattttccttagccattgccttgcacaatttcccattttcaacagcttgacgattgattcctgctggtttttcatgcgattggagtccgcagaccgtttgcaaattggccagcaagttgcaactcttgtttggctgtggccaagtgcttaggctaattgttgcatcaacgagcggaggaaaagcaaaccatctgaccacctgtcgccggagctacgtgagtttcccgctttgattttgttttgttttttttcggattacggttttgttttcggttttggatttggaatttttggtctgcgtttttggggctcactttgggtgcccaggatttttgtgtggcagtcacgttgttgccacttgg

SEQ ID NO: 32843 - DNA, 2178 bp, DROSOPHILA
atgcaattggaaatgagacatttgaacagcctgccttgggctttgctggcggttcttctgctggctgctctgaagttacatgtgaccaatgcggaatccagtggcgatcacaaggagggggaggtggagagcgccagcacggagagcaacgagatcattcccagggaggccattcaaaagctggactactccgtaaggcaggctttacttcgggccatcgataagctggaacaggaagaggcggctgccacggagagtggtgaggaaagtcccagcagcagtggttcccattccctgcttctgcgagcagagagctccactctgccatcgcaccgcgaaaaggatgagattctggaggagagcaccaggggcaacgatccggagccagtggtgccaactgtccaattctacacggccacctttgacgagaagaatgcccaggagcagctgctttcctccttcatcgatcgctccaagctcgtggatagctccagttccggatccgtgagcagcaatgagatctcccacgacagcggcagtcacgagatcaaattcgagatcagcaatgtgaggaagaccaccacgcccacgaccactacgtctacgactacatccacaaccactacgcccagaccccgcaccactagacgtcgcaccacgacaacgacgacaaccacgaccacaaccacgccaaggcccacccacaatgaggatggggagaacatagagctggtcgacaagcaggacattcgcatccaggaagcgccactcgtgaccgctttcacggtggatctggacgagcgtggtacggctcaaaggttccgcccattgctggcgggcaaccagctccatcagcgcaccgccaactttgcagcgccacagcagcagcaacagctgccccacatcggacccaccatcactaagctgaatgttttggaaacagagccgccggctactcagctgcccacccagttcccgcccacaggcggcagcacctccaccacacagatcagtacgagcaccagtgccggcggtggtttctccaccactcccgccttcctggccagctctacgagcaattatgtgaagcaggagcccctgaacaatctgcctgagccgcccagtgtgaataactatctgatcgagcgacagcgagctctggagcagcagatctaccagttgaaagtgcaggcacaacagcagcaggctctgatcctgcgtcaactgaagctgttagaggagcagacccaaagccgtttccagggctcaccgattgcccaacccagcacattgcagccacagcagcaacaacagcagcagcaactgccgcaagtacagcagcaactgccgcaagtacagcagcaacatggtccgctggaggccattcagacgggtctgcaaccgcccactttgggcgcgggttactccataagaccttcggtcgaatttatacccagcacacataccaagactgttatttatcccacatatccaattgagcagcaattgccgctgcgcgatgccgtttcgggtcataaattcgccctgcacaatggcaacataaacgcgaataactatcagaagccgccagcgaatgcagtgcagcagattttccaaaatttgcagcaatctctacagaaatcgaacgaaagcccccaggttcagccctccaatcagttcaactttgcaccggccgaggcgtcgcaactacaggccttgccccataacaattacaagccatttcaacagcagcagcagcaacagttgctgctgcccaactacgtcagcaatgcggtgttccagcagcagcagcaacaacatcagcaacagcagcagcaaagggcgcggcaattccgccaggagacgggagtaggtaacttcggtttgaattccaatgtggagattcagccgagcaactccttcgccaccacgattgttagccagcagcctggcctcaattccaatcccagtctggagaaccagaacttctacaggcagcacttgacgccacagttgagcaaccagttgcagcaaaacgcgcagcaatatctgcagcagcagcagcagcagcagcaacagttgcagcagccaaaagccagcggcgacattagtccagctctcaaccatgggataccgcagttcgcctcacaaaacctgcacttcaacggggccttttga

SEQ ID NO: 32844 - protein, 725 aa, DROSOPHILA
MQLEMRHLNSLPWALLAVLLLAALKLHVTNAESSGDHKEGEVESASTESNEIIPREAIQKLDYSVRQALLRAIDKLEQEEAAATESGEESPSSSGSHSLLLRAESSTLPSHREKDEILEESTRGNDPEPVVPTVQFYTATFDEKNAQEQLLSSFIDRSKLVDSSSSGSVSSNEISHDSGSHEIKFEISNVRKTTTPTTTTSTTTSTTTTPRPRTTRRRTTTTTTTTTTTTPRPTHNEDGENIELVDKQDIRIQEAPLVTAFTVDLDERGTAQRFRPLLAGNQLHQRTANFAAPQQQQQLPHIGPTITKLNVLETEPPATQLPTQFPPTGGSTSTTQISTSTSAGGGFSTTPAFLASSTSNYVKQEPLNNLPEPPSVNNYLIERQRALEQQIYQLKVQAQQQQALILRQLKLLEEQTQSRFQGSPIAQPSTLQPQQQQQQQQLPQVQQQLPQVQQQHGPLEAIQTGLQPPTLGAGYSIRPSVEFIPSTHTKTVIYPTYPIEQQLPLRDAVSGHKFALHNGNINANNYQKPPANAVQQIFQNLQQSLQKSNESPQVQPSNQFNFAPAEASQLQALPHNNYKPFQQQQQQQLLLPNYVSNAVFQQQQQQHQQQQQQRARQFRQETGVGNFGLNSNVEIQPSNSFATTIVSQQPGLNSNPSLENQNFYRQHLTPQLSNQLQQNAQQYLQQQQQQQQQLQQPKASGDISPALNHGIPQFASQNLHFNGAF

SEQ ID NO: 32845 - DNA, 3097 bp, DROSOPHILA
tctgattgagcggcgcgaactggccccgctgcaggagctcatcgacaagctgacggctaaggatgagcggcagatataggaatcactgcatggagccgcgaattttcgcgattccggcggcggtggtggtggtctgcgcttgcagttggacttgtgatgaaagcgctctggcagactcgtgtattacgctttagttagttaccgccaatacttttatgtttcgttcattgcttcatggggtgcctcccactaaacaaaagaaaacaaaaaaccgccaattggcaatgtgaaccgaactatagcgggctaattgctgatccagagcaactactatatttttatatgtgaaacgtaaaaacgtataaatcatatttatatgtatatgtaaaggagaaaacaaaagcagcaaaagcaacagcacgccttttataactaacacctcccgctttcgagaaacaacaaatattacgttcacaaactatgcgtgtttccttgtttatcgtttttctttctgtatgtattctatgtatttattactattaaactatcgctaattgctcgcggttcagcggatcaagcgattttgtaatgcaaaccccagcaatttgaggcgacggtcggcagcacccaataactgataataattgtagacttgataaacatttttgatacgttttatactaataaagagaatattatgaataaactcgtctcttttttgtttggtttatcgtgtattgacactttattaagcaaaaaaaaaaagataacattgatgattaacacaacgaaaataaccttttttaaaaaggtttaacgtaatgacttataatatatacaaatatggttaagtggggaattagggagtatttgtagtacccttccataaaatatgacaactgatatgcgcctttgtgcatttgcgcattgtaaatgttttcgactaatctataacattcggctaatcgccttgttatcactgccgccacactaaccccaatcacttgagcttgcttttgtatttgtcttgttccacatagaaatcggcgttctcctcgaccaactgcttccacttcacagacagctccatatagcttaatccctgaccaccgagttcctttggcaactgatcgcagctcacggatgttccttcacgacgcacgaaaagtcgcgatcttatcttgggcgtcatgaatattctaaaaaaaatgataatatatagtaaattctaatttgacttagaacatacaacccacctaaaggtgttcaaaaagaagttcacatggcgcggggcgttggtgaattccaatagcttgggctgacatggatatgcggtccagctttccacggatctcttgatgagcttcggattcatttgaagagcgtgccccagttgaacgccctgcatatccagaatagccaccattccgcgggcacaggtctccggatcgagctttagcagcaggtccaatatcattttgctggtctgggaaacaaaggttggagatataagtatatggaggaaaaaatgtggacgaaacttatcgtatttcatattattaaaatgttaagttattttttattaaagcacgaaaagttcgccttcatgactatgtttaatttgttagctacatatagtttaagacatttcataaaatcgttgtattttattttttcctgtgtacatatttccatgactcactttaaaaacattgttctggctgtggagcttgggatcgtgtgctgctgtgcgtatgaccaccaccatcctttgttcggcatccggaccgatgggtaggaagacgcccagcttgagtaggtcctggatctcgggcaattggggatcgcgattatcgaaccattcggtgcgctccgcccgcatttggtagaacgttttcagtttctttttggcccgttccacatcgaacttggaggtgcggaggaagaagtgcaggttctcgaaggtgttgcatccgttgatctgcggattggcgacgagccagtcgctgagatcctggacctgcgccaaaaccctttcggggtcaccatcggtggtggccacttgtcttttggaactgctgctgcgcgaccacatggcgctcctttggcggtaacgactgtcggcgaactaaagcaattgtttataaacaaattgcgacattcactcgccaaatgaaataagcttttcaagcttttacgcgtactcagcgttttttttaatcgctcgtctcgtcggcatttcgcataggcaaatcgcattctaaaattacataagtgctgatccgttgcaagcttaattgttgcgttttggctcaattggattaatttaattcgaattgattggtgagaaaagctgactttgtcacattgtattttaaatttgccgatttcgattgacgccgatgcacgcatgttagggatgggagaattcgaatacgtttacagactctgttaatgcgctgttaacataaacactgtaccggttttctggtcgtaatacttcgtagttttcaaaaattataacccaaaagataagtaccatgatggtaagtggttcatcagaaatctttatttttatgttatcattatgaaaatatatctaaaaacaagctgctgttgtactttaagataaactttattcacatagaaaataaataattgttacatttcaacacattgctttaccataattctcatatcctccgcattactcatcctgctcatttttatatgtttttcttaggtcgatgcttacgctttaaaatagattgtatatttacaaagatgttgtacgcaaaacttaagtcaacgtgtagggcggtagatacttgtttctgggtaaaaaggactcagaggagcaggaggtgtttggagttcgtgctggttgtggagcgggatggtggtgctggttggtggtgctttttggtggtgcaagtgctcaaaaggccccgttgaagtgcaggttttgtgaggcgaactgcggtatcccatggttgagagctaaaactttactgattactttcaattcgtcaagatttcttaagctgctaaattgactaagatgattgccactggggccactcggtctgctcttata

SEQ ID NO: 32846 - DNA, 824 bp, DROSOPHILA
ccatgtggtcgcgcagcagcagttccaaaagacaagtggccaccaccgatggtgaccccgaaagggttttggcgcaggtccaggatctcagcgactggctcgtcgccaatccgcagatcaacggatgcaacaccttcgagaacctgcacttcttcctccgcacctccaagttcgatgtggaacgggccaaaaagaaactgaaaacgttctaccaaatgcgggcggagcgcaccgaatggttcgataatcgcgatccccaattgcccgagatccaggacctactcaagctgggcgtcttcctacccatcggtccggatgccgaacaaaggatggtggtggtcatacgcacagcagcacacgatcccaagctccacagccagaacaatgtttttaaaaccagcaaaatgatattggacctgctgctaaagctcgatccggagacctgtgcccgcggaatggtggctattctggatatgcagggcgttcaactggggcacgctcttcaaatgaatccgaagctcatcaagagatccgtggaaagctggaccgcatatccatgtcagcccaagctattggaattcaccaacgccccgcgccatgtgaacttctttttgaacacctttagaatattcatgacgcccaagataagatcgcgacttttcgtgcgtcgtgaaggaacatccgtgagctgcgatcagttgccaaaggaactcggtggtcagggattaagctatatggagctgtctgtgaagtggaagcagttggtcgaggagaacgccgatttctatgtggaacaagacaaatacaaaagcaagctcaagtga

SEQ ID NO: 32847 - protein, 273 aa, DROSOPHILA
MWSRSSSSKRQVATTDGDPERVLAQVQDLSDWLVANPQINGCNTFENLHFFLRTSKFDVERAKKKLKTFYQMRAERTEWFDNRDPQLPEIQDLLKLGVFLPIGPDAEQRMVVVIRTAAHDPKLHSQNNVFKTSKMILDLLLKLDPETCARGMVAILDMQGVQLGHALQMNPKLIKRSVESWTAYPCQPKLLEFTNAPRHVNFFLNTFRIFMTPKIRSRLFVRREGTSVSCDQLPKELGGQGLSYMELSVKWKQLVEENADFYVEQDKYKSKLK

SEQ ID NO: 32848 - DNA, 3820 bp, DROSOPHILA
tgggcgccacctggtcgggcgacctgaagggcggcaagatgaacattgacctggacaatctgctgatgagcaagtcgggcaagcccagtgccccggccccttcgatgaatgccctgaagaccaacagtccggcaaaggcgccactgaatgtgcagacgggtggcggattccctggactgtcgccaatgaccagtccgaacatttttggggctccggcaccgcagcaaagcattccacaaaaccaatcagcatttgccaactttggagctttccagcagcagcagcagaatcacagcaataataacaataatagctcgtcggcattcgacttgtttcaatgatattttttagcctaatttaacccaaccaacctactacccaaaatgtccactctcacattcacatttccacgatcgctaaacttgtcagttctatatattatttacgttttcctttccccttgctgtacaaagtttgcgacacgtgcaatttgtttctaaattcgttgttaaacaatttacccccgatgcaattttccggatcaaacccattaattccacatccgtcctgatcgtccactcggaatttgaaagtcgtcatcaaatgcaatacacagagtagttgaataatggttgtactaaacggattcgttagcacaacgcgcggacggacggctgagcgatccaacattgaaattgttaaacaaaatactacacgtaataaaatcaaacaattttagcaatagttaacgttacgatgtgtctgtatataaattgaatgtaaagcaaatatgaaatataaaacaattgaaaccaataattatgatagtctcttgatttaaaacgcaaactcataaaattccggtgggaataccctccaaagtatatgtttattattatttgaaatgcgatccatcagggggtcaaaggaaatacaaaagaagcatgtaagtaaaagataatagtgtggacttaaactaagttgaatgtaacagagacatttacgcctccaccgcttccttgtttttgttcttctttttcttcttcttctttggctctccatcatcgttgccattgccattttccgcctcggcggctgctccgtttccattactggcgccattcgtctcgccctcgtcttcagccgctcgcttcttctttttcttctttttctcggactgtacagtgattgccgcctcttgaccagctgcctcgatggcctccttcattacctcaatgttcttgcgcggcacatcgccggactcgtagaacttgaggcgatcttcgacctgttgcttaagagtttcgccaaacacgctagtcggctgttccaggaagcaatcgatacgcgacgcgatggagcacttgttggccaggaatcgagagatgcgacccttgttcttcaggccagctcgaccaatgaacgaggagtgatagataagaccatacttgggcgtattggagcgggtctttagagcacggaagagcgccttctcggcacccaggatttgtactgtagatgctgggtacttggccagattagtcaagctgccggcatgcgatatcaggcgggcaccgacctggtcgccaatcaaagactgcagattgggtgccaccaagttcatcttgttgtgcaagtaggtagacagtttctttcggtactcggaaagcttgacaacgcgctctgcgaacagctcaatgttcatcagatcaacaatggagatgtccatgcccatggacatcttggcggcatcaatgatagcctgagccttggcggagtccatgacgatcttctcaagatcctccagctggtcttgcgtgaggttcttgcgatccttgatgaacttggccgccttggcgaacatgtaattgtcgggaacgattttgaccagttctgggaagtgatacgagtaccactcgcgtatccgcatagagaaggtatttacgtccttatccaactgatccagcaaagcaatcgactggatgatcatgttgtcggaacgatgaacattgaacttgaccttggcacgcgagtagctgtggcccagacccagctgagcaacgccagcggacttgtcggtgaatcctgcatcggatggaggaggctttagttagacaaagaggattttccttgcaaagcaggtagcttacccttgaccagcttagcgaagtggaatcgcacgccgcgcagaatctcaggaaccactccaaagtgactgcactggacgccaatggcctcggtgattgcagctcccagcttggcatccgcaatacccagggtgcacttcttcttcttcagcttggcaaagaagtcatccaagaaggagagcagatcctgcggcactatgccctcggatatggcattgatgttttccagtgcggcaatggccgtcttgaaaggtgcaaatccagccagcttaacaattgagttgaacttggcgaggtccgtcaccgaggactccacctggggcaggaacatggacacctcttcgaactccttgacggagaagagcgagaagcccgccgcatgctcgtacagcacatacaggttcgactggaggcggggaaatgaaaaattatcagtctgatgcggtggcagacacatgtggttttgggtgctccgcgtgtgtaggttagttttcgcagggaaaacattttcatttcacgggcaacccgcagaaaattcaaatatatgattattgcactgaaatatttaccatgtctatgccgaatatatgccgatttaattaagaaatatatatttttatacacccacgatgctgctacagttgttttcccacgtgcttacttcaagtgtgaccatagcaagccgattgcgaaatgttagggacataccagataaaataccgcagtaccgtactgaattattttaacaggctggccacgttgatagcctgataacctgtcgcgttgtccctctcgcactttcatcaactgtctctgtgtgtgaaagcaattttatttttatttataacaaattttttgcgtttataaacacaacagaattaactagttggctcggcacacttcctggaaccgctcgcatcagctgttgggctacggcactagttaacagaccgaccaactggaggccagatacagataccatcattgtcatttcccaattgaccagagaaagaaacctgctgcgaattccagtcacttttctttaattattattcggcgctaattgtgtaaaaatcggcggaataaagctgctgacacgacacagaagagccgaaaaagcggtgtggcactcgccggaaaagtctacgcataggaaaattccattggaggctcagtgaaaggcgaagcacagcaattgcatgccatggacttcttgttgtaagttctcaggggggcaaaacgtagtgcaactgcaatcctttcgagcacaaagaaagcttggatcaccccgccccacatctgactttccggctttgtttgccctttttggggtgatatccccaacctcttgtacagtggaacttccctaattttgtctgcggtgtttaaaaaatagcttttcaaagatatcttgcattcttcctcagtgaatttaaaaaaagaaaaaaaaaggaaatatttcttttagggagtgtaaattgaacgaagtcgcttacgtttcaatctatagaatctttactgtattatgttttactgagtggggctgtttggggccgcgacttattgcctttctctttccacagcggttcccgttccagcaagaccttcaagcccaagaagaacatcccggaaggcacacaccaatatgatctcatgaagcatgcggcagccac

SEQ ID NO: 32849 - DNA, 1517 bp, DROSOPHILA
gtcacacttgaagtaagcacgtgggaaaacaactgtagcagcatcgtgggtgtataaaaatatatatttcttaattaaatcggcatatattcggcatagacatgatgttcctgccccaggtggagtcctcggtgacggacctcgccaagttcaactcaattgttaagctggctggatttgcacctttcaagacggccattgccgcactggaaaacatcaatgccatatccgagggcatagtgccgcaggatctgctctccttcttggatgacttctttgccaagctgaagaagaagaagtgcaccctgggtattgcggatgccaagctgggagctgcaatcaccgaggccattggcgtccagtgcagtcactttggagtggttcctgagattctgcgcggcgtgcgattccacttcgctaagctggtcaagggattcaccgacaagtccgctggcgttgctcagctgggtctgggccacagctactcgcgtgccaaggtcaagttcaatgttcatcgttccgacaacatgatcatccagtcgattgctttgctggatcagttggataaggacgtaaataccttctctatgcggatacgcgagtggtactcgtatcacttcccagaactggtcaaaatcgttcccgacaattacatgttcgccaaggcggccaagttcatcaaggatcgcaagaacctcacgcaagaccagctggaggatcttgagaagatcgtcatggactccgccaaggctcaggctatcattgatgccgccaagatgtccatgggcatggacatctccattgttgatctgatgaacattgagctgttcgcagagcgcgttgtcaagctttccgagtaccgaaagaaactgtctacctacttgcacaacaagatgaacttggtggcacccaatctgcagtctttgattggcgaccaggtcggtgcccgcctgatatcgcatgccggcagcttgactaatctggccaagtacccagcatctacagtacaaatcctgggtgccgagaaggcgctcttccgtgctctaaagacccgctccaatacgcccaagtatggtcttatctatcactcctcgttcattggtcgagctggcctgaagaacaagggtcgcatctctcgattcctggccaacaagtgctccatcgcgtcgcgtatcgattgcttcctggaacagccgactagcgtgtttggcgaaactcttaagcaacaggtcgaagatcgcctcaagttctacgagtccggcgatgtgccgcgcaagaacattgaggtaatgaaggaggccatcgaggcagctggtcaagaggcggcaatcactgtacagtccgagaaaaagaagaaaaagaagaagcgagcggctgaagacgagggcgagacgaatggcgccagtaatggaaacggagcagccgccgaggcggaaaatggcaatggcaacgatgatggagagccaaagaagaagaagaaaaagaagaacaaaaacaaggaagcggtggaggcgtaa

SEQ ID NO: 32850 - protein, 470 aa, DROSOPHILA
MFLPQVESSVTDLAKFNSIVKLAGFAPFKTAIAALENINAISEGIVPQDLLSFLDDFFAKLKKKKCTLGIADAKLGAAITEAIGVQCSHFGVVPEILRGVRFHFAKLVKGFTDKSAGVAQLGLGHSYSRAKVKFNVHRSDNMIIQSIALLDQLDKDVNTFSMRIREWYSYHFPELVKIVPDNYMFAKAAKFIKDRKNLTQDQLEDLEKIVMDSAKAQAIIDAAKMSMGMDISIVDLMNIELFAERVVKLSEYRKKLSTYLHNKMNLVAPNLQSLIGDQVGARLISHAGSLTNLAKYPASTVQILGAEKALFRALKTRSNTPKYGLIYHSSFIGRAGLKNKGRISRFLANKCSIASRIDCFLEQPTSVFGETLKQQVEDRLKFYESGDVPRKNIEVMKEAIEAAGQEAAITVQSEKKKKKKKRAAEDEGETNGASNGNGAAAEAENGNGNDDGEPKKKKKKKNKNKEAVEA

SEQ ID NO: 32851 - DNA, 3191 bp, DROSOPHILA
aaatactgaacgcgtttcagtagtttgtcactggtgctgaactcattatagggcacgggaataacgtggtaaccactcttctctagcagatcaaatgtcagattcgtaacgccgctgccactgcgatgcgttccgtggcaaatgtcatggaaatcgatgaccatcagcgccaccctgaaatcaagtttcattcattataatcaagttaatttataaaacgtgtaataacttgccttattgcattcggattttccttgtccaaaggcagggggtttttgttagcatcaaaatggcacagtgcatctgaaacgacagttaatcaggaatatggtacacattaacaaggaatatcttacctataaggaagcccattttagtgtctacagcagtttgtaaatgattgctggccggcagcagacttttcagggcatctagcattccatttacaagcacttgctttgctttaggatgagccatgggcacctgatagacaggactgtcagtgggcaatagtggacccttgtaatctgtggctattaactgggcatagctattcaagttgagtagcctcattttggaggtagctgtgacaccagctttgtcctttttcaacgtctctaggaagtccgcactgaaagtaattacaaatttaagttttaattccagattttcaagcgtttcaaagaacaaacctcaaaacagaagccaagtggccgtgttctactagacccaacattgttagcgaccacacaaagctcaaccactcggattgcttggtaaaatcctcgcggacaatagactttactagctttttgctcacttcctccaattgagcgcttttgaagtttagcagggccgatgttaggaaataggcactgagatcttgggggcgacagatttcactattctttaaaagccactgcgtaagtgattccaagatatctaccgaaaaaaataaattacattaatcacaactttttctgatgtgtttatatccgagctaacccaaatcccggtatcgtaaaatgcccaggctggtgataatggatcccacaacggcagacttctccacattcttaggcagcgccgattgcacatccgcacacactttagcgcctagaacagaatcctggaaattcaacgtggacatagcgaacagcacatcccccgcttgctttaaatccagcgattccgacgcgctgctgatattaaaggccagggagcgcaagagaggagtactacgcctcttccgctgggccagggtgctcatcaccttgaccatctggggcagactgatgctagctatcagcttagcggcctcatcgtcaccagctacgccaagcaccgtgtttaggtcatctgttcggaagccggaaatccgcttggccgtcccattgtcaccaaggtccttgttgttagcattattatttttgggaaccgtccggcccaacatccggcaaatacgtaggaaccttgtgtcgttctcgaattccgagatctttactcgattcaaggtgctccactcggccagtatggagacaattctgagggcatgcttcctcgagaagccattgttgttctccgtgatagttagcagtccattgactgtctttgcgttgatgatacgctcatcgatcttgctggaggcttggcttttgctctcatctttgggatcgtcgtttctaagggattcgaaagcagcggctaccatgtggcctgcaataaggatggagtgaataccaattagtaaggaggacaacaattttagaatctacctacccctgggctttttggccgcctcctccacagccggcgcgcgtgcttccggctccactgcatccgattgtgctccagtgggcgccacgggaatgcccgctgcccggacactgctgctgaaggctgcacggcggtacaactgggtgacaaaactgccggcaaaacgttgtagtcccaacattttcagtcaatccacacgctgcaagagaccacagaagtttacataacctttttgtttacatttttagcggccaggaaggggctttacaaagcatgccaatgatataggcttatattcatgacttgaaccgtcttatttcccctgatatccttcacgtttcatttagtattttcatttattttagtaaactttcctattgaacgttgagaatccacagatgacagcagcgttcagctgatggtagtgtagggtaagacccgtcggctccatgcaaagcttttgtaacactgcgagctgtgctgccaactcagcattttctagctagatctggcgttttttattccggaacttaggtgtcattgcatgtgctttcggttatttggtaaatgcttccaattttattactatgccgatttctctttgtgctttattaataagaaaactaatgttttattgaactatttcggttattggtaaatggttcccattttataactatgccgatttctctttgtgctttattaataagaaaactaatattttattgaactatttggagcacaaatttaaaaagctaattttcattaataacggctacagctatttatcggatttagctacacttgaacagtgagagttggaaacactgtttgcaacactggacacgacagctcaccaaatattagctgctgtgattttgttttacaattttcgtttaaatttttacatttttgtttgcggaaagcgcgggtgcgagacaggtgcgccgtttccatgcaaaagtgcaaatcgtcagctgcaaaacagtcagaaaacggcacgccaagcgaaaacgagttcgacgtcttgttgtagttggattttccagccacttttcgacgagattgtgtgaaaaattccgtagcattcaatagtctcaaaatggtggataaattcatcagcatgtggaaagtgcgcgaattggcggacaaggtgtaagtgatcaggaatatataggatatatccatacgtatatgtaatgggatgtgtgtataacattcccttaacgccgaagtgaatgttaagactcccacgccccaagttttctgatttcccgccacgcccccaactcctcaaggatttcaaaagccctatgtcatgcataaatccctaataattcataaagatatcttacttatggatcaactgcatcggggtgctggattaggttcacgtttttaactgctttcaaggt

SEQ ID NO: 32852 - DNA, 935 bp, DROSOPHILA
ctgaacgctgctgtcatctgtggattctcaacgttcaatagatgttgggactacaacgttttgccggcagttttgtcacccagttgtaccgccgtgcagccttcagcagcagtgtccgggcagcgggcattcccgtggcgcccactggagcacaatcggatgcagtggagccggaagcacgcgcgccggctgtggaggaggcggccaaaaagcccaggggccacatggtagccgctgctttcgaatcccttagaaacgacgatcccaaagatgagagcaaaagccaagcctccagcaagatcgatgagcgtatcatcaacgcaaagacagtcaatggactgctaactatcacggagaacaacaatggcttctcgaggaagcatgccctcagaattgtctccatactggccgagtggagcaccttgaatcgagtaaagatctcggaattcgagaacgacacaaggttcctacgtatttgccggatgttgggccggacggttcccaaaaataataatgctaacaacaaggaccttggtgacaatgggacggccaagcggatttccggcttccgaacagatgacctaaacacggtgcttggcgtagctggtgacgatgaggccgctaagctgatagctagcatcagtctgccccagatggtcaaggtgatgagcaccctggcccagcggaagaggcgtagtactcctctcttgcgctccctggcctttaatatcagcagcgcgtcggaatcgctggatttaaagcaagcgggggatgtgctgttcgctatgtccacgttgaatttccaggattctgttctaggcgctaaagtgtgtgcggatgtgcaatcggcgctgcctaagaatgtggagaagtctgccgttgtgggatccattatcaccagcctgggcattttacgataccgggatttgggttag

SEQ ID NO: 32853 - protein, 297 aa, DROSOPHILA
MLGLQRFAGSFVTQLYRRAAFSSSVRAAGIPVAPTGAQSDAVEPEARAPAVEEAAKKPRGHMVAAAFESLRNDDPKDESKSQASSKIDERIINAKTVNGLLTITENNNGFSRKHALRIVSILAEWSTLNRVKISEFENDTRFLRICRMLGRTVPKNNNANNKDLGDNGTAKRISGFRTDDLNTVLGVAGDDEAAKLIASISLPQMVKVMSTLAQRKRRSTPLLRSLAFNISSASESLDLKQAGDVLFAMSTLNFQDSVLGAKVCADVQSALPKNVEKSAVVGSIITSLGILRYRDLG

SEQ ID NO: 32854 - DNA, 2544 bp, DROSOPHILA
gagccggcggaaccgcgggcaaatcgactgatttacttttgcctgcaagtacacaactattattagtcgctgttattgccttctgaagatagctgcaaatcacttaccaaaacaacaacccattatggtatactctttactgattctcgggacgagtgggctaatttgctgaaagttctttgagcactaaatcgggcaaatcaaatcggtggccaattgactgggtgcgtatgtgtgcacctgaggcgtacaaacgactcatggctaattgataagccctgctgttacttttattctctttttgtttaaaatgtaaagtgggttatttatgacaccatgggtaggtctgctatcaacagtgtagttccccatcggccgtattagcatcgtgcaaagaaccgtagaactgtgataaaagcggacaatgccggtcggatataaccgcaacgaagcgaccaacaaaccaattgcgataagctcttatcaggggaaaacgttttcaatgctctctaattggcgctaaatattcaattgtcgttatgatatcgtttatcgaaaaggctatcgattgaaaattccgctcttgtgggccagatttcaaaaacgcttagaagcatttgacaattcaagcaatttacgtagtaattgcgaacatttttaacaaattagtagttaacatacattttacaaaaatatatatttgcaggatttataatctctttagaattattatttctgtataaaatcccagaatttcattcctctctaacgtttttctttgtgataacagttttgattgttaatcaaatttttatagctggaattaaagttcagcaaacattttcgtttgtttaccagtggccagtgagaccgttcgctgtggcgcctaaaaaaccaacatttcactgttcctcaaagtgcgggggggtggtgcgttcattatcagccggaacgtaaacagcgtcgctgcttttcacgctttccgataaaaatgtttaaatcacactgtgttaattagagcccaaatcaaaatcaatgcgcccgtggacgcgaacgactcgagatcgtgtgcgcgtgaatgcggatcgagtagttggtagctagtttatcaaattcgaacccttgatataataaaaataaaggtgcgcgagaatacgtgaattgcgatttttggcccgtgaacgaatcacgagcaaagcggataaacaaaagccataaaaaacagattcgcacgagaatcatcgcaaaagtctgtgcgcataaattacgctccccaattggaattggaaaagtctggttttcggcgagcatccgcatccgcgatggacgacgagtttaagctgtgctggaagaacttccaggacaacatagccagcggcttccagaatttgtacgaccgcggcgacctggtggacgtgaccctcgcctgcgatggaaagctcctccatgcccacaagatagtgctggctatctgcagcccctacttccaggagatattcactaccaatccctgcaagcatcccatcagtgagtacaccgattaggcagcacaagattgcggccccatcgccggcgtccccggtttaaatgctaagttatgcagcgtggcttacattgtcagcgcggcatttatatgtgtattttgatactgggcacggaagtggtcttccagaaattggtcaagtttaatgttccgagctttcgttgccatgcatatggatgatcctaatggaacattgagtgcgtaactgaaggattcgggtttcttacaaattgcttggctcttggcattgcaaatacattgtagacatattttcttggaattttaataagccggaaaagagtctgactattcgctgggctatttcatacccttcacatacatacatagtctgtataatgccagggaagagtgactgctggttacttggtcaagcatattcccccagaaatcggtcagtttatcactgggacagcggtgtcagtttatcgaggagcccgcccgtcagcctgtctgttcatcactcttgtcaaacgcttagatataaatcaacctttgtgttaaattccatgacacattcggtggttatcagcccagctccaccgccagttcgattccgagttccagacgagcgtcccagcacgactacgtctgtctttacagtatcgctaccataaatccaactatacccgccctattaactttacactttatttcataagcctaacttgccttttttttagcatacaaagtaatcaatcgaataatattgttagtcgtttgatggatcgcccattaaaattaagtagtgcagcgatattaggaagattataaatcgtttatgcaaatgcattaaggtttatccagcctacagttatctaaagactttgtaatgaactgtaatcatttgataaccgatttgatttactaatccaattcagggtaatataatccaattcgtaatatctgtccgtttctgattcatgttccagttagtgaagtttgactgtagagtcgtaaatctaaagacaaacagcagcaac

SEQ ID NO: 32855 - DNA, 544 bp, DROSOPHILA
tcacactgtgttaattagagcccaaatcaaaatcaatgcgcccgtggacgcgaacgactcgagatcgtgtgcgcgtgaatgcggatcgagtagttggtagctagtttatcaaattcgaacccttgatataataaaaataaaggtgcgcgagaatacgtgaattgcgatttttggcccgtgaacgaatcacgagcaaagcggataaacaaaagccataaaaaacagattcgcacgagaatcatcgcaaaagtctgtgcgcataaattacgctccccaattggaattggaaaagtctggttttcggcgagcatccgcatccgcgatggacgacgagtttaagctgtgctggaagaacttccaggacaacatagccagcggcttccagaatttgtacgaccgcggcgacctggtggacgtgaccctcgcctgcgatggaaagctcctccatgcccacaagatagtgctggctatctgcagcccctacttccaggagatattcactaccaatccctgcaagcatcccatcagtgagtacaccgattag

SEQ ID NO: 32856 - protein, 73 aa, DROSOPHILA
MDDEFKLCWKNFQDNIASGFQNLYDRGDLVDVTLACDGKLLHAHKIVLAICSPYFQEIFTTNPCKHPISEYTD

SEQ ID NO: 32857 - DNA, 3504 bp, DROSOPHILA
gaaggtatttacgtccttatccaactgatccagcaaagcaatcgactggatgatcatgttgtcggaacgatgaacattgaacttgaccttggcacgcgagtagctgtggcccagacccagctgagcaacgccagcggacttgtcggtgaatcctgcatcggatggaggaggctttagttagacaaagaggattttccttgcaaagcaggtagcttacccttgaccagcttagcgaagtggaatcgcacgccgcgcagaatctcaggaaccactccaaagtgactgcactggacgccaatggcctcggtgattgcagctcccagcttggcatccgcaatacccagggtgcacttcttcttcttcagcttggcaaagaagtcatccaagaaggagagcagatcctgcggcactatgccctcggatatggcattgatgttttccagtgcggcaatggccgtcttgaaaggtgcaaatccagccagcttaacaattgagttgaacttggcgaggtccgtcaccgaggactccacctggggcaggaacatggacacctcttcgaactccttgacggagaagagcgagaagcccgccgcatgctcgtacagcacatacaggttcgactggaggcggggaaatgaaaaattatcagtctgatgcggtggcagacacatgtggttttgggtgctccgcgtgtgtaggttagttttcgcagggaaaacattttcatttcacgggcaacccgcagaaaattcaaatatatgattattgcactgaaatatttaccatgtctatgccgaatatatgccgatttaattaagaaatatatatttttatacacccacgatgctgctacagttgttttcccacgtgcttacttcaagtgtgaccatagcaagccgattgcgaaatgttagggacataccagataaaataccgcagtaccgtactgaattattttaacaggctggccacgttgatagcctgataacctgtcgcgttgtccctctcgcactttcatcaactgtctctgtgtgtgaaagcaattttatttttatttataacaaattttttgcgtttataaacacaacagaattaactagttggctcggcacacttcctggaaccgctcgcatcagctgttgggctacggcactagttaacagaccgaccaactggaggccagatacagataccatcattgtcatttcccaattgaccagagaaagaaacctgctgcgaattccagtcacttttctttaattattattcggcgctaattgtgtaaaaatcggcggaataaagctgctgacacgacacagaagagccgaaaaagcggtgtggcactcgccggaaaagtctacgcataggaaaattccattggaggctcagtgaaaggcgaagcacagcaattgcatgccatggacttcttgttgtaagttctcaggggggcaaaacgtagtgcaactgcaatcctttcgagcacaaagaaagcttggatcaccccgccccacatctgactttccggctttgtttgccctttttggggtgatatccccaacctcttgtacagtggaacttccctaattttgtctgcggtgtttaaaaaatagcttttcaaagatatcttgcattcttcctcagtgaatttaaaaaaagaaaaaaaaaggaaatatttcttttagggagtgtaaattgaacgaagtcgcttacgtttcaatctatagaatctttactgtattatgttttactgagtggggctgtttggggccgcgacttattgcctttctctttccacagcggttcccgttccagcaagaccttcaagcccaagaagaacatcccggaaggcacacaccaatatgatctcatgaagcatgcggcagccacgctgggatcgggaaacctgcgcaatgcagtggcccttccagatggcgaggatctcaacgagtgggtggccgttaacagtgagtctagtatagtgtaactagcgaaagataaccaattcttattgccactccttcgcagccgtggactttttcaaccagatcaacatgctgtacggcaccatcaccgagttctgcaccgaggagacctgtggcatcatgtcggctggtccgaaatacgagtaccactgggccgacggtttgaccgtaaagaagcccatcaagtgcagcgcgcccaagtatattgactatctgatgacttgggtgcaggatcagctggacgacgagaccctgtttccctccaagatcggcgtgccgtttccaaagaactttcactcctccgccaagaccatactgaagcgtctgttccgcgtgtatgcgcacatctaccaccagcacttcacagaggtggtgacgcttggcgaggaggcccatctcaacacgtccttcaagcacttcatcttcttcgtgcaggagttcaatctgattgagcggcgcgaactggccccgctgcaggagctcatcgacaagctgacggctaaggatgagcggcagatataggaatcactgcatggagccgcgaattttcgcgattccggcggcggtggtggtggtctgcgcttgcagttggacttgtgatgaaagcgctctggcagactcgtgtattacgctttagttagttaccgccaatacttttatgtttcgttcattgcttcatggggtgcctcccactaaacaaaagaaaacaaaaaaccgccaattggcaatgtgaaccgaactatagcgggctaattgctgatccagagcaactactatatttttatatgtgaaacgtaaaaacgtataaatcatatttatatgtatatgtaaaggagaaaacaaaagcagcaaaagcaacagcacgccttttataactaacacctcccgctttcgagaaacaacaaatattacgttcacaaactatgcgtgtttccttgtttatcgtttttctttctgtatgtattctatgtatttattactattaaactatcgctaattgctcgcggttcagcggatcaagcgattttgtaatgcaaaccccagcaatttgaggcgacggtcggcagcacccaataactgataataattgtagacttgataaacatttttgatacgttttatactaataaagagaatattatgaataaactcgtctcttttttgtttggtttatcgtgtattgacactttattaagcaaaaaaaaaaagataacattgatgattaacacaacgaaaataaccttttttaaaaaggtttaacgtaatgacttataatatatacaaatatggttaagtggggaattagggagtatttgtagtacccttccataaaatatgacaactgatatgcgcctttgtgcatttgcgcattgtaaatgttttcgactaatctataacattcggctaatcgccttgttatcactgccgccacactaaccccaatcacttgagcttgcttttgtatttgtcttgttccacatagaaatcggcgttctcctcgaccaactgcttccacttcaca

SEQ ID NO: 32858 - DNA, 1078 bp, DROSOPHILA
tccctctcgcactttcatcaactgtctctgtgtgtgaaagcaattttatttttatttataacaaattttttgcgtttataaacacaacagaattaactagttggctcggcacacttcctggaaccgctcgcatcagctgttgggctacggcactagttaacagaccgaccaactggaggccagatacagataccatcattgtcatttcccaattgaccagagaaagaaacctgctgcgaattccagtcacttttctttaattattattcggcgctaattgtgtaaaaatcggcggaataaagctgctgacacgacacagaagagccgaaaaagcggtgtggcactcgccggaaaagtctacgcataggaaaattccattggaggctcagtgaaaggcgaagcacagcaattgcatgccatggacttcttgttcggttcccgttccagcaagaccttcaagcccaagaagaacatcccggaaggcacacaccaatatgatctcatgaagcatgcggcagccacgctgggatcgggaaacctgcgcaatgcagtggcccttccagatggcgaggatctcaacgagtgggtggccgttaacaccgtggactttttcaaccagatcaacatgctgtacggcaccatcaccgagttctgcaccgaggagacctgtggcatcatgtcggctggtccgaaatacgagtaccactgggccgacggtttgaccgtaaagaagcccatcaagtgcagcgcgcccaagtatattgactatctgatgacttgggtgcaggatcagctggacgacgagaccctgtttccctccaagatcggcgtgccgtttccaaagaactttcactcctccgccaagaccatactgaagcgtctgttccgcgtgtatgcgcacatctaccaccagcacttcacagaggtggtgacgcttggcgaggaggcccatctcaacacgtccttcaagcacttcatcttcttcgtgcaggagttcaatctgattgagcggcgcgaactggccccgctgcaggagctcatcgacaagctgacggctaaggatgagcggcagatatag

SEQ ID NO: 32859 - protein, 191 aa, DROSOPHILA
MKHAAATLGSGNLRNAVALPDGEDLNEWVAVNTVDFFNQINMLYGTITEFCTEETCGIMSAGPKYEYHWADGLTVKKPIKCSAPKYIDYLMTWVQDQLDDETLFPSKIGVPFPKNFHSSAKTILKRLFRVYAHIYHQHFTEVVTLGEEAHLNTSFKHFIFFVQEFNLIERRELAPLQELIDKLTAKDERQI

SEQ ID NO: 32860 - DNA, 2465 bp, DROSOPHILA
tggtaaccacaccagctcatgtgctggcccagcactttgcggagtcattgaacgaactgcagcgctggctgaatgacttcataagatcgccattggtgggcggagagacttcggaggagtgtcgtgaactggcccaaagcattttggacacctgctacaaactctttgatacagccgccatggaacaggctgcctaacttggccatcaaaaagttttgaaagcagcctatagagttttaagagatttaaaatattaaaactgtatttaaaatacactaagcatatttcttgttacggaaaaacgaacaattttttactgaaatatttccgaattaatatatgatatatatgattaaatacaagattacttcatactttacatcaattctcatacaaacgttaacgctgtgtccttaaacattttcttataattgtataaactaataatagactcgagagttaggtatttgctagaaataagacaacagttctaggaattattttttaaatatctatcgccctcgaagccattgtattccaggtatacatatatggatttacttcatttatactactttcttttgtttatttgtttttctcctactgcatatttgtattgcaaaccacacacacattggatccaatattatttctcaaatatatacatacatatgtacttaataatgatgaattgaaaagcatttctcaatattccgggcattgtgcggcctccgcagccacggactcattaggtaaaccaatccaaaacggcaatagccacataacagatacgaacctattctttccttctgtaattgcacttgatttgctgcgcaaacgcttccgagtagtgaccacctcattagccgatcaccaagtagccgcattcgcaattctatcgaagccacatatttaaaacagctttttgtgaaaccaaaataaaaacgaaaactgaaaccccgaataacattattattgcatttgtttttttccagacaatatgatgcctcccattcccgccgtcacgggcaataatctgctccagcccatgtcggtgaccaataataacaataataccaacggaggcgcagtccccgccgctgccagtgtccagtctaccgctgtgggcgccacctggtcgggcgacctgaagggcggcaagatgaacattgacctggacaatctgctgatgagcaagtcgggcaagcccagtgccccggccccttcgatgaatgccctgaagaccaacagtccggcaaaggcgccactgaatgtgcagacgggtggcggattccctggactgtcgccaatgaccagtccgaacatttttggggctccggcaccgcagcaaagcattccacaaaaccaatcagcatttgccaactttggagctttccagcagcagcagcagaatcacagcaataataacaataatagctcgtcggcattcgacttgtttcaatgatattttttagcctaatttaacccaaccaacctactacccaaaatgtccactctcacattcacatttccacgatcgctaaacttgtcagttctatatattatttacgttttcctttccccttgctgtacaaagtttgcgacacgtgcaatttgtttctaaattcgttgttaaacaatttacccccgatgcaattttccggatcaaacccattaattccacatccgtcctgatcgtccactcggaatttgaaagtcgtcatcaaatgcaatacacagagtagttgaataatggttgtactaaacggattcgttagcacaacgcgcggacggacggctgagcgatccaacattgaaattgttaaacaaaatactacacgtaataaaatcaaacaattttagcaatagttaacgttacgatgtgtctgtatataaattgaatgtaaagcaaatatgaaatataaaacaattgaaaccaataattatgatagtctcttgatttaaaacgcaaactcataaaattccggtgggaataccctccaaagtatatgtttattattatttgaaatgcgatccatcagggggtcaaaggaaatacaaaagaagcatgtaagtaaaagataatagtgtggacttaaactaagttgaatgtaacagagacatttacgcctccaccgcttccttgtttttgttcttctttttcttcttcttctttggctctccatcatcgttgccattgccattttccgcctcggcggctgctccgtttccattactggcgccattcgtctcgccctcgtcttcagccgctcgcttcttctttttcttctttttctcggactgtacagtgattgccgcctcttgaccagctgcctcgatggcctccttcattacctcaatgttcttgcgcggcacatcgccggactcgtagaacttgaggcgatcttcgacctgttgcttaagagtttcgccaaacacgctagtcggctgttccaggaagcaat

SEQ ID NO: 32861 - DNA, 465 bp, DROSOPHILA
atgatgcctcccattcccgccgtcacgggcaataatctgctccagcccatgtcggtgaccaataataacaataataccaacggaggcgcagtccccgccgctgccagtgtccagtctaccgctgtgggcgccacctggtcgggcgacctgaagggcggcaagatgaacattgacctggacaatctgctgatgagcaagtcgggcaagcccagtgccccggccccttcgatgaatgccctgaagaccaacagtccggcaaaggcgccactgaatgtgcagacgggtggcggattccctggactgtcgccaatgaccagtccgaacatttttggggctccggcaccgcagcaaagcattccacaaaaccaatcagcatttgccaactttggagctttccagcagcagcagcagaatcacagcaataataacaataatagctcgtcggcattcgacttgtttcaatga

SEQ ID NO: 32862 - protein, 154 aa, DROSOPHILA
MMPPIPAVTGNNLLQPMSVTNNNNNTNGGAVPAAASVQSTAVGATWSGDLKGGKMNIDLDNLLMSKSGKPSAPAPSMNALKTNSPAKAPLNVQTGGGFPGLSPMTSPNIFGAPAPQQSIPQNQSAFANFGAFQQQQQNHSNNNNNSSSAFDLFQ

SEQ ID NO: 32863 - DNA, 7986 bp, DROSOPHILA
gatgatacgctcatcgatcttgctggaggcttggcttttgctctcatctttgggatcgtcgtttctaagggattcgaaagcagcggctaccatgtggcctgcaataaggatggagtgaataccaattagtaaggaggacaacaattttagaatctacctacccctgggctttttggccgcctcctccacagccggcgcgcgtgcttccggctccactgcatccgattgtgctccagtgggcgccacgggaatgcccgctgcccggacactgctgctgaaggctgcacggcggtacaactgggtgacaaaactgccggcaaaacgttgtagtcccaacattttcagtcaatccacacgctgcaagagaccacagaagtttacataacctttttgtttacatttttagcggccaggaaggggctttacaaagcatgccaatgatataggcttatattcatgacttgaaccgtcttatttcccctgatatccttcacgtttcatttagtattttcatttattttagtaaactttcctattgaacgttgagaatccacagatgacagcagcgttcagctgatggtagtgtagggtaagacccgtcggctccatgcaaagcttttgtaacactgcgagctgtgctgccaactcagcattttctagctagatctggcgttttttattccggaacttaggtgtcattgcatgtgctttcggttatttggtaaatgcttccaattttattactatgccgatttctctttgtgctttattaataagaaaactaatgttttattgaactatttcggttattggtaaatggttcccattttataactatgccgatttctctttgtgctttattaataagaaaactaatattttattgaactatttggagcacaaatttaaaaagctaattttcattaataacggctacagctatttatcggatttagctacacttgaacagtgagagttggaaacactgtttgcaacactggacacgacagctcaccaaatattagctgctgtgattttgttttacaattttcgtttaaatttttacatttttgtttgcggaaagcgcgggtgcgagacaggtgcgccgtttccatgcaaaagtgcaaatcgtcagctgcaaaacagtcagaaaacggcacgccaagcgaaaacgagttcgacgtcttgttgtagttggattttccagccacttttcgacgagattgtgtgaaaaattccgtagcattcaatagtctcaaaatggtggataaattcatcagcatgtggaaagtgcgcgaattggcggacaaggtgtaagtgatcaggaatatataggatatatccatacgtatatgtaatgggatgtgtgtataacattcccttaacgccgaagtgaatgttaagactcccacgccccaagttttctgatttcccgccacgcccccaactcctcaaggatttcaaaagccctatgtcatgcataaatccctaataattcataaagatatcttacttatggatcaactgcatcggggtgctggattaggttcacgtttttaactgctttcaaggttgttcgccatttcaagagagctttaccaacacagccacattccgatattgatatccatgtgtatatgcgcctgtgtgtgtggggctttatcaagaaacaatttgtttgctttcgactgcccaaatataacaattttttcacctgtgttaacagctccacttccaggctttccagtgaaatgggtgtttctctttcccccatcgaattattaattatgggtgtcccctttcacctgcgccttttatggggtagttatttctaaaagcgagcctatagttcgaataaataatggtggctcgatagccaacaccgaactcattaggttaagtgcgcgggtacacctttcctagggcttatctcgaactgataaggaacacctagatggcccatttgcgacaattggcccacttccatcacgtttcgaacgtctatcaacgtcgcagccaagccatgcgtattacttatttatctgcatctttgcattgtatatccatatcgtcacacaacgtttacttaaaaataccagttctgattaactggccctctatctatttgattatctattcaattgagtttacggaatgtcccagtcaatatgccttttttctttacttaagtatatatcaattatttaaggaaacaagctcggattaagatttgtatttacatatgtacaaaagttctacgactaacatcgtgaatagttaatagttactttaaaataaaacaatgacttcgttcccacttgcagcaccaatgtcgtgatgaattacacggaaacggagggcaaggtgcgggaggccaccaacgatgatccttgggggcctacaggacccctcatgcaggaattggcctattccaccttctcatacgaaacattcccggaggtgatgtccatgctgtggaagcgcatgctgcaggacaataaaaccaactggcgacgcacgtacaaggtaacgttttcagtttaaactaataaatatagagctaacgagtatatatttacttacagagcctccttctgctaaactatttggtgcgaaacggctctgaacgggtggtaacctcctctcgggagcacatctacgatctgcgctcgctggagaactatacattcaccgacgagggcggcaaggatcagggtattaatgttaggcataaggtacgagagcttatagactttattcaggatgatgatcgtttgcgcgaggagcgcaaaaaggcgaagaagaacaaggacaagtacatcggcatgagcagcgacgccatgggcatgcgaagcggtggctacagcggctatagcggtggatctggaggaggcggcggtggcagcggtggctacaatgatggcgactatcgctctagtcgtggagacaattggtgtaagtaagaaatttttatttttttaagatttttgttcaaattctctatatgtaatattaatattgatgatttttcttcagactccgacaaaagcgccgacaaggatcggtatgaggatgatgatactcactacgatggagagcgagagggatccgatagcgactcacccagtccaaggcaagttttcacttttccgattaacctgctctatatcctaatgtactcttttctcctcacagacgtaactatcgatacaatgaccgtgcgagtcctgccgaagtagccagcgaggccaaaccttccagcctcaacatgaacattcgttcgaagaccgtcagttcccctgtctccaagcagcccacttcaacggcttctgccaagccagcgctgtcccagaagaagatcgatctgggtgcggcagcaaactttggaaagccagctcctggcggtgctgctggcattcactcaccaactcaccgtgacactcccaccagcgtggacttgatgggcggcgcttcgccatcgccgtctacttccaaggcaaacaataatacgcaaagcaataacaacgatctgctggacgatctgttcaagacctgctcgccaccgccggggcaggagaagacgctgaacagtgctgccgtgattgtggatgacgatgatgacttcaatccgcgtgccagcgatgctagccagcaggaattcggcgacttcgcctctgctttcgggcagccctcggcgggatcgacgatcagcgagccaccatcaacgggcctggttccggctgcgaacgatgagttcgccgactttgcggcgttccaaggctcgacaacgtcgacatctgcgctggacggtaatttgctgaagactgccacgccggcgaacgattcgtttgacctgtttaattcagctcccacctcgacggcagcagccacaacggctacagatctcctggcaggcctgggcgatctgtccattcaccaaagcatgcccatgggtgagttgtagtttgattcttgtagcttaacatattattaaatttgaaatagttttaagattagagtaattgcattggccttagtcacttcatgatatatttaggtatcgctgcatgaaggtgcgccttccgagcttgactagagccgttatctctacctcgagctccacagcccacacaaagatacactatctcatcctcccacatataaacggcaacattttccaatcggatgcactcgttctcttctcgttctctctcgtagctgttgaagagcagttggcatccagtaatgattcgatgtcgtcggcttccccacagccaccatctgaggcaatgcgtctagctttttccaaggcacagaagcagctgcgcgatttaatgcaggtccagagcgcttcagccgttgcccaagtagcagctattttgggggaactgcataactcaaacgcactgcccggatttaccacacctgagcagttggttggcctcgatcgtcagacgtgcgactggacctgtcttgcccatggagagtatgccgcattgctgaatcaattgacagagctattcagccaggattggccagagccatcgcaggatgttgaagtcgttaacatttttaaactggatcacagctttgattatgtatcggttgcctttgagtcgcttcagactagattggataagtttcccagtactattagttccttactggaaaacatggttaaggatgagagcctaatttctatcgccttgctgcacatctcccgccagagagcttccttaatgcagcgctttgcgcggaccatcaaagttatgccggaaagaaaagtggaggagctggatgcccaggtgaaagcgttctttcaattgctaatcagtctgccagcccaggtggccaatcgactgggtagaagactgccagagacgtttgctccagtttcttatcagaaactcctgctgcgccagtggctgaaatccttgcactttgtcctacagtgcgatgataatagggaatactttgatttggaaccgtactcctggcttttgtcacaggctattaaccttatttacgatgtttcaactttggaaagcctcctacgagtacttaaggactacgcggtggctcccagaggaagaaaagtagttcataccatattaaaagaattggatcccgctgcttgcctaaaaacagcacaatcggctctttctgcgggattgaacctgtacgttcttataggtgctgccactttggagacacctcattggaagcattgcctgctccagaagttgcctcttcaacgcacacccgtggataataagcagcttataacattggccagttatcttaacgccgtagctcctgctcaactgcaggttcttttgaatcagttgcttggaatctggtcgaagcgcatttccttgcagaaactgggcagccaagagcacttggctatatccaaattgcttgtgttggcggcaaaatgcctttgtgggaatcttgtaatggatttgaacatccagcgtcagctccacgatggactcagcaaccatttgcagtccccagatgcactgcagcgtcatgtgggaatgaagaccgtggagctaattttcaattttattgccttgcctgatgcgaaggaggatgatcgtctacgatttgagtacgattcatttaaggatacatttcattggcacatcttcgaagagtttgatgaacttggccagtttgaaagcccgagcaaaactaagctagatgagaagccttgtgaggatcagctgaaacaattagaacttcatctcagtgactttatgagtactacagagcagaaagagccgcataagccgaatattgaaatacaagcgaatcccgctcccgaaaatcagaatgtaaacatgcagctggactcggatgacgacgagccactggatgaagacgacgatgaattgaaaccctatgacatgtccaacgatacaaccaccaccattgatcaacgtcccaaattcgtcatcgacttactgcacttgctccgagaaaaggtggagaattatcaggtgttcgaaggagccttgggcacagcggagcaacttatacggggtcagctggccaaacatgatactcagttggccttggatctgctacaacttttcttggtcatggaaatgcagttctactatgagcaattcgaacgtacgcaatttaagtgttgcgtggccatttgtgtggctcatcctggtccctgtgccgagtacctatgccgccagttccacacggataactccttctattcggccagtgtccgtattctgatccttcaggtactggcagcaacggcgaaagaactttctggcgatgaaaacatgcagaatgagatggaaattgtggatgttataccaccggcagccaagcatccccgaaagttcgaatttcaacaggaggaggagagtccggccgctcgtctggccgctgcgcaaaggatcatccgcgaccggctgcgggccaagacgaagagatatttcagcaagcccaaagctggagatcaaatggagaaggccaacccatttcaccccgttgccggtacatttttcttcagtttggtgaggggacagcgcacccgtcagatgctttacgtaaaatacgaaaatatttctcacgacatcgacacccagttgcttgttaacctgctaaacaccatgtccgtgttggttatgtgctcccagaactgtccactgttgccagcgatgacccgcgagatctttgacctatgcgcctttgtgcgtttcaatgccgaggcccgcgtccgagcggccacattgcagctaataggaatcgccttggtaaccacaccagctcatgtgctggcccagcactttgcggagtcattgaacgaactgcagcgctggctgaatgacttcataagatcgccattggtgggcggagagacttcggaggagtgtcgtgaactggcccaaagcattttggacacctgctacaaactctttgatacagccgccatggaacaggctgcctaacttggccatcaaaaagttttgaaagcagcctatagagttttaagagatttaaaatattaaaactgtatttaaaatacactaagcatatttcttgttacggaaaaacgaacaattttttactgaaatatttccgaattaatatatgatatatatgattaaatacaagattacttcatactttacatcaattctcatacaaacgttaacgctgtgtccttaaacattttcttataattgtataaactaataatagactcgagagttaggtatttgctagaaataagacaacagttctaggaattattttttaaatatctatcgccctcgaagccattgtattccaggtatacatatatggatttacttcatttatactactttcttttgtttatttgtttttctcctactgcatatttgtattgcaaaccacacacacattggatccaatattatttctcaaatatatacatacatatgtacttaataatgatgaattgaaaagcatttctcaatattccgggcattgtgcggcctccgcagccacggactcattaggtaaaccaatccaaaacggcaatagccacataacagatacgaacctattctttccttctgtaattgcacttgatttgctgcgcaaacgcttccgagtagtgaccacctcattagccgatcaccaagtagccgcattcgcaattctatcgaagccacatatttaaaacagctttttgtgaaaccaaaataaaaacgaaaactgaaaccccgaataacattattattgcatttgtttttttccagacaatatgatgcctcccattcccgccgtcacgggcaataatctgctccagcccatgtcggtgaccaataataacaataataccaacggaggcgcagtccccgccgctgccagtgtccagtctaccgctgtgggcgccacctggtcgggcgacctgaagggcggcaagatgaacattgacctggacaatctgctgatgagcaa

SEQ ID NO: 32864 - DNA, 4439 bp, DROSOPHILA
gacacgacagctcaccaaatattagctgctgtgattttgttttacaattttcgtttaaatttttacatttttgtttgcggaaagcgcgggtgcgagacaggtgcgccgtttccatgcaaaagtgcaaatcgtcagctgcaaaacagtcagaaaacggcacgccaagcgaaaacgagttcgacgtcttgttgtagttggattttccagccacttttcgacgagattgtgtgaaaaattccgtagcattcaatagtctcaaaatggtggataaattcatcagcatgtggaaagtgcgcgaattggcggacaaggtcaccaatgtcgtgatgaattacacggaaacggagggcaaggtgcgggaggccaccaacgatgatccttgggggcctacaggacccctcatgcaggaattggcctattccaccttctcatacgaaacattcccggaggtgatgtccatgctgtggaagcgcatgctgcaggacaataaaaccaactggcgacgcacgtacaagagcctccttctgctaaactatttggtgcgaaacggctctgaacgggtggtaacctcctctcgggagcacatctacgatctgcgctcgctggagaactatacattcaccgacgagggcggcaaggatcagggtattaatgttaggcataaggtacgagagcttatagactttattcaggatgatgatcgtttgcgcgaggagcgcaaaaaggcgaagaagaacaaggacaagtacatcggcatgagcagcgacgccatgggcatgcgaagcggtggctacagcggctatagcggtggatctggaggaggcggcggtggcagcggtggctacaatgatggcgactatcgctctagtcgtggagacaattggtactccgacaaaagcgccgacaaggatcgacgtaactatcgatacaatgaccgtgcgagtcctgccgaagtagccagcgaggccaaaccttccagcctcaacatgaacattcgttcgaagaccgtcagttcccctgtctccaagcagcccacttcaacggcttctgccaagccagcgctgtcccagaagaagatcgatctgggtgcggcagcaaactttggaaagccagctcctggcggtgctgctggcattcactcaccaactcaccgtgacactcccaccagcgtggacttgatgggcggcgcttcgccatcgccgtctacttccaaggcaaacaataatacgcaaagcaataacaacgatctgctggacgatctgttcaagacctgctcgccaccgccggggcaggagaagacgctgaacagtgctgccgtgattgtggatgacgatgatgacttcaatccgcgtgccagcgatgctagccagcaggaattcggcgacttcgcctctgctttcgggcagccctcggcgggatcgacgatcagcgagccaccatcaacgggcctggttccggctgcgaacgatgagttcgccgactttgcggcgttccaaggctcgacaacgtcgacatctgcgctggacggtaatttgctgaagactgccacgccggcgaacgattcgtttgacctgtttaattcagctcccacctcgacggcagcagccacaacggctacagatctcctggcaggcctgggcgatctgtccattcaccaaagcatgcccatggctgttgaagagcagttggcatccagtaatgattcgatgtcgtcggcttccccacagccaccatctgaggcaatgcgtctagctttttccaaggcacagaagcagctgcgcgatttaatgcaggtccagagcgcttcagccgttgcccaagtagcagctattttgggggaactgcataactcaaacgcactgcccggatttaccacacctgagcagttggttggcctcgatcgtcagacgtgcgactggacctgtcttgcccatggagagtatgccgcattgctgaatcaattgacagagctattcagccaggattggccagagccatcgcaggatgttgaagtcgttaacatttttaaactggatcacagctttgattatgtatcggttgcctttgagtcgcttcagactagattggataagtttcccagtactattagttccttactggaaaacatggttaaggatgagagcctaatttctatcgccttgctgcacatctcccgccagagagcttccttaatgcagcgctttgcgcggaccatcaaagttatgccggaaagaaaagtggaggagctggatgcccaggtgaaagcgttctttcaattgctaatcagtctgccagcccaggtggccaatcgactgggtagaagactgccagagacgtttgctccagtttcttatcagaaactcctgctgcgccagtggctgaaatccttgcactttgtcctacagtgcgatgataatagggaatactttgatttggaaccgtactcctggcttttgtcacaggctattaaccttatttacgatgtttcaactttggaaagcctcctacgagtacttaaggactacgcggtggctcccagaggaagaaaagtagttcataccatattaaaagaattggatcccgctgcttgcctaaaaacagcacaatcggctctttctgcgggattgaacctgtacgttcttataggtgctgccactttggagacacctcattggaagcattgcctgctccagaagttgcctcttcaacgcacacccgtggataataagcagcttataacattggccagttatcttaacgccgtagctcctgctcaactgcaggttcttttgaatcagttgcttggaatctggtcgaagcgcatttccttgcagaaactgggcagccaagagcacttggctatatccaaattgcttgtgttggcggcaaaatgcctttgtgggaatcttgtaatggatttgaacatccagcgtcagctccacgatggactcagcaaccatttgcagtccccagatgcactgcagcgtcatgtgggaatgaagaccgtggagctaattttcaattttattgccttgcctgatgcgaaggaggatgatcgtctacgatttgagtacgattcatttaaggatacatttcattggcacatcttcgaagagtttgatgaacttggccagtttgaaagcccgagcaaaactaagctagatgagaagccttgtgaggatcagctgaaacaattagaacttcatctcagtgactttatgagtactacagagcagaaagagccgcataagccgaatattgaaatacaagcgaatcccgctcccgaaaatcagaatgtaaacatgcagctggactcggatgacgacgagccactggatgaagacgacgatgaattgaaaccctatgacatgtccaacgatacaaccaccaccattgatcaacgtcccaaattcgtcatcgacttactgcacttgctccgagaaaaggtggagaattatcaggtgttcgaaggagccttgggcacagcggagcaacttatacggggtcagctggccaaacatgatactcagttggccttggatctgctacaacttttcttggtcatggaaatgcagttctactatgagcaattcgaacgtacgcaatttaagtgttgcgtggccatttgtgtggctcatcctggtccctgtgccgagtacctatgccgccagttccacacggataactccttctattcggccagtgtccgtattctgatccttcaggtactggcagcaacggcgaaagaactttctggcgatgaaaacatgcagaatgagatggaaattgtggatgttataccaccggcagccaagcatccccgaaagttcgaatttcaacaggaggaggagagtccggccgctcgtctggccgctgcgcaaaggatcatccgcgaccggctgcgggccaagacgaagagatatttcagcaagcccaaagctggagatcaaatggagaaggccaacccatttcaccccgttgccggtacatttttcttcagtttggtgaggggacagcgcacccgtcagatgctttacgtaaaatacgaaaatatttctcacgacatcgacacccagttgcttgttaacctgctaaacaccatgtccgtgttggttatgtgctcccagaactgtccactgttgccagcgatgacccgcgagatctttgacctatgcgcctttgtgcgtttcaatgccgaggcccgcgtccgagcggccacattgcagctaataggaatcgccttggtaaccacaccagctcatgtgctggcccagcactttgcggagtcattgaacgaactgcagcgctggctgaatgacttcataagatcgccattggtgggcggagagacttcggaggagtgtcgtgaactggcccaaagcattttggacacctgctacaaactctttgatacagccgccatggaacaggctgcctaa

SEQ ID NO: 32865 - protein, 1370 aa, DROSOPHILA
MNYTETEGKVREATNDDPWGPTGPLMQELAYSTFSYETFPEVMSMLWKRMLQDNKTNWRRTYKSLLLLNYLVRNGSERVVTSSREHIYDLRSLENYTFTDEGGKDQGINVRHKVRELIDFIQDDDRLREERKKAKKNKDKYIGMSSDAMGMRSGGYSGYSGGSGGGGGGSGGYNDGDYRSSRGDNWYSDKSADKDRRNYRYNDRASPAEVASEAKPSSLNMNIRSKTVSSPVSKQPTSTASAKPALSQKKIDLGAAANFGKPAPGGAAGIHSPTHRDTPTSVDLMGGASPSPSTSKANNNTQSNNNDLLDDLFKTCSPPPGQEKTLNSAAVIVDDDDDFNPRASDASQQEFGDFASAFGQPSAGSTISEPPSTGLVPAANDEFADFAAFQGSTTSTSALDGNLLKTATPANDSFDLFNSAPTSTAAATTATDLLAGLGDLSIHQSMPMAVEEQLASSNDSMSSASPQPPSEAMRLAFSKAQKQLRDLMQVQSASAVAQVAAILGELHNSNALPGFTTPEQLVGLDRQTCDWTCLAHGEYAALLNQLTELFSQDWPEPSQDVEVVNIFKLDHSFDYVSVAFESLQTRLDKFPSTISSLLENMVKDESLISIALLHISRQRASLMQRFARTIKVMPERKVEELDAQVKAFFQLLISLPAQVANRLGRRLPETFAPVSYQKLLLRQWLKSLHFVLQCDDNREYFDLEPYSWLLSQAINLIYDVSTLESLLRVLKDYAVAPRGRKVVHTILKELDPAACLKTAQSALSAGLNLYVLIGAATLETPHWKHCLLQKLPLQRTPVDNKQLITLASYLNAVAPAQLQVLLNQLLGIWSKRISLQKLGSQEHLAISKLLVLAAKCLCGNLVMDLNIQRQLHDGLSNHLQSPDALQRHVGMKTVELIFNFIALPDAKEDDRLRFEYDSFKDTFHWHIFEEFDELGQFESPSKTKLDEKPCEDQLKQLELHLSDFMSTTEQKEPHKPNIEIQANPAPENQNVNMQLDSDDDEPLDEDDDELKPYDMSNDTTTTIDQRPKFVIDLLHLLREKVENYQVFEGALGTAEQLIRGQLAKHDTQLALDLLQLFLVMEMQFYYEQFERTQFKCCVAICVAHPGPCAEYLCRQFHTDNSFYSASVRILILQVLAATAKELSGDENMQNEMEIVDVIPPAAKHPRKFEFQQEEESPAARLAAAQRIIRDRLRAKTKRYFSKPKAGDQMEKANPFHPVAGTFFFSLVRGQRTRQMLYVKYENISHDIDTQLLVNLLNTMSVLVMCSQNCPLLPAMTREIFDLCAFVRFNAEARVRAATLQLIGIALVTTPAHVLAQHFAESLNELQRWLNDFIRSPLVGGETSEECRELAQSILDTCYKLFDTAAMEQAA

SEQ ID NO: 32866 - DNA, 4486 bp, DROSOPHILA
aataaaaacaaaagaaaaactctacaattgctgtgaatttcgttgtttggtaagcgaatttgttaagcggcttttgaatggaacccaccttaaaaatgaaatcgcaaaacctttcaattggatcgcatttcctatgagccgaattgacaaaaccccgcgatttgggtcaaaatcaagcaaaagaaatctctaaaagctgagaggggccattaaatttgatgatatctgttcggatcatgatataagagttaagcatcattattaagtcggcttccgcttcggtagcatcatcggtagctaaaaaatcgtcttcacgtgtgttccgaccatctgtccaatccatttagtaaaagtaattactgtcaccgttgtctttgcgcatgccaaatgctacgagttgtgcaataaataataataaataataaggcgctgaaaaatggtcaatcgaactgggaagacttcgaaatcggggcaattagaaaaaatttatgggaatgcaaatttgtaaatagcaattggagttgaagagctcattagatgattgggtgctttcactcatgcaaattcattgcgaatgcgtgagaaaaattaagtacagctgaaattctttatgtggaacaacttgtgcaaagctgagtcagtttcatattatattaatgtatctataaaagttctctgttttattttaggaaggtttaaaatatttggtataacatataaaaattgtataattctttaaatatctgtaattaaagtgagtaccaccactgtactgtaattccaaaaaattggagcttcaacggctttccggcctacaacccgttgccacaacagggcgcctagcagcggctgtggagctattgaacaaacttgtgccccccatccgtggccatcctcatttggccatatctcagcaggcagttttcagcctcatttcggaattaactgaactacaaactattattctccaacaatcgacaaatatattttgggtggcaagatgagcgcggaggagcgtgctcgggagtatgtgtgcaatgtgcaactgcatgtggagcccagcgaacgacccaagttgccaccagggtgtccccctcctctggattcccggagtactgaatcggagccgcagcactcggaagaatgctgcgttgagctggaaaatgtgacggtgaagttccggctatcggattccgaaatcctggcccaagtttatcccaactgtatgcttttgggcgagataaaacaggatcttgctcgcaagtttgaagtggcaccggaatggctcgtcctccgacaggataatcgcattctgtgcaactccgtgcctttgaactccactgccctagatgagttcggcattcatgagttccaactggagatgaataaggagggtagagaggatcagacctccaagctagatctggatgtgtactatgagtaggtgaagcgaatagcattattaaaccaatattacacgtaaccttttatcagcaaacaccgtctggccgactttatcactgtccacatctctggtgatgacacccaggatggccagtccaaaaccgtggtcgtagagatcgagaatgcagcgatagtcaagccattcctctgcggctatagggatcaaaaaacgggcaaagagtacttggacgcatttacccaaactggaccgtactttgacaagatgaagtacaggaagtacaagaccagggatacccagacatgggagcaaaaggaaaagactctggtatgttcaagcaacttcgatttatgtatattgcgatcaattataccaaaattcttttcagaacacagcccatgagcaatcggtgcaatgccatctggatggtattaatatactatatgtttccgccgccaatgactttaccatagttcctggcaagtaccagacttttgcccagaaggagcgagcagagcggaagctcgaaaagattttgctcatccagcgaaactggaggcgctggattttgtggaaatatattcacctgcgggcgcaagagtatcggtaggtggactatattcaatttaaattatgaaacttaaatatcttatcttataaacccctaccagtcgcctggtgcagaatcgcgagcacgaggatgagcggtatgagaagtgcgtggaacagcgcatggagcgacaccgggtgatcaagcaattcccacgcaacaaggatgacttcgatctgctatatgctgaggtggctcgttggaaaaaggcggagctaaagcgtattaccgccaactatgaggggcctgctcgcattgccgaggtgaacatcctgctggacaaggagattcagctgcttaatggcgtggagcggcagcgtaatctcgtctacaaggccatggaggattttcgcaaagatcagctgctaaaggagatgggcaaaccgatcgagtgggttggctacaaggactccaaaatccacatggatctgttgagcacacagcgagttcgcttcctcaccgagatctacaaagatctgcgaaagccgcgcagcaaggaggaccgcttagacttcatccgacaagtcatggcagtgctcaccgaggagacttgcttcccacattttcccgaactctttgatctctttgatcgcgaaaagaatcttttgctctatgccaagtcctttgacgtggaaatcttgcgcaaacgccagacaatgctctttttcgatctcataaagttccaaaagggcgagcccaaacaaagtaagtgttgaacatacgtatatatctatttattgtattaatctttgggaattgtgatttttagggattccatcgcgcatgtgcattgtatgcaaaaaggtcaagacctatgccgagtttgccattcggacacgtcagagccatgtggacacctgcaagcactgttactatctaaaggtgggttattccttattccacattttaaatattataatcgaaaatattttcatacatacacatagctaactgctactgagaacaccgtgtaccagtccattctacggtgcatccatcgagatgagcggaaacgcaagtgcaccacatcctttgcatttgtaatgcagccagatgatgttcgccacatcatagacaaaatatggcatggacattcggctctaagcaagacagagaatctcagtgaactaaggtaaccccttcacaatgaagtgtttaaaaatcaaacgtcaaatatatctatttcagattaccgcgttggaacaagagcgatgactgggcaccgtggaactgtatttgcctgacggaacgggagacgcgagatcactacaagatcgatgacattgagaaggtgtatgatcccaagttcgttctgcacatcggtaatcttcacatgctggctcgcagcctattccacaccttagctgctgtggccaccgagttccaggaaacgggccaatggtggaaagtgggcatgaacaagcaacgttccagtaaactggatgccgtctaaactatgtggttaaaatgactcccagtaactcacctttcgaaatttgggtttagcttgtaattcagcgcctaatttaacatttacaaaattttaacaattcaaatattgatcaatcattacaagaaaaattaaataaactataactgcaattatttgctacttgcaatcgccttgaactttgactccaaatactgaacgcgtttcagtagtttgtcactggtgctgaactcattatagggcacgggaataacgtggtaaccactcttctctagcagatcaaatgtcagattcgtaacgccgctgccactgcgatgcgttccgtggcaaatgtcatggaaatcgatgaccatcagcgccaccctgaaatcaagtttcattcattataatcaagttaatttataaaacgtgtaataacttgccttattgcattcggattttccttgtccaaaggcagggggtttttgttagcatcaaaatggcacagtgcatctgaaacgacagttaatcaggaatatggtacacattaacaaggaatatcttacctataaggaagcccattttagtgtctacagcagtttgtaaatgattgctggccggcagcagacttttcagggcatctagcattccatttacaagcacttgctttgctttaggatgagccatgggcacctgatagacaggactgtcagtgggcaatagtggacccttgtaatctgtggctattaactgggcatagctattcaagttgagtagcctcattttggaggtagctgtgacaccagctttgtcctttttcaacgtctctaggaagtccgcactgaaagtaattacaaatttaagttttaattccagattttcaagcgtttcaaagaacaaacctcaaaacagaagccaagtggccgtgttctactagacccaacattgttagcgaccacacaaagctcaaccactcggattgcttggtaaaatcctcgcggacaatagactttactagcttttt

SEQ ID NO: 32867 - DNA, 2121 bp, DROSOPHILA
atgagcgcggaggagcgtgctcgggagtatgtgtgcaatgtgcaactgcatgtggagcccagcgaacgacccaagttgccaccagggtgtccccctcctctggattcccggagtactgaatcggagccgcagcactcggaagaatgctgcgttgagctggaaaatgtgacggtgaagttccggctatcggattccgaaatcctggcccaagtttatcccaactgtatgcttttgggcgagataaaacaggatcttgctcgcaagtttgaagtggcaccggaatggctcgtcctccgacaggataatcgcattctgtgcaactccgtgcctttgaactccactgccctagatgagttcggcattcatgagttccaactggagatgaataaggagggtagagaggatcagacctccaagctagatctggatgtgtactatgacaaacaccgtctggccgactttatcactgtccacatctctggtgatgacacccaggatggccagtccaaaaccgtggtcgtagagatcgagaatgcagcgatagtcaagccattcctctgcggctatagggatcaaaaaacgggcaaagagtacttggacgcatttacccaaactggaccgtactttgacaagatgaagtacaggaagtacaagaccagggatacccagacatgggagcaaaaggaaaagactctgaacacagcccatgagcaatcggtgcaatgccatctggatggtattaatatactatatgtttccgccgccaatgactttaccatagttcctggcaagtaccagacttttgcccagaaggagcgagcagagcggaagctcgaaaagattttgctcatccagcgaaactggaggcgctggattttgtggaaatatattcacctgcgggcgcaagagtatcgtcgcctggtgcagaatcgcgagcacgaggatgagcggtatgagaagtgcgtggaacagcgcatggagcgacaccgggtgatcaagcaattcccacgcaacaaggatgacttcgatctgctatatgctgaggtggctcgttggaaaaaggcggagctaaagcgtattaccgccaactatgaggggcctgctcgcattgccgaggtgaacatcctgctggacaaggagattcagctgcttaatggcgtggagcggcagcgtaatctcgtctacaaggccatggaggattttcgcaaagatcagctgctaaaggagatgggcaaaccgatcgagtgggttggctacaaggactccaaaatccacatggatctgttgagcacacagcgagttcgcttcctcaccgagatctacaaagatctgcgaaagccgcgcagcaaggaggaccgcttagacttcatccgacaagtcatggcagtgctcaccgaggagacttgcttcccacattttcccgaactctttgatctctttgatcgcgaaaagaatcttttgctctatgccaagtcctttgacgtggaaatcttgcgcaaacgccagacaatgctctttttcgatctcataaagttccaaaagggcgagcccaaacaaaggattccatcgcgcatgtgcattgtatgcaaaaaggtcaagacctatgccgagtttgccattcggacacgtcagagccatgtggacacctgcaagcactgttactatctaaagctaactgctactgagaacaccgtgtaccagtccattctacggtgcatccatcgagatgagcggaaacgcaagtgcaccacatcctttgcatttgtaatgcagccagatgatgttcgccacatcatagacaaaatatggcatggacattcggctctaagcaagacagagaatctcagtgaactaagattaccgcgttggaacaagagcgatgactgggcaccgtggaactgtatttgcctgacggaacgggagacgcgagatcactacaagatcgatgacattgagaaggtgtatgatcccaagttcgttctgcacatcggtaatcttcacatgctggctcgcagcctattccacaccttagctgctgtggccaccgagttccaggaaacgggccaatggtggaaagtgggcatgaacaagcaacgttccagtaaactggatgccgtctaa

SEQ ID NO: 32868 - protein, 706 aa, DROSOPHILA
MSAEERAREYVCNVQLHVEPSERPKLPPGCPPPLDSRSTESEPQHSEECCVELENVTVKFRLSDSEILAQVYPNCMLLGEIKQDLARKFEVAPEWLVLRQDNRILCNSVPLNSTALDEFGIHEFQLEMNKEGREDQTSKLDLDVYYDKHRLADFITVHISGDDTQDGQSKTVVVEIENAAIVKPFLCGYRDQKTGKEYLDAFTQTGPYFDKMKYRKYKTRDTQTWEQKEKTLNTAHEQSVQCHLDGINILYVSAANDFTIVPGKYQTFAQKERAERKLEKILLIQRNWRRWILWKYIHLRAQEYRRLVQNREHEDERYEKCVEQRMERHRVIKQFPRNKDDFDLLYAEVARWKKAELKRITANYEGPARIAEVNILLDKEIQLLNGVERQRNLVYKAMEDFRKDQLLKEMGKPIEWVGYKDSKIHMDLLSTQRVRFLTEIYKDLRKPRSKEDRLDFIRQVMAVLTEETCFPHFPELFDLFDREKNLLLYAKSFDVEILRKRQTMLFFDLIKFQKGEPKQRIPSRMCIVCKKVKTYAEFAIRTRQSHVDTCKHCYYLKLTATENTVYQSILRCIHRDERKRKCTTSFAFVMQPDDVRHIIDKIWHGHSALSKTENLSELRLPRWNKSDDWAPWNCICLTERETRDHYKIDDIEKVYDPKFVLHIGNLHMLARSLFHTLAAVATEFQETGQWWKVGMNKQRSSKLDAV

SEQ ID NO: 32869 - DNA, 2570 bp, DROSOPHILA
tatcacagtgatccctgagcaccccaatcatacatatattatatatcatgcggggcttgtgatcagcaaaccaaaaaaattcccaactttctgcaatttgtcttaggcgcatatttttagtcgggaattctgccagacgcaagaactagacaaatgtctttatcggaaaaacataaacctgatgggatttgcctagcctacaacctgttgaaacggtgggcgaaacgcagacgcccctggttagccccaaaaaccgtgttatccacttcgatcccaagtttttcggttgttgcgccgatcaattcattttttttttactggctcattaatcactgatgcgttgaaatctgcgccgcggatggcgctcgactcgctcattagcgtaattgctctgccggcgtcgctttgattagcgtgcattaaatgctttcatttaaatcaaatcgaaacgaaaattatctctggcatgtgagtgtttcggttttcatgtgtacacacatgtggcgaacgtgagaaacttacaatgtaaaggcgaaacattttgcgctttgatgcgcacagacaatttatttgttatttaattattcggctttggcatgtgacttgcagaaaatcgcattggttgccattattactataatgatagtgatcgcgagcacttcgagttcgccacttcggttgccaccccatcgatcaaaaccttgaacaatcggacaacccgtcaagtggggcgtgggtggcactcagcactttcattgcccgtcgccttgacattctcccacctctcacaaatatttacccggctaactggccttttgtactattatttataattcaattttgtagttttaaaaatattccactttggatatttttttaattttccaatttaatctgaactttttgtgggaaaaccactgctctttgataagccaattttaataattattttaaaatatttttttatccggcttcatcaacctttgtgctcattttcagaatgtcgccgttgcttccactggcatcgctaatcatcttggccaatttggtggcatctcgaccctattcctatggtccacgggcagaagcgcctcccacgagattggccaaccggattgtggtgcagtcaccctcgctggacaacttgtatatggactacgtggtcacatcgaagccgctgaatctgcgcaagtacaacaagaacggcagtaagacgaaaaaaacgaaaaaggattcgaaaatatattacatacccgtacccccactgcccttccgccacatacctggcatcggcttggattatcagccgatgaaaatcaatcccatccttcacgagtcggagagcacaacgagaaagaccacaacggttcgcccaccgacgacgacgacatctagccccaatctggatcatcggaatccgagcaaagtacttcgagtgcaacacctcaaggattactacttcaatgggcgcccacatcgactgcaggttgcccatgctgataaaaagtccggtctgacggcccttaacctgaagtccaacttttattataacaaaaacattatttattagtactgttagttagaaaataataaaaacaaaagaaaaactctacaattgctgtgaatttcgttgtttggtaagcgaatttgttaagcggcttttgaatggaacccaccttaaaaatgaaatcgcaaaacctttcaattggatcgcatttcctatgagccgaattgacaaaaccccgcgatttgggtcaaaatcaagcaaaagaaatctctaaaagctgagaggggccattaaatttgatgatatctgttcggatcatgatataagagttaagcatcattattaagtcggcttccgcttcggtagcatcatcggtagctaaaaaatcgtcttcacgtgtgttccgaccatctgtccaatccatttagtaaaagtaattactgtcaccgttgtctttgcgcatgccaaatgctacgagttgtgcaataaataataataaataataaggcgctgaaaaatggtcaatcgaactgggaagacttcgaaatcggggcaattagaaaaaatttatgggaatgcaaatttgtaaatagcaattggagttgaagagctcattagatgattgggtgctttcactcatgcaaattcattgcgaatgcgtgagaaaaattaagtacagctgaaattctttatgtggaacaacttgtgcaaagctgagtcagtttcatattatattaatgtatctataaaagttctctgttttattttaggaaggtttaaaatatttggtataacatataaaaattgtataattctttaaatatctgtaattaaagtgagtaccaccactgtactgtaattccaaaaaattggagcttcaacggctttccggcctacaacccgttgccacaacagggcgcctagcagcggctgtggagctattgaacaaacttgtgccccccatccgtggccatcctcatttggccatatctcagcaggcagttttcagcctcatttcggaattaactgaactacaaactattattctccaacaatcgacaaa

SEQ ID NO: 32870 - DNA, 570 bp, DROSOPHILA
atgtcgccgttgcttccactggcatcgctaatcatcttggccaatttggtggcatctcgaccctattcctatggtccacgggcagaagcgcctcccacgagattggccaaccggattgtggtgcagtcaccctcgctggacaacttgtatatggactacgtggtcacatcgaagccgctgaatctgcgcaagtacaacaagaacggcagtaagacgaaaaaaacgaaaaaggattcgaaaatatattacatacccgtacccccactgcccttccgccacatacctggcatcggcttggattatcagccgatgaaaatcaatcccatccttcacgagtcggagagcacaacgagaaagaccacaacggttcgcccaccgacgacgacgacatctagccccaatctggatcatcggaatccgagcaaagtacttcgagtgcaacacctcaaggattactacttcaatgggcgcccacatcgactgcaggttgcccatgctgataaaaagtccggtctgacggcccttaacctgaagtccaacttttattataacaaaaacattatttattag

SEQ ID NO: 32871 - protein, 189 aa, DROSOPHILA
MSPLLPLASLIILANLVASRPYSYGPRAEAPPTRLANRIVVQSPSLDNLYMDYVVTSKPLNLRKYNKNGSKTKKTKKDSKIYYIPVPPLPFRHIPGIGLDYQPMKINPILHESESTTRKTTTVRPPTTTTSSPNLDHRNPSKVLRVQHLKDYYFNGRPHRLQVAHADKKSGLTALNLKSNFYYNKNIIY

SEQ ID NO: 32872 - DNA, 3029 bp, DROSOPHILA
gttgaactgcgcctatgtgcccattaaggaggattggcggctgtgcgaaaggcactacggaaatctgactggttgccggaaacgagtggtagccgatcgctatggggaggagcaggttcaggcctggcgacgtggatacgactgcgtaccgccgcccatcgatgagaagaaccgctacttctacaccatttgcagcaatcccatattcgatgatgttcctcgcggtgagttccccctcgcggaatcccttcacatgtgcgtcgatcgagtgaaacccgtgtggaaggaggtcaggcgggaagtgttccaaggcacccgggtactaatgtgcgtccacggaactgtggcccgtgctctcgtccagcacattgagggtaagttagataggcttagcaatagcttatggtttacatcgatggtcactccgtaggaatctccaacgaggccatcgaaaaggttaacattccaaattgcgtgccacgcgtctatgagttcgatttgaaaacgggaggcttggttggagctgccatcaatctgggggatcaggagtatattaggcggaagacagcccaggtggcagccattggtgactgattgtggagcactcctctcgacttttttggaatttacatcgatatgtggccgactgcatttacttaagcctttgccgcttaaagtccgagaacatcggctgataaggatattatgactactatttattggtctacaccatctgatattttcggccaaaaatatacaatttatacaaaatataattgatggagaagattacatatacgtacataaatataataaaaataagctatttcgttgtatgacgtcaaattggatgctacaccaaaaaaaaaaaaacattttttccaagtgtatagtttattaaattgtttttctcaagcttcgttacgatcgaaaagacgatctagtaaatgcattatgtaatactttcagttgttgccacagccatttgcctgaagtgcaattagtagtagctctgctcgttgtagagcggacccaagttgtttggcaggatgtatatgtcctcgggacgaccgttgaacacgaacggacgcttcagcgatgtcagcttggagtcctgctgaggaaccggcatggaggcgagtccaaagctctgctgagagcctccataaccacccatcgaaggcgacgacatgggtctgtagggattactaggcgtcggtggccgcattccatatccaccgccacccaagccaggtgtcagggatcccatcgcctcacccggagatccgttcacttggtagactccagtgggctttccgttggccaggaagttcacgggcaaattgaataccgaaccgtaggcggagaatgagggcatgggctggtaggtcagcagtggtgagaatccacccccaaatggagccgttggcatattgggcaaaaacatatacggtgtgggcggcagtcttacgtagtagatgggcgaattgcgggctgatgacgcgtgattggccccaggacgccgaccaccggaggctcgtgacatcaccacatcctcgagatcgttgctggcgccagaaaaggcgggatagaacatatccggagccaggtagagtgggacgggtatgagcactggctgggcatagccaatgaagggaagcatcttgggcatggcatcgtaaggattgccctgaggtgcggcatatggactccagggatagttggcagagttgggcaatcgcgactcctgtttcgactcctgcatcatctggtagggatcgtgttcctcctcgtcctccgactttagatcctgctgctcgcccaatgtgtcttggacatactgctgcgtgtggatctgctgtccctgcgactgttgttgtcccacctgcagtcctggctgcgaggattgcaactgcttctgttggctctgcttcttcaccagctgggctagattggctgccacagagtcggccactagttgctccagcaccagcagcattagtatgatgctccacatgtggttacccatttgatagctgtaattggatcatggcattggcggtgagtatatcttctgtcgatccccgactgaccccaagccccattcaagctgatttgcatgcttcgagctagtttctcacactccaattgcgcaaccagcggattttcccccaccagcacaagtgaacaacggaaaaaatatggccagtactttggagccccatcgccggccgagatcggagcaaaaagtataccccgaagtgtgcagtatccccaagctaataattcataattaaataaagtaggcacttttggtttactaatatctacttattaaattgtattctactctgaagtaaagccgctgtttttccatttctttgcttagtatgtgttcgcattcaaaaatttttaatttttttcaccttttgatcggcaattttaaacaattacccttaattttatgtttgatgttttcacactttttccacaaacactttatgtacaaaaatttacctggtcagtaagtgaagatcggtgatttcttaatttagcagaagagtcctaatcgaaatgctaacgaatcaattggcccactggtcggcaggcgcgttcaactggaaatgagtgtgatcgcggccagaatcgacgctttatatatgggggcctggccagaatccccgcattcccggttcccaactctctgccgacggcgccgtcgacgggagctgcgcatgcgcagcattgaagaagcgaagtgaagtggttaagtgtgtggtaagcagagtgtttgggccataagtttgtttgcatttgcttggcctttctcagcgatctaagggcatgattttgaggttctgtggcaagtgataaatcgtctaattgccagcggcttaaacgccggcttaattagccccgactgtgaataaacctgacagctgcaaattatataaatatccacatgcacttgctgcattttgctagccagcttggtggaatcgcgagcaatgttaattataccggcaaaa

SEQ ID NO: 32873 - DNA, 1029 bp, DROSOPHILA
atgggtaaccacatgtggagcatcatactaatgctgctggtgctggagcaactagtggccgactctgtggcagccaatctagcccagctggtgaagaagcagagccaacagaagcagttgcaatcctcgcagccaggactgcaggtgggacaacaacagtcgcagggacagcagatccacacgcagcagtatgtccaagacacattgggcgagcagcaggatctaaagtcggaggacgaggaggaacacgatccctaccagatgatgcaggagtcgaaacaggagtcgcgattgcccaactctgccaactatccctggagtccatatgccgcacctcagggcaatccttacgatgccatgcccaagatgcttcccttcattggctatgcccagccagtgctcatacccgtcccactctacctggctccggatatgttctatcccgccttttctggcgccagcaacgatctcgaggatgtggtgatgtcacgagcctccggtggtcggcgtcctggggccaatcacgcgtcatcagcccgcaattcgcccatctactacgtaagactgccgcccacaccgtatatgtttttgcccaatatgccaacggctccatttgggggtggattctcaccactgctgacctaccagcccatgccctcattctccgcctacggttcggtattcaatttgcccgtgaacttcctggccaacggaaagcccactggagtctaccaagtgaacggatctccgggtgaggcgatgggatccctgacacctggcttgggtggcggtggatatggaatgcggccaccgacgcctagtaatccctacagacccatgtcgtcgccttcgatgggtggttatggaggctctcagcagagctttggactcgcctccatgccggttcctcagcaggactccaagctgacatcgctgaagcgtccgttcgtgttcaacggtcgtcccgaggacatatacatcctgccaaacaacttgggtccgctctacaacgagcagagctactactaa

SEQ ID NO: 32874 - protein, 342 aa, DROSOPHILA
MGNHMWSIILMLLVLEQLVADSVAANLAQLVKKQSQQKQLQSSQPGLQVGQQQSQGQQIHTQQYVQDTLGEQQDLKSEDEEEHDPYQMMQESKQESRLPNSANYPWSPYAAPQGNPYDAMPKMLPFIGYAQPVLIPVPLYLAPDMFYPAFSGASNDLEDVVMSRASGGRRPGANHASSARNSPIYYVRLPPTPYMFLPNMPTAPFGGGFSPLLTYQPMPSFSAYGSVFNLPVNFLANGKPTGVYQVNGSPGEAMGSLTPGLGGGGYGMRPPTPSNPYRPMSSPSMGGYGGSQQSFGLASMPVPQQDSKLTSLKRPFVFNGRPEDIYILPNNLGPLYNEQSYY

SEQ ID NO: 32875 - DNA, 2210 bp, DROSOPHILA
caatttcggggcaaacatttaattgtagctttctcgcccaactcatttgactgaaacgcaaccacaatgctgagctttatctgtaagccagcagcaaccgaaaaatacgcgccaaaataaacaaaattaacgcaatgcaaaatcatttccccaacctgggaccaacgtacatacaatataataaaataaacaaaacagcgggtggccgatgggctgaagtggacacagtgtatgttgaggtgacccagcgggccttcgttggttggttggccactcggtttaactaaattaaaatcgtgttaatttcacattagagcgcacacagcgctggctccccgaacggctgtcacacgttgcacttgcatcctgtgcccgcaaccgctcactcttggccacggcccctgggagggcaggatgcaaattgccaggaccctaaacaaaacgaccatagataagagcaatcgctggatggttgctcgccacagttagttgggatagtttgccgcggcaggctcaatgcttaatttaataaagtacacaaggaacaatgctaacaatttaaaataggttttgatatgataatgagaaactatttacttaccggcgtggagtacggatgggcggtgagtcgtatgccatctgcctcgaggtggcgcttcataaccgcttccagctccttcatggtcaccggcgtatcacagtcggaggccaggatctcgttgctgctgctcagagccttcggatcgttgatcaggacatagacaattgcggcgcctttctctcgcagcatgcgcacactcttcagaagtttgccacgatgcgagggattatcgacaccgatggcatccagatcgatctcgccaatctgcttgcagatctccagctcatcgtagccgttctccaggaagctctcgccgtagtgggccagtccaatggtgcgcagccactcgcagacgatgttgtggtgcggcatgctggtgctggcattcgcattcgcgtatcacgtggctccgctgggaaacggaaggtccagcggtgcgaaggagaccttgttcaggcgctgcggcttcgtcgaggtgctggcgccactggcaccactagctccactagctccactgaccccactggatccgacgccagtcgccagcggctccggttggttgcagctgctggcggcactgctgcagctgctgctagaggttgccttcatagcagcggcaacaggagcgagttgcacagagtactctgttcgaaaaaaaaatttgataagaaaatcatttacgcaaagctttaaacaattttatataactgccaccacaggtgtaatatacccattccatctatgactaggggcataaaaacataaacattaaattaaattgagtttggcttcgtgggtgtaacgaatggtatgaatttcatttaccaggctcaacagtgcgtatgcgtaatatggtttcggctacttccggtggccattcaactcgcctgacaggtgtaggtcatgggggaactgcctggatctggatctggatggccaggggcaggggcctggcatatcaatttgcgttaatagcagtcattgttcactcgcaatcgagggaatgggcaaaggcctctgccgagtcctgcctataagcacttaatgataatgctcggtcatgtacacgagccactaaaacacttgaatatgcttagccccggaagccacttgcatatgaataagccacttaaaatgacagatggaccagtgcagacggtggaggcatctccacggggggcggggccggatggcagcgccctcgggtcacagacaaaagacaaaaggaagtcgtctaactatttgtgcaatgcccattccccgacaacgaccccgatccttgtttgttgtctccgggtatgtttgtgtgtatgcttggctgtaaaaatatttttgcttgtcgaaaaatgaaatgcaaatgtctgctggcagcagaaatattgtccagccgtttcctcctcgtcaggtggctggcaatctacccccgaaaagtgtggtccaaggaggcagacaatggcataatgaaaataatgtggctacagtttggccacacagggaactgcagctgtcattgagtgtgctagattgaagtggtcgagtcctccatttgccctgcccgaatctcagccaggccgtggatttatatacaagaacttcgatccaaagtgag

SEQ ID NO: 32876 - DNA, 210 bp, DROSOPHILA
atgaaggcaacctctagcagcagctgcagcagtgccgccagcagctgcaaccaaccggagccgctggcgactggcgtcggatccagtggggtcagtggagctagtggagctagtggtgccagtggcgccagcacctcgacgaagccgcagcgcctgaacaaggtctccttcgcaccgctggaccttccgtttcccagcggagccacgtga

SEQ ID NO: 32877 - protein, 69 aa, DROSOPHILA
MKATSSSSCSSAASSCNQPEPLATGVGSSGVSGASGASGASGASTSTKPQRLNKVSFAPLDLPFPSGAT

SEQ ID NO: 32878 - DNA, 2384 bp, DROSOPHILA
gtgaggatgtgcatagacctcaactttaaatggagatggctttgcatctatttgcattgcattgcattgcattggattgcatttctttggcggaatgcaggcggccctgaactagtgacatgttttcagccaacaaaacgtggacaaaggcaccagaagtcatcagagcaaacgaggctgccaaatgcctttcaatgtgcacttctttcacgcgaccacagtgggcctgctatctggaaaactaaatacaaatgctgatgaatagtgcaaggaacggctttcggtttataaaatttaccagcttttagtcacgtttcaagcaaatactataggatattccttaaacagtacatgcttttatgtcaccttcatgcttttgccactatttccagttgcgatttgcaggcccagcaatttcggggcaaacatttaattgtagctttctcgcccaactcatttgactgaaacgcaaccacaatgctgagctttatctgtaagccagcagcaaccgaaaaatacgcgccaaaataaacaaaattaacgcaatgcaaaatcatttccccaacctgggaccaacgtacatacaatataataaaataaacaaaacagcgggtggccgatgggctgaagtggacacagtgtatgttgaggtgacccagcgggccttcgttggttggttggccactcggtttaactaaattaaaatcgtgttaatttcacattagagcgcacacagcgctggctccccgaacggctgtcacacgttgcacttgcatcctgtgcccgcaaccgctcactcttggccacggcccctgggagggcaggatgcaaattgccaggaccctaaacaaaacgaccatagataagagcaatcgctggatggttgctcgccacagttagttgggatagtttgccgcggcaggctcaatgcttaatttaataaagtacacaaggaacaatgctaacaatttaaaataggttttgatatgataatgagaaactatttacttaccggcgtggagtacggatgggcggtgagtcgtatgccatctgcctcgaggtggcgcttcataaccgcttccagctccttcatggtcaccggcgtatcacagtcggaggccaggatctcgttgctgctgctcagagccttcggatcgttgatcaggacatagacaattgcggcgcctttctctcgcagcatgcgcacactcttcagaagtttgccacgatgcgagggattatcgacaccgatggcatccagatcgatctcgccaatctgcttgcagatctccagctcatcgtagccgttctccaggaagctctcgccgtagtgggccagtccaatggtgcgcagccactcgcagacgatgttgtggtgcggcatgctggtgctggcattcgcattcgcgtatcacgtggctccgctgggaaacggaaggtccagcggtgcgaaggagaccttgttcaggcgctgcggcttcgtcgaggtgctggcgccactggcaccactagctccactagctccactgaccccactggatccgacgccagtcgccagcggctccggttggttgcagctgctggcggcactgctgcagctgctgctagaggttgccttcatagcagcggcaacaggagcgagttgcacagagtactctgttcgaaaaaaaaatttgataagaaaatcatttacgcaaagctttaaacaattttatataactgccaccacaggtgtaatatacccattccatctatgactaggggcataaaaacataaacattaaattaaattgagtttggcttcgtgggtgtaacgaatggtatgaatttcatttaccaggctcaacagtgcgtatgcgtaatatggtttcggctacttccggtggccattcaactcgcctgacaggtgtaggtcatgggggaactgcctggatctggatctggatggccaggggcaggggcctggcatatcaatttgcgttaatagcagtcattgttcactcgcaatcgagggaatgggcaaaggcctctgccgagtcctgcctataagcacttaatgataatgctcggtcatgtacacgagccactaaaacacttgaatatgcttagccccggaagccacttgcatatgaataagccacttaaaatgacagatggaccagtgcagacggtggaggcatctccacggggggcggggccggatggcagcgccctcgggtcacagacaaaagacaaaaggaagtcgtctaactatttgtgcaatgcccattccccgacaacgaccccgatccttgtttgttgtctccgggtatgtttgtgtgtatgcttggctgtaaaaatatttttgcttgtcgaaaaatgaaatgcaaatgtctgctggcagc

SEQ ID NO: 32879 - DNA, 384 bp, DROSOPHILA
atgccgcaccacaacatcgtctgcgagtggctgcgcaccattggactggcccactacggcgagagcttcctggagaacggctacgatgagctggagatctgcaagcagattggcgagatcgatctggatgccatcggtgtcgataatccctcgcatcgtggcaaacttctgaagagtgtgcgcatgctgcgagagaaaggcgccgcaattgtctatgtcctgatcaacgatccgaaggctctgagcagcagcaacgagatcctggcctccgactgtgatacgccggtgaccatgaaggagctggaagcggttatgaagcgccacctcgaggcagatggcatacgactcaccgcccatccgtactccacgccggtaagtaaatag

SEQ ID NO: 32880 - protein, 127 aa, DROSOPHILA
MPHHNIVCEWLRTIGLAHYGESFLENGYDELEICKQIGEIDLDAIGVDNPSHRGKLLKSVRMLREKGAAIVYVLINDPKALSSSNEILASDCDTPVTMKELEAVMKRHLEADGIRLTAHPYSTPVSK

SEQ ID NO: 32881 - DNA, 2942 bp, DROSOPHILA
cgttgttatttgtaggtttacgcggtttttatattttaatttaattttataagtagtcccagtgctacggcccctcctcatccgccaaacttgtccatggcaaaaattcgacattaaacagaacagcgaatggtctcgttggtgggtgggaaaggggatcgggaaaagtttttgttttgaatgcggcaaggaaatgctttgaagttggctccaaattatggaacttttcatggctttccagagagatagggagcggcggtagggacattctccccatccagaatgaaggaggcgggaattaaactgcgaccgaaatgcgaaaactcgttccattttcataattctaaagcaactaaggggttgtcaaatgctcgactaatgaaaatgtcactgtctatatggcgttaaacataagtgtcgaatggaaaccaaagtaaaaagttcaaatttttgtttgccacgcaaagagccagtaaagattattcaagatttaaagcagaggaaattagaaaattcttagcacaagtctcaaacaataaaatagatagccattccatagggacaattgagaacattcctatatttatttggttgatttacccagtccacattttctatgacaactaaacttttaccattacccacacaaacaaggaaacttggaagcaagccgaaaagtaggcaataaaaatgctttcttaaccggaaatgacaaaatcacacacgaaatggtttcgataaaaaaaaggtctaccttttttgtaagtggcacccaatttgcgacctccaaactcaccttcaactgcattccctccgtggcgttcagctcatctccactttgccggaggccctgcaaaaacctgtgaaagaccgttctccgctgcttgtgcttgttccggccctctaaccaatccaatccaatccagatccagttccaaatccaaatgcggaggcagtcaggcgaacaatcaaaccgagaatcaaacagacattcatttgattaaccagacagccaaagtttaagcgcaaaccaatttaattgaattaaaagccataaaaaccaaacagccgccaaactgtctctaaccacagcttccggtgcctcctcctccgattttagacgctcctcacctgttgccgaaaagttgtaaaagaaattggtccgtgctcccggataactgtgctgcatcccgttcagattcagagccgacttggagtcgatggcgttccgggccatgcgattggccaaatcattctgcgtatagctgtagatttcgttctcctcgcgatttgataggcaactggagggctgcacaagcacggaaaatatataatatatatagatcaataaaaactaggtttatcgttttttaaagacctcagtcataaatattcaatattttaaaagcgatttcattggtatttcatatgaagaaggattgaaacaataatgatgtgcgtgcccaacttagcccattgtcctctgtcattttcacaaagtaatcccaagtagtccccagtaaatttctttcagtgcatgcacacataaaagaacacacatgagcatgcataataaaccaaagggaagggatcggaaatgaattagagtctgattagctggatgtcgtaaaagcctttgcggccgtaaaagtcacggttcgaagtcgaagcatatgcttaccaagtacttgccgggcacatagagcggctggctgtggctggtgggcatcaccgaggagctgaccagacccgttccgctgcagctgggcccagccatccggcgggacagcgtgtgccccgtggagatgcgcacgtggcgctccttccacttggacaggcgcacctgctcgatggcgtccagcacgtcgtcgtacggcatgttgatctgtttgctgtagtgggcggccaggccctccaggtagcctcgtttgccctcctgcatggcgagaaaagacaatacccattatttggtaatattagaagagcgccaactaaatatgcataatcgagaagtaacggaatgatctattgcatcaaacaatataataattcatttgtatctttttattttaatggtaatgtattgctattattatatccctaaatcaattgttattacataaccccaatttaaagacacaatttcctgcggtgcattggaaagttgcaagttggtcacggagatcccaagatccctaaaagtcttaaccgcaatccactaaggccagggtcaaaagcatgtcgtcaagaagcagaaggagcaaggtgggcgcacaagtgttaatatcttccggtaattagcgagaggctgccacttaaatgtgtcctgtttgacattcaaagcggtcactgaagcggcagcatcgtgctcctttatgctgctccatctgcagctgcgtctccatctgcatccgtatccgtatctgcatcttctgtgtgtctatgtctatgtcgatgtctgcacctgcatcctcgagtcgggcagaactaaattcactgagccccaaccctcacggcctggcaaattcatttatcgtcgcattcatgtaatgcacatgcaaacatttgtgctgaaatgcaacttgtctgcagctgtcagtcagttagacacacagatactactactacaactacagctgcagatgtagtacataaccacccgcacacccacacacccacacacccagggggctgtctgtctcatcagcgcaaagtgcaattagttgaagttggagcccgcgcgtcaacatggcccagacgaagggagcgtcgagggggccagaagccaacaagttctgtctaaccaatcccctcatcgccctcattcaaccggcagacacctttcttcactgccattcggtataattccatttcgggcttaaagttgcatttcaatttgcgccgccacaaagacaacaatcgtaaatatttaaccacatctt

SEQ ID NO: 32882 - DNA, 570 bp, DROSOPHILA
atgcaggagggcaaacgaggctacctggagggcctggccgcccactacagcaaacagatcaacatgccgtacgacgacgtgctggacgccatcgagcaggtgcgcctgtccaagtggaaggagcgccacgtgcgcatctccacggggcacacgctgtcccgccggatggctgggcccagctgcagcggaacgggtctggtcagctcctcggtgatgcccaccagccacagccagccgctctatgtgcccggcaagtacttgccctccagttgcctatcaaatcgcgaggagaacgaaatctacagctatacgcagaatgatttggccaatcgcatggcccggaacgccatcgactccaagtcggctctgaatctgaacgggatgcagcacagttatccgggagcacggaccaatttcttttacaacttttcggcaacaggtgaggagcgtctaaaatcggaggaggaggcaccggaagctgtggttagagacagtttggcggctgtttggtttttatggcttttaattcaattaaattggtttgcgcttaaactttggctgtctggttaa

SEQ ID NO: 32883 - protein, 189 aa, DROSOPHILA
MQEGKRGYLEGLAAHYSKQINMPYDDVLDAIEQVRLSKWKERHVRISTGHTLSRRMAGPSCSGTGLVSSSVMPTSHSQPLYVPGKYLPSSCLSNREENEIYSYTQNDLANRMARNAIDSKSALNLNGMQHSYPGARTNFFYNFSATGEERLKSEEEAPEAVVRDSLAAVWFLWLLIQLNWFALKLWLSG

SEQ ID NO: 32884 - DNA, 2244 bp, DROSOPHILA
ctgcagctgcaactcgaaaaaccaaagaccaaaatcgatgcagtgccaagttgaaacggaaatgccagagccgaatccgcatccgcatccgtccgttcgtctgtccgtgagcatggtgtccgtgtgtctgtgcaacgtctgcggttagaacaagtttgccagcctgcatctgtgtttttgcgtgtgtgtggctatgcgactacatgtgtgtgtgcgtgtgagccagtgtgcgagtgtgcgtgttgatttagcgttaagcttgttggatttttgcgttttgtcaacattcccccggccagttgtcgatgcattcgcagactgctgctgcggcggctttctcggggtgttcaaataattgccgatagacttcggggcaagagcatttcgagattgattctggttggggtgggagcatgcacacagagaaaaataatcatgaacatttccatcgatttgttgtttgcgtgcagggtgatcaactaatggcttttgagttaacagcagaaaggctgtttaagtgtttcaacaagtgtcaaaaaatgtgcaaaggatttgattttgcggtctttagtttgagttcgattttttctctgtgcagaatatactgttgaatcaacggggcggtgaagtgctgcttagactaggcttagtgttcattaatggtcaagtgactatacagtgggtgcgaatagtgatcaggttgggtccctcaattagtcctatgggtatattaaactcaacacttgcagatatgattcctatagctagttgtcctcctatttgttagttataaatgcattaatattgcttcgttggcctgctctatttcctttactatttagcctcatcctttagattatgatcctgcctttcttaacattgtgtatcacctgattgagaataatgattgactcaacaatttctataagtgagtggtatgtggtttctgttatcctgtatattcggtctaagcagcagcgatgctgcttagggccgaatcctagggatgcttcgtatagttattgagcggcatctcgttcacatgagtgtgtgccacctccttgttccggtcatgaatggccatttccattggagcactggctggctttttctgggccgccttctgtgtctttagctggaagatagtaaccgtttaattatgatacattttagtattcagagttctctttagttactctctgtatggtcttttcaaagtcctgatgcggctccggtcgcttcatcgtgctgcagtttctcaggcgctcattggtctgcaatggtaagttgttgtaacaatatgaggttaatttatgttttaaaaatgaattttgttttggcacctgttacaaggttgtataaattgtgttctccccgccactttggcatgttattccagctattttgtgcccgcccatgattacttcattaacccgagtcagaccgaacaaatcgacacctcaaaacaaccgcagccaaaacttcaaatggaaatgggaaatgtcaaatgaaaagcgccgggcagtcgagtaagtgtaatgaaagggcaacgctggttgctggttgctcctgtccccggagcagcatttccgcaacagaccgcataatgagtgccgttgaggagctggaacacacgctctgggtgacctttgaccggaggaaaaagcacagcagagctggggccaaagaaaggtaatgagtgccagaggacacgctgcacacacaaaagaagttgtcccgaacacgaagcacaattgtcgccagtgcttagcccaagtcattttcaaaattgaccgcaaaactcgggaggaaccggagtggacaatctgcagccgtggtcctcggcagcggcaaattgtgcttaaatattaaatgaacagccggcgaaggagcgggcacatacaaaagaaaaaccggacaacaaccgtaaaacacggaaagttataaactctcgtcggactccggaggacccgcaacccaaataaaaaggacacacaaaaaagtaaccaaaaaaaaggaatggaagctttaacctggaagctggatggcaatggaaatggaaaagtgcacggcgacaggacacacaaaacaaaacactttggcacgcctgaaataataaaaacaaatgcgaatggaaaatggacagtcgtgtgtagggagctccacctgatccccacccacatctttcacatccggcataacaaccgcagcaaagccgaaatgcgccaaggtgcaaatgaccag

SEQ ID NO: 32885 - DNA, 183 bp, DROSOPHILA
atgaagcgaccggagccgcatcaggactttgaaaagaccatacagagactaaagacacagaaggcggcccagaaaaagccagccagtgctccaatggaaatggccattcatgaccggaacaaggaggtggcacacactcatgtgaacgagatgccgctcaataactatacgaagcatccctag

SEQ ID NO: 32886 - protein, 60 aa, DROSOPHILA
MKRPEPHQDFEKTIQRLKTQKAAQKKPASAPMEMAIHDRNKEVAHTHVNEMPLNNYTKHP

SEQ ID NO: 32887 - DNA, 2336 bp, DROSOPHILA
ataaagatgcagtcatttgtttttaaccccagaatgcctccaagttggagtttacgaattttaagtgtcatgtgaaggacccgacttatttgagcttcgagtactgtttcataaaatccgtaaatcgaacctataagtacatatcactcaaggccaacatgtacgaagtacctattacaaacgcatcggtatgtattaaaaaaaaatggcttaaaaatcccactcactaagcgtatatattgatgtaggcaaaacttcaaatttcgagaagatttcggtcctatatgcccataaccatagccgccagcatagatgtttgcaaatatatggcttacaagaagaacttggccaatccgatgctcagacttttcgaggagatcaccaaaaaatacacaaataccaaccataaatgtccctatgatgtgggttaatgagaacttttcaaatgattatttctagatgttatacaataacatttttacagcacgaccttatcatagacagacttccctccaaatatctgagtgagcactttaccaacatccttccactcccacctggggattacagttttaacagcatatggtacagcagaaacatagaacgggccaccatctccatatattatactgtatcataatcagaagcagcggtttaaaatttattaaaattatcaaacaattctacgttattgcttatgttaatattgtcgcctttttctctctcttagtgatttgattatgtcataagcgttaacataattgcataataggttctaatagggcaggggaataccaaaaattagcagaatggaaagagcttcttcgagccagtcagttttgtgcgcccgaagcgacgagacatattaagaatcggaaacggagaaccatgaagacgatttcgctgctaacttttgtggtaatagtcacagatcgaaaatcggaatactacataactcgttttcccactgatgacatcaaacgcttaactctgctaggtgatgatgctcggagtggcactgagcttggtttgggccggccccgatgatggctacctttatgaccagccatcgggtgagcaacttcaggaactccaggtgatctctccccccaggaagctccggctaaagccacgtgtctacccagggcatccctctcaggcttgcggaaacgtggaggcgacggatcatgccgctgccctgaccacctaccatgccaaccgcccccagccgcgtcgcatttacaatcaccaggaagtcgaggtggacagctcgttctttgagcccacgccggatcggatcgaggaactcaagcgtattctcttggatcagcaatgaaatgtggtttacttggatgacggaaaatttgcgtgaaataaaagtctgcttatgtgaaagagattggtattgttgattttagttatattctttagtacaaacacatacaatttattatataaacaaaacatttacggtgatccaaatttgactttgtgtttatacataacatcaagataattaatttcttaagtgactcatggctatagcaactttgtctcctattaaggaaacatatacgtttatttattgtgacgatatttggtttatttcacagttcccaatttatctttcggtcttctttttattttgagtttcttttgatatgcatccattggatgtcagtttataaaaaaaattcgcttaaaattgtgttatttttaagccatgcaattcaattccaattaatccatttacttgtctaaaaatacccacaatcgtctcatccctgtttttattcgcccattttggcctgcattcggtgataaagtgaatgttaatggattttggccaattatatggaattagatggcatcagcaaaaaaaagtggcttaaacagcattccgatcaaaatgacgaaaatttgattgcagttaacaataaataaataatttatttgtgagcttaaaccaacggaaaacaaaaacataaacatatacagtcgatttagtagggaaccgaatccatctaggcatcgtagttgtacttcttgctatcgccgggattcaggctgtacaaatcgtagtcgaactggtcccactcctggtgatcggctcctctgggcttggtgctgcccttctttagcttgagcagggccttcttctcccggttgatgtccacgtggggaatctgctgacgagcacgtttctcctcggccgtcaagggctgaggtgccctcactggagtgtggctcaaaaactgcgattcctccattccgagatcagagtcgggactcatttgggcatcgtagaagttggcaaagttttgcagttgcatgga

SEQ ID NO: 32888 - DNA, 336 bp, DROSOPHILA
atgatgctcggagtggcactgagcttggtttgggccggccccgatgatggctacctttatgaccagccatcgggtgagcaacttcaggaactccaggtgatctctccccccaggaagctccggctaaagccacgtgtctacccagggcatccctctcaggcttgcggaaacgtggaggcgacggatcatgccgctgccctgaccacctaccatgccaaccgcccccagccgcgtcgcatttacaatcaccaggaagtcgaggtggacagctcgttctttgagcccacgccggatcggatcgaggaactcaagcgtattctcttggatcagcaatga

SEQ ID NO: 32889 - protein, 111 aa, DROSOPHILA
MMLGVALSLVWAGPDDGYLYDQPSGEQLQELQVISPPRKLRLKPRVYPGHPSQACGNVEATDHAAALTTYHANRPQPRRIYNHQEVEVDSSFFEPTPDRIEELKRILLDQQ

SEQ ID NO: 32890 - DNA, 2821 bp, DROSOPHILA
attgaatgagcgaatgaacgaatgaatgaatggggacttgaatgagggaattagtgagtgacgaacgagagaggaatgggtaggaacaccagcttgactggcagacggcacacatatcgaaacgcatcgaaccgaaagtcatcaatttcatattgttacgcatgccacactcttgatatatatatatatatatggattctggatgctggattcgggatgccggatccaataaaagcaagacatcgacaggccgggacacttgaatgaaatggcattattgctacttcaacgccaatccacaagtcagagcgccagctcctcaatcagccagctaggtagacagtagccctagaatggatgctggatggggaatggtgaaaaggaggaaacatccagaaggacgagaacctgcgttttccacacgtacgcatacaaaaggacttgctgaaataacttatacgcctcgtgcgccgctggggccacaaacgagccaaacgaaaagaaaactttttcttctcacgaattgcgagcgaaagccaaagagaatggggaaacgaaggtggaaaacaaacagcaaaggcaaccaaaagtgaaaatctcaacagtgttgaagcaaaatggtaaaaggaaaatctgccaagtaaaagaaatacgaaaaagatatcaagtatttatttatatgacctttgtttgccactcgacctcgggtcgtgtatacatcccagcctctctggccgacaccttcgactttcctttgcttattgtttgccatcaaaatgtttgccgttttcgattttcaagttttttttttggccattataaggggcactttaaggtgaaatggatatcatttgtgttgaaaggcaggcaaccttttgctggaccaaagattaaaaagttctctgaaattgtttgacaatatattttgcttgggaattccttttgttctacagattgttagattattcatttgctgataattaccatattttcagatctcatgatcgcgaaagcggcgactacgcgggctccatctcagatctacaaagcgttacctccagattcagtacggtgtcggtaagtgcagaaaccaagttccacttggatcgggctcatttaacttgcagctatggtcgcctctccaactccttcgacatttccgactcctccaagtccagatacgctgcatctgaatgcgtctaaattgattaagtgctctttgtgacaaacaaacttcgcatttggccaatgtcgtctggtccgaaaatggacgatggccgaaatgcacgtagatagagggaaataaaaacgagcgggcgaccgaggaacgcacacaaacttgaaaagctttttagccaagtttttccccggctccccgtgccggttttagtattttttccttgttttcccggagtcggagtttggcacttaagccagctaaacgttgtcggaatacgaacggcaaatgctattggtttggatatgtgctggttgggggagttgaggttcggcgaccatttcatttgcaaagttgacttgccctaacttggctaatatgaaaacgcactcaatccgctttacgccccttttcagattggcaccaacaactgcacggcccgctatcgaaccctaagcggtggaattggggaatcaccatcgctgtcgcccagtccatcgtcggattacgaggacatcggagtgaccaggggccacggatgtctaccgcccagcctgctggccgctaaggccaaaaagaacggactgccgcacggcaaggcgaacaccatttgccaaaaggccacggtgcatcatgtaagttaattaaacgctaatgccaaaaggaaaacagatttgcagaaggtggaagaggacaccaactgcatcgtcgatgcagcgacggggattttgttgacacattatgtggcctgcgaaatgtaattagccccttgggggcttgcatatgcaattggcttcatcgaggccttagccaacagtaaagctaaagccaaagccaaagccgaagctaaagcctcataatggcccgactggaccacaactctttggcgcgacatgcactctaaatgcaaatgccagtttaatgagtttttatggccgcttgcacggttttagcgtgttggcaaaagtgaaagttcatctcggccaaactttcgaggcgagtcgaggcctgccaaaaaaaaatatgagcaaagttttggtgtccagcattgcagcttaaggatcagagaaactaatgcagtctgcgcccaaagcgcaatattcagcacgaaaacatatttgattttattcaaaaaaggcacaaaactaaaactcactataagttattagcatgtgttaacgcaaactatttatttcaaatgcaatggcatacacatgtgttaacatttattctccgtgtagacaaagtcaagactctaattccttcttctctgcccgaacgtattggtatgttcgttttaaactttttaatgatttaactaacaaaactttcctgttcttgttcttgttttttgctgctctccccttcaacatgcaatttattgcacaacgatgacgacgacgtcgacgacgcaaccaaaacacacggaaaaaatacggataactttcacttcaatccgtctgggcttgactgggggattggtatggattggattgttagtcgggcgagatgcgtagctcggcaaaggaaattggcgcatttaatgagaatggacgaaactttgttgccacaaaggatacgtcgagggatttcagcaattcccaagataataccgaccgtggcagcatgagcgatcaggcgttc

SEQ ID NO: 32891 - DNA, 375 bp, DROSOPHILA
atgatcgcgaaagcggcgactacgcgggctccatctcagatctacaaagcgttacctccagattcagtacggtgtcgctatggtcgcctctccaactccttcgacatttccgactcctccaagtccagatacgctgcatctgaatgcattggcaccaacaactgcacggcccgctatcgaaccctaagcggtggaattggggaatcaccatcgctgtcgcccagtccatcgtcggattacgaggacatcggagtgaccaggggccacggatgtctaccgcccagcctgctggccgctaaggccaaaaagaacggactgccgcacggcaaggcgaacaccatttgccaaaaggccacggtgcatcatgtaagttaa

SEQ ID NO: 32892 - protein, 124 aa, DROSOPHILA
MIAKAATTRAPSQIYKALPPDSVRCRYGRLSNSFDISDSSKSRYAASECIGTNNCTARYRTLSGGIGESPSLSPSPSSDYEDIGVTRGHGCLPPSLLAAKAKKNGLPHGKANTICQKATVHHVS

SEQ ID NO: 32893 - DNA, 2252 bp, DROSOPHILA
gaactggaagtagaagtagcagtagcagttgaaggaagttgacaacatttcgtcctttcatttcgcacagcagtcacgtttggcatgcagacaaagtgctgcccaaataggagcaaacatgcatacgaatgcgacgaagccaagcgaaggcgttgactttaatatgaacaagttttatttagttataggagtctgaggggcgaagggtgccgagatgttgtcaaaacgaagaggaatacctctttgaccatatgaagttggcacacagctgattcaactggattaaaataagttacacttgctacgaaatatcccaaaattagaggaaaagttttagcaaatcacctaccatttatttgccataaactaatgcaacattgttttgtctttaatagatcctgcgtgatattcgacagggactgttgcaaatgagtcgcggcgaaggacgcatgggtaagttgaaagagcaccgaaaagggataaaggaaatccagtgcactggaggagggaaatctaagcgactgcccccgaaaagtatgcagcatgcagccaggaattttacacttgaagtgcttctgttgcaagttcagttgctgcagcagcctttgcagctgcagcagccgcagcagccagagtgggcgtggctggcccgcccgtctggcgagcgtcgcatgcataagcgagcataaaatcttatgtccgtttccggaccagaatccgtacataagccccggacttcaggctccggagcaacttgctctgccgctagcatgtggcaaatggcattgcaagttttgtgtgcaacgtggcgtataataatattgtgttgcaaccattctgctggctctgcacatttttcggtcgctcgcaaaaagttttttaagttcctcctcctttccagtgctttcttctctcttattttttccaactaatcttcaaactaatccttactttgcggctgctaaatttggtttattcccatcttgcagacgatacgtatatgtacgacgaggcgctgagaacgggtggcggtatgggcatcgccggactgggcatgccactcggtgtgggcggcaatggtggcggcgggggagcagcccattatgcggtgagtgcgctgcatcatcaaggtcattggtacgacgagccgccctacgaaagcgatcccgatgactttcttatggccgggctcaactgcggaccagctgccacaattcaggtgagtcttgtccttaaaatactacccaaatagaactatgataggcattaagtttagagttaaaaatcaatcaaagcagctaaatatatcaaatgaaagcaaattctatagctgtaatacaatacacatgcaacaatttcaattttaaatctataattggctcacgatattgtagaacatattttattacatagagaacagattttgaataaatttacacactttcggtgacttgtacaatgcggcttgtgtcatccacttgaaaaataaaattggcagcggcaacattgtcgcagttgcaatcacatttgaaatttatgcgtcgcatcctgcaacgccgttaatcctggttactgggcgcactccttcgagccgaggggcaaagccgatccaatgccagcttccatttcaattttaagctccaacccactttgatttctctgtggaattcgccagccaaaatgttgtgagggagtttcctttgcgctttcatacagttttttttttttttttttttgggttggcccccgatgagtttggttttcttcagcgattttcgctttgtggctttcttctatttgctttattaaattatacgctgaatatatttttgtgctggcgcattgatttctacccacttcgatttgtatgtccatgtcctttggcatttttcgttctttctgcgctcctttgctgtgtgcataactccaggacaaactgcgactcgaactcactttatttttattgacagtcaaaaagtgcataattcttgttgacttgctcgactttgactctctctcacagttcgatattgtggattgattctggcgagtgggagtggtagtcatggaaaactctgcgaaagacgtcgccgtcttgagacttttccttttgcataattttctttgccccttgatttttttttcctgcgtcgccgggagttgcgcttttgtcgaaacgcattaggcaagttatcgggggaatttgttttcttagtcaattgaaatcactcagctctgaagcgctgccgagc

SEQ ID NO: 32894 - DNA, 252 bp, DROSOPHILA
atgtacgacgaggcgctgagaacgggtggcggtatgggcatcgccggactgggcatgccactcggtgtgggcggcaatggtggcggcgggggagcagcccattatgcggtgagtgcgctgcatcatcaaggtcattggtacgacgagccgccctacgaaagcgatcccgatgactttcttatggccgggctcaactgcggaccagctgccacaattcaggtgagtcttgtccttaaaatactacccaaatag

SEQ ID NO: 32895 - protein, 83 aa, DROSOPHILA
MYDEALRTGGGMGIAGLGMPLGVGGNGGGGGAAHYAVSALHHQGHWYDEPPYESDPDDFLMAGLNCGPAATIQVSLVLKILPK

SEQ ID NO: 32896 - DNA, 4323 bp, DROSOPHILA
taggaggcggggaacgatctcaagtgactgactcatgtagtgtgcacttaaattacatgtttttgagcaatgcacccatgtcgccttagataacaaaatcctaaatataatttatcgctctcgattcatttacataagatatgaacggagcccaaaattgtaagtctttaaatatattcgtgttcatgtgtgaacacctatattattggtcagcaaaatattcctccctggcatgcgagagtgattttctgtgtgtgtgtgtgcctagggctttgagctttgactgactgaactgcaaccgttgcgtctctcctttggtgtgaggtgggaaagctctggcaatttggcaagttcacgtgtaggtacacaatcgagttctttttatatatacatacatacgtatgtaacaaattttccgcgaacgatttttgctcttagctttttctttttgagtttaagcgataacgcctggaacatcagaaaaacaaccgataagacggcggtgagtgggccggcgaatcgttgcattgtctaagagccaaaaaaaacccattaaactacagacaccctagtttcgataccggtttaatttcgagagacgtgcatatcttacataatccctcctctgctcctcccacccgcagttccaagaccccatccaactagaactaagctgaattctacgtagtcgctgtaatacaccgccaccttcatctacagcacgatttcgtattcgaccggagtcagtaagttgtacgaactatttgcagaccaatctcgatgtctccgcaaatagataatgcttaagctaccaaaaggcctaaaaaagaaaaagaagaagtcgaaaaaggatcaggagctcttcaccgaggaggagctcgagcagtacaagcgcgacctaaaggccaaacaggaggcggcggccacaaaatcggacgccggcgaatccgacggagcgtcatcagacgttgaggcccaccacgagccagtagcctttaactcaggattaggctcgggatcatcctctagcatcctcaacgcccaacaacagttatcggatcaaaatcagggggctgccggcggcgacgaggagtgggccaaatttaaggcactaacatcaggcgtcgatagcattctacataaaacccaggacgagctcgatcggatcaagaaggagtcattttaccagcgcctgccctctgccgctgaaaaaaagaaacaaaaggaggaggaggccgctcgccttgaagccgagcagcaggagcgggaaaaacagcgccttgggcagatcgaggcccaacgggacaagttagctgaggcggttgttcagttatctgaatcagaggaggaggcaggcgattacgaggccgatgacatctttgccaccgactacattgaggctatcaccagtggcgagctccaactagccgttgtaccagattcccccgtccttgccgaagacggacccgatccctttgacaccgcatacgcggagaaggttattgttggtgccgatcgagcaaagggcaacaagaaactagtgagtcttggtgcagccgttgaggttttatccggtcgcgtggaccgagagcacgctgtcgccctagcgaatcccaagcggaagttaaggaagggtatccagaacctacttctgagtgaaagcatagagctagctgattcagaagcggaacttctggctgccacttcgaacgccgagccgcagcataatttgctcgacgacctcgacgaggaactatccgagtcatcggttcccattgatctcagtgtctccttgcatttgcacttgattaagcacaagcagcccgtagaggaggaggaagagctcgagcagaagggtcgggaaaatcagcttcttaacccggatctatctgaattcgattcactcaaagacgaggaggacgacgagttcgccgaactagccgcggaatcgctgaccaaaaaggaagaggttactgtagttagccaggttgttttgcctgtcgcgcagctgcccactgaagcctttgaagcaggcagttgggccgaatttgaagagcaatcgggccaagaaccaggtaagagttctctgagcttttctggttaggattttttttaataagtacaatacttattcgttaaattatatttactatgtagaatgaagcgttgtattgttggtcttgttcttatagtatataaataccaagaaatatacctttttgtgtagattcatgttcttagatataatctcacaattccattgaatttaaaagttcaccgtttataaaaggctacacaaaaattaatatatctttctgtattaatatatgtataataataaactttttggcacgcccacaaaccgccaattttttctcatattctcgaatattatcaaaatggcagaaaaattatgaaatttcgcattctcactttcaatagcttccattagtatctattagcccgtgagctcgaatatagcattttattttgttttataatcagttactaatttaattttctgaccaaccaatttacttatgttttatccctaggaaaaccaaagcgtccgccaccaccagtccgtccgcctacaggaccccacattgtgcccggagcgatttacgtgtcggaggacgaggaggagaatccggaagacgaccccttcaacaccaactacgcagagcaagtgattaagaagaccactgtacttgaggaagacgacgactttgatccgcgtgcggaggaacacgccaccgagccaccctttttagcagctccacaacgcgatcttctcgctggtagtgctaccgacctcagtcaggtggttcccgcgcccttggcgccgactttaagtgtcgaccaagaggcagaggactttgatcccttcgatacatcggccgtatcggctctggtgcaacccaagtccacggaactacggtttctggagcgcgagctccttaactattcgggcttagacggagtaaccctcaagcactccctgagtgaccaagactttgatccacgagcggatcaaaaagaaccagcagcaccgcaagtaaaattagagcaaaaagagacggatttcgatacagcccaacgaaagtcctctctgagtctaaacatacaggccaagagtgttggcttcctggtaccggcatcagatcttctcggagcgggtaatgaattgggagctagtaagaagccactgacgccgtactacgcgccatctgacaatcgtttgcaggagcgtgaacgagaagctgaggacgttgaccccttcgatacgtcacatgtgcctgaggcaaaactcagcgatatagagctgaagcatattgaaaaggatttgatctccgtacccgccaatctacggcacagcctttccgacccagattttgatccccgtgctccacctactccggttccagctgaagtcttactggccgtcgaggagaatatcaacatcaaggtcttaacacccgctcaagaccgaaagaagctaaccaattcaggtggaagcggcaaatcggaggaggacatcgacccatttgacacatccatagcggcaaatctccagccgggccagactgagctaaaacttctagaaaacgaactattgccggagacaaagactttggtgactgacgtacttgacgtgcaaagcgacgctcaggagttgggcttgggcgacaaggtcctcacgccttcgacacactcaagaccgtccttgcccgcccaggatatagacccgtttgacacttcaatagcggagaacctagcgcccggcgaagcggagataaagctgctggaaagcgagctgatcgaacgttaagataagatatagacgatctttaatcacagaaaagtaaaagccgaaatcggaaatggcgaatccctttttaatggacgaagacctcgatggttgcgatgcagcggccaacccgtttctcatgcaatctgaaccggaacctagttcggataatccctttatggcaggtatgtacaaatttccattcagcttcacaggtatttctcatttttaaaagggagttaggaaaggcaacccgaagttgagattaaacataaaccctcttactgaggagtgacgttcgcaacctaaatacactgaaacagaaaatgtccacttgcaaatgtgtgtgacaccgcacagaaaatttttttcatttaatttcatcatttatgatatgatgcccaaatgtggtttaaaatcgcaaatggaatttttcatgataaatgtattacgcatgcagattttagtaacaagacccgcaaaacctggccagaaagtaaaaaaacattatt

SEQ ID NO: 32897 - DNA, 2722 bp, DROSOPHILA
atgcttaagctaccaaaaggcctaaaaaagaaaaagaagaagtcgaaaaaggatcaggagctcttcaccgaggaggagctcgagcagtacaagcgcgacctaaaggccaaacaggaggcggcggccacaaaatcggacgccggcgaatccgacggagcgtcatcagacgttgaggcccaccacgagccagtagcctttaactcaggattaggctcgggatcatcctctagcatcctcaacgcccaacaacagttatcggatcaaaatcagggggctgccggcggcgacgaggagtgggccaaatttaaggcactaacatcaggcgtcgatagcattctacataaaacccaggacgagctcgatcggatcaagaaggagtcattttaccagcgcctgccctctgccgctgaaaaaaagaaacaaaaggaggaggaggccgctcgccttgaagccgagcagcaggagcgggaaaaacagcgccttgggcagatcgaggcccaacgggacaagttagctgaggcggttgttcagttatctgaatcagaggaggaggcaggcgattacgaggccgatgacatctttgccaccgactacattgaggctatcaccagtggcgagctccaactagccgttgtaccagattcccccgtccttgccgaagacggacccgatccctttgacaccgcatacgcggagaaggttattgttggtgccgatcgagcaaagggcaacaagaaactagtgagtcttggtgcagccgttgaggttttatccggtcgcgtggaccgagagcacgctgtcgccctagcgaatcccaagcggaagttaaggaagggtatccagaacctacttctgagtgaaagcatagagctagctgattcagaagcggaacttctggctgccacttcgaacgccgagccgcagcataatttgctcgacgacctcgacgaggaactatccgagtcatcggttcccattgatctcagtgtctccttgcatttgcacttgattaagcacaagcagcccgtagaggaggaggaagagctcgagcagaagggtcgggaaaatcagcttcttaacccggatctatctgaattcgattcactcaaagacgaggaggacgacgagttcgccgaactagccgcggaatcgctgaccaaaaaggaagaggttactgtagttagccaggttgttttgcctgtcgcgcagctgcccactgaagcctttgaagcaggcagttgggccgaatttgaagagcaatcgggccaagaaccaggaaaaccaaagcgtccgccaccaccagtccgtccgcctacaggaccccacattgtgcccggagcgatttacgtgtcggaggacgaggaggagaatccggaagacgaccccttcaacaccaactacgcagagcaagtgattaagaagaccactgtacttgaggaagacgacgactttgatccgcgtgcggaggaacacgccaccgagccaccctttttagcagctccacaacgcgatcttctcgctggtagtgctaccgacctcagtcaggtggttcccgcgcccttggcgccgactttaagtgtcgaccaagaggcagaggactttgatcccttcgatacatcggccgtatcggctctggtgcaacccaagtccacggaactacggtttctggagcgcgagctccttaactattcgggcttagacggagtaaccctcaagcactccctgagtgaccaagactttgatccacgagcggatcaaaaagaaccagcagcaccgcaagtaaaattagagcaaaaagagacggatttcgatacagcccaacgaaagtcctctctgagtctaaacatacaggccaagagtgttggcttcctggtaccggcatcagatcttctcggagcgggtaatgaattgggagctagtaagaagccactgacgccgtactacgcgccatctgacaatcgtttgcaggagcgtgaacgagaagctgaggacgttgaccccttcgatacgtcacatgtgcctgaggcaaaactcagcgatatagagctgaagcatattgaaaaggatttgatctccgtacccgccaatctacggcacagcctttccgacccagattttgatccccgtgctccacctactccggttccagctgaagtcttactggccgtcgaggagaatatcaacatcaaggtcttaacacccgctcaagaccgaaagaagctaaccaattcaggtggaagcggcaaatcggaggaggacatcgacccatttgacacatccatagcggcaaatctccagccgggccagactgagctaaaacttctagaaaacgaactattgccggagacaaagactttggtgactgacgtacttgacgtgcaaagcgacgctcaggagttgggcttgggcgacaaggtcctcacgccttcgacacactcaagaccgtccttgcccgcccaggatatagacccgtttgacacttcaatagcggagaacctagcgcccggcgaagcggagataaagctgctggaaagcgagctgatcgaacgttaagataagatatagacgatctttaatcacagaaaagtaaaagccgaaatcggaaatggcgaatccctttttaatggacgaagacctcgatggttgcgatgcagcggccaacccgtttctcatgcaatctgaaccggaacctagttcggataatccctttatggcaggtatg

SEQ ID NO: 32898 - protein, 850 aa, DROSOPHILA
MLKLPKGLKKKKKKSKKDQELFTEEELEQYKRDLKAKQEAAATKSDAGESDGASSDVEAHHEPVAFNSGLGSGSSSSILNAQQQLSDQNQGAAGGDEEWAKFKALTSGVDSILHKTQDELDRIKKESFYQRLPSAAEKKKQKEEEAARLEAEQQEREKQRLGQIEAQRDKLAEAVVQLSESEEEAGDYEADDIFATDYIEAITSGELQLAVVPDSPVLAEDGPDPFDTAYAEKVIVGADRAKGNKKLVSLGAAVEVLSGRVDREHAVALANPKRKLRKGIQNLLLSESIELADSEAELLAATSNAEPQHNLLDDLDEELSESSVPIDLSVSLHLHLIKHKQPVEEEEELEQKGRENQLLNPDLSEFDSLKDEEDDEFAELAAESLTKKEEVTVVSQVVLPVAQLPTEAFEAGSWAEFEEQSGQEPGKPKRPPPPVRPPTGPHIVPGAIYVSEDEEENPEDDPFNTNYAEQVIKKTTVLEEDDDFDPRAEEHATEPPFLAAPQRDLLAGSATDLSQVVPAPLAPTLSVDQEAEDFDPFDTSAVSALVQPKSTELRFLERELLNYSGLDGVTLKHSLSDQDFDPRADQKEPAAPQVKLEQKETDFDTAQRKSSLSLNIQAKSVGFLVPASDLLGAGNELGASKKPLTPYYAPSDNRLQEREREAEDVDPFDTSHVPEAKLSDIELKHIEKDLISVPANLRHSLSDPDFDPRAPPTPVPAEVLLAVEENINIKVLTPAQDRKKLTNSGGSGKSEEDIDPFDTSIAANLQPGQTELKLLENELLPETKTLVTDVLDVQSDAQELGLGDKVLTPSTHSRPSLPAQDIDPFDTSIAENLAPGEAEIKLLESELIER

SEQ ID NO: 32899 - DNA, 3651 bp, DROSOPHILA
accaatgtttctttaatagacaaataattgggtattattgtacttattgttttagaatttttggctaccaggaaaaataaatttttaccaccttgctagaagctgtttttgtttaacataaaaattttaaaaaaggcatttaaggtgtttgattggttggtagtaataccagaatacctcatactttgagcagtaatggttctaaaaggaaatagctattgttatgcttaaatagtttatggcctctgacattaaccgaacgctacaaaccgttttggtatagtatcccaatgaaatttgaaaagaaaatcgaatattttatacacatattttaataaattgtttgaagaacatttgttttaaactttaacttaagttaccttaataatttgaaattcggatttctcgtgcgactattaccatggcagctatgtatatgataagtagaccaattttcatttaggtccagccaaaagcagatatagcaatttcgatccagttccagccgaaatttaatatactgtataaaccaaaaataactttttgatcaaaaaccccgaaggtttcgactatttctctcagctacatatctacatatatgattccattccgacttatattctagctgcaaatttaaaatattttgggaatgttttataaagacatctttacgcctgaaagacttgtatgtgtagaaacgcaatagttttttagacttgtggacgaagcagaatcacattatttttccttttacattctttagaacgaatgtagtgcacatcttcatgagaaggtattcgaggaaaggacatgcagatattacaagacgattaattacgttataatgtgctagatttaaaaaaaaaatgaggctgtcggattagcaggcgattctgatcagaaaaatgtactggttcttacattaatattagaacaacagtttgtgcacaagcaaccgtaactaaaacacaattaactgaagatttttgtctacttttttggtaagacttgtttgtatattcatataaggtatcaacaaaatttttaaagggttcatcatcacttaataactttaacaattaaatctaggaatttccattgttacttattttctctttctcgctctttcgcatgcaagtgccagctatgtacacagaaatctcaaacacaagttagttagcttaactaccaaaattagactgactgaaaattactgaaaagggctagaaggtaaagaaaaacctgacctgacctgaagcaaggtctaaaaacagtagcagcagataatatcaggaatcaagcattatcaattaggcatgcccacgccctgctggaaccctaacgtatcatgctgcttcttcacctcgtcctgcatttctagggccagcttcttgtacttctccgcttccttttcgttcttctcgatcccatcgccccgggcgtacatctggctaagattggcacacgcatacatattgcgaagctcgcaagccttgtgggcaaactggaaagccttcttcatgtcttttagaacaatatagtcggagtcctttaaaggcggttgtccggcggggggtgatgatgtaccacttccggaggatgcagtgacagcactctgatccgccttcttttgcacgcccgagatgtgcatcccggagagataaaagcaggcagtggcgttgttcaagtcgcagcttttggtcagaaactccaggccctgcgggtgttgtaaaattataatgtcaaatcacaaaatcaaataaaatttaaacacttttctgctggggtcatattgaacagttttaaattggatcaaactaaactatattcatacatatgtctatacatccattggaacataatcagaaaattacaattaaacgttcaattatctggacacgatacgaatgacttatgatttcaaggatcaaatgagaaacaggtggggcaaatgagagaatgtactgcagcacatagttgcactttaagcaaattgaacagttccaagagctagccttttattgaaggcttgggaccgtgatcgccatacgacacctttaccttgggcacattccagtcgatctccctaggcatggactttgaaacgagcagcaggccggagtgaagacaggcgtccgagtcgtttaagttacagcccttctcgtagtactcgtaggccacttgtggattccccttgctaccgctcttgccttttccaaggaaactgtagttgccgtatttgtagcaggactttgcgtaaccatagtcgtcgcaagtcgacttgtacaccttggaggccttttcaaagtctttcttgatgccctccaagtagtcgcccagcaagtggcacgctgcaatgcagaacgccagttagctatctcataaatgcaatgtcttcaagccccgcgaattgtcctcccgcacatcggaggttatagacctcaattgtttttgccgccgtcgctatcgctgccgccgccgcactcaccttccggcttcttctcggaatagcacccgaatcgatattccacgcccagcttttctacgtactccttcacgtctgactccttcttcaagtcataggccatggtcagcaatttttaatagataacaaccaaaaattattatgttatgcttcgtccggacccctgcgtgcttcagtgttagtaacgtgcaaaatatcgattcatcgacaccatactgcatacattcgatggttttattgatatcgatgttaggctatgcatcgatattttgctcataattaaaacatggtttaatttaaaatcgcttaattgtattttctatctttcatgtatgactgcggcgacattgagttctcggccttgcttgaggccgcagtgtggccagatacgtatgtgacttctcgcttattcaacatttatcgccgagtgccattacaatagtgctggtagacagccacactggcggtctcgtaaaaacctaatcttttcgattacctcttgttttttttttgtttttccgtgtcctctgaaaactgatgcgtatcaaggtaggacacctagctattgggaaaccacaatgagctcgagcagaacgaggaacggccccacgcttaatttcaaggcggtgctgctgggcgaaggtacgtttagcagctaaacaaacctaattagttcctgaaagctttaaccccttaattgtaggttgtgtgggcaagacgtcgctggtgctgcgctacatggaagaccggttcaatgcccagcacctaagcaccctgcaggcttcctttgtcagccgcaagatgtccctggaggatgggagaagggcgcagttgaatatttgggacacggctggtcaggagcggttccacgccctgggacccatctactatcgcggctccgatggcgccctgctcgtctatgacataacggaccgagactcgttccagaaggtcaaatcctgggtgcgggagctccggcaaatgcgcggcacggagattgccttaataatcgtcggcaacaagactgatttggaggaacagcgagcagtaacgcacgatgaggcccttcaatatgcgcgcacggttggcgctcaatatgtagaaacttcggccaaggagaacgagggggtggctgagctcttcgagctcctgacccagctgatgct

SEQ ID NO: 32900 - DNA, 1170 bp, DROSOPHILA
caggggtccggacgaagcataacataataatttttggttgttatctattaaaaattgctgaccatggcctatgacttgaagaaggagtcagacgtgaaggagtacgtagaaaagctgggcgtggaatatcgattcgggtgctattccgagaagaagccggaagcgtgccacttgctgggcgactacttggagggcatcaagaaagactttgaaaaggcctccaaggtgtacaagtcgacttgcgacgactatggttacgcaaagtcctgctacaaatacggcaactacagtttccttggaaaaggcaagagcggtagcaaggggaatccacaagtggcctacgagtactacgagaagggctgtaacttaaacgactcggacgcctgtcttcactccggcctgctgctcgtttcaaagtccatgcctagggagatcgactggaatgtgcccaagggcctggagtttctgaccaaaagctgcgacttgaacaacgccactgcctgcttttatctctccgggatgcacatctcgggcgtgcaaaagaaggcggatcagagtgctgtcactgcatcctccggaagtggtacatcatcaccccccgccggacaaccgcctttaaaggactccgactatattgttctaaaagacatgaagaaggctttccagtttgcccacaaggcttgcgagcttcgcaatatgtatgcgtgtgccaatcttagccagatgtacgcccggggcgatgggatcgagaagaacgaaaaggaagcggagaagtacaagaagctggccctagaaatgcaggacgaggtgaagaagcagcatgatacgttagggttccagcagggcgtgggcatgcctaattgataatgcttgattcctgatattatctgctgctactgtttttagaccttgcttcaggtcaggtcaggtttttctttaccttctagcccttttcagtaattttcagtcagtctaattttggtagttaagctaactaacttgtgtttgagatttctgtgtacatagctggcacttgcatgcgaaagagcgagaaagagaaaataagtaacaatggaaattcctagatttaattgttaaagttattaagtgatgatgaaccctttaaaaattttgttgataccttatatgaatatacaaacaagtcttacc

SEQ ID NO: 32901 - protein, 266 aa, DROSOPHILA
MAYDLKKESDVKEYVEKLGVEYRFGCYSEKKPEACHLLGDYLEGIKKDFEKASKVYKSTCDDYGYAKSCYKYGNYSFLGKGKSGSKGNPQVAYEYYEKGCNLNDSDACLHSGLLLVSKSMPREIDWNVPKGLEFLTKSCDLNNATACFYLSGMHISGVQKKADQSAVTASSGSGTSSPPAGQPPLKDSDYIVLKDMKKAFQFAHKACELRNMYACANLSQMYARGDGIEKNEKEAEKYKKLALEMQDEVKKQHDTLGFQQGVGMPN

SEQ ID NO: 32902 - DNA, 3032 bp, DROSOPHILA
aggtggggcaaatgagagaatgtactgcagcacatagttgcactttaagcaaattgaacagttccaagagctagccttttattgaaggcttgggaccgtgatcgccatacgacacctttaccttgggcacattccagtcgatctccctaggcatggactttgaaacgagcagcaggccggagtgaagacaggcgtccgagtcgtttaagttacagcccttctcgtagtactcgtaggccacttgtggattccccttgctaccgctcttgccttttccaaggaaactgtagttgccgtatttgtagcaggactttgcgtaaccatagtcgtcgcaagtcgacttgtacaccttggaggccttttcaaagtctttcttgatgccctccaagtagtcgcccagcaagtggcacgctgcaatgcagaacgccagttagctatctcataaatgcaatgtcttcaagccccgcgaattgtcctcccgcacatcggaggttatagacctcaattgtttttgccgccgtcgctatcgctgccgccgccgcactcaccttccggcttcttctcggaatagcacccgaatcgatattccacgcccagcttttctacgtactccttcacgtctgactccttcttcaagtcataggccatggtcagcaatttttaatagataacaaccaaaaattattatgttatgcttcgtccggacccctgcgtgcttcagtgttagtaacgtgcaaaatatcgattcatcgacaccatactgcatacattcgatggttttattgatatcgatgttaggctatgcatcgatattttgctcataattaaaacatggtttaatttaaaatcgcttaattgtattttctatctttcatgtatgactgcggcgacattgagttctcggccttgcttgaggccgcagtgtggccagatacgtatgtgacttctcgcttattcaacatttatcgccgagtgccattacaatagtgctggtagacagccacactggcggtctcgtaaaaacctaatcttttcgattacctcttgttttttttttgtttttccgtgtcctctgaaaactgatgcgtatcaaggtaggacacctagctattgggaaaccacaatgagctcgagcagaacgaggaacggccccacgcttaatttcaaggcggtgctgctgggcgaaggtacgtttagcagctaaacaaacctaattagttcctgaaagctttaaccccttaattgtaggttgtgtgggcaagacgtcgctggtgctgcgctacatggaagaccggttcaatgcccagcacctaagcaccctgcaggcttcctttgtcagccgcaagatgtccctggaggatgggagaagggcgcagttgaatatttgggacacggctggtcaggagcggttccacgccctgggacccatctactatcgcggctccgatggcgccctgctcgtctatgacataacggaccgagactcgttccagaaggtcaaatcctgggtgcgggagctccggcaaatgcgcggcacggagattgccttaataatcgtcggcaacaagactgatttggaggaacagcgagcagtaacgcacgatgaggcccttcaatatgcgcgcacggttggcgctcaatatgtagaaacttcggccaaggagaacgagggggtggctgagctcttcgagctcctgacccagctgatgctggagcagttgagccaacggcaaccggatgcgagtccacttcgcctccagaatccggatacggataaccttaacaactccgatgactcggaggccccggatcccggagatcctgcgggccagcggtcctgttgcggcatttagccgttcccattgtgatagtaatcataactataaaatagtagacctttaaccgatgttgatcttgtgtatatattatacatagatagatataaatataaatacgcgtatttttattattccctattatggatctttaaaatcctcacacatttttgtttattaataaatataaatatgtatttcattcgattttcttgcccttcctgagcgcccagtaataaacaatcttgtacttgcacttatcttgttttgaggctttttgggggccgggctgaatcatcgttatcagttgaggtgctaatggctctgcaaggcgataggtgattaattttaaaccgcaccaagattacagtttacggcactttaaatatatggtgcaatagaagacaatacataaagtttttatatattttttcataattttatgtaacgatcatatcatcgcaacagcttctcctattaatgaaattaattgaaatccaatttcaaaactgttttcggctacaattagttacatatataagtattctagttttattttgttataacaaaaagtgaacgaacatatatgtatgtatttacccatttaagaatatatccaatctataatattcgggctatgtatgtacatatatgatagtcttccattttataaccgttactcgtggtgtatatactagatatactatatactagattcgttgaaaagtatgtaacagaacagaacaacaggctgaaagaagcgttttcgactatatgaggtatatacatatattcttaatcagaatcaatagctgaggcgatctagacatgtccgtctgtcctagagatatacatagatgcctcgcgagattgttggccatatgctgccaagcccactctaacgcccacaagcctcccaaaactgctacgcccacacttttgaaaaatgttttgatttttcttggttttattgtttgttttaccaatttctgtcggtataccaaaaacacttttgccacgcccctccttacacctacaaaacacccaaaacggtcacgcccatattttaaacaatcaaacaatttcttctaattttattccccaatatctatatacatatatatatgccagagaaatgatgaaattcgcgtccctacaccagagtcgaatgtccagcagatttcgcagatttgcgac

SEQ ID NO: 32903 - DNA, 971 bp, DROSOPHILA
ccacactggcggtctcgtaaaaacctaatcttttcgattacctcttgttttttttttgtttttccgtgtcctctgaaaactgatgcgtatcaaggtaggacacctagctattgggaaaccacaatgagctcgagcagaacgaggaacggccccacgcttaatttcaaggcggtgctgctgggcgaaggttgtgtgggcaagacgtcgctggtgctgcgctacatggaagaccggttcaatgcccagcacctaagcaccctgcaggcttcctttgtcagccgcaagatgtccctggaggatgggagaagggcgcagttgaatatttgggacacggctggtcaggagcggttccacgccctgggacccatctactatcgcggctccgatggcgccctgctcgtctatgacataacggaccgagactcgttccagaaggtcaaatcctgggtgcgggagctccggcaaatgcgcggcacggagattgccttaataatcgtcggcaacaagactgatttggaggaacagcgagcagtaacgcacgatgaggcccttcaatatgcgcgcacggttggcgctcaatatgtagaaacttcggccaaggagaacgagggggtggctgagctcttcgagctcctgacccagctgatgctggagcagttgagccaacggcaaccggatgcgagtccacttcgcctccagaatccggatacggataaccttaacaactccgatgactcggaggccccggatcccggagatcctgcgggccagcggtcctgttgcggcatttagccgttcccattgtgatagtaatcataactataaaatagtagacctttaaccgatgttgatcttgtgtatatattatacatagatagatataaatataaatacgcgtatttttattattccctattatggatctttaaaatcctcacacatttttgtttattaataaatataaatatgta

SEQ ID NO: 32904 - protein, 222 aa, DROSOPHILA
MSSSRTRNGPTLNFKAVLLGEGCVGKTSLVLRYMEDRFNAQHLSTLQASFVSRKMSLEDGRRAQLNIWDTAGQERFHALGPIYYRGSDGALLVYDITDRDSFQKVKSWVRELRQMRGTEIALIIVGNKTDLEEQRAVTHDEALQYARTVGAQYVETSAKENEGVAELFELLTQLMLEQLSQRQPDASPLRLQNPDTDNLNNSDDSEAPDPGDPAGQRSCCGI

SEQ ID NO: 32905 - DNA, 2925 bp, DROSOPHILA
ttaccgcattctcatattggagcggtctgacgcataatccttttaatgaagcaacctggagctggttacctggctgcccttccatcgccatggctcccccctgccagctgcctttgttttcactccattgttgaggttgctgctgctgttgctgctgcaagccctttattgacattaattataattaaggaggcggtagggtgtcgagtccttacatccctgcacctaggatgtggtagcatacgagtcggagtcggtacaagtccaagtccgagtccttcatatgcagatccgatttcgagaactccacatcattcactgtaagcccaacatgagagccccagtaagtatgctcggattttgacgaaaggatgccactgatcatggctccatcatttgcagcaatctctttataagtcgcccgggggcccaggaggagattaaggcattgaacgtgaggcctaagtggctgccagggacggtcgagtctggcattaaatattaaatacgacaacgtcctgcggtgcgtatgagtaatttggccaacatgtgtgtgtgtgtgtgtggcgggccgttaaaacggcggggtaaaaggcggattgcgattttggacccactcgttagcacatcgtgccgcccaacgcccaacgcccaccacccacctccaacctcctatctgtcacaacctttagcgctcgctcttcacctggcggagggtttggcgtataaagtaaggcataaaacggccagataatggcccgccacgttggtggccgctttatgggacgcacttaaaggagaaagaaaacaaaccagcggctttctttcgggagtcataaaaggatacactgggagaaacagatatgtatgtatatccttttcaacctacacatttaagtaacaataaacacggaatcatttagtatttttgccagtgcacgactgctttaccttggccgtcgcgtgcttatctgatgattagcataaagcaggtactcacctcctggttggcttcctggctaccgctctcctcctccacactggcggatgagccgtccttgcgagtcctctgctgcagcttgacgagggcatgctggaagtcctgctcctgctggagcatctcctcgcgcagttcctggacgtagacctccgtctgctgctggcgctcgcgctgagcggccagatctagcttaagctgctgatagtcactgcgaatggtggccagatcctcaaaggtggagctgcgctgctggacatcctgggccacgttgctggccgtcctttgcagatccaccagctgtttgcggatctcggagatcgtctgctgcagccactcgacggtcaagcgctccttgttgccactctgcgaggagcgcagcgcggccagctcctcccttattcttcatttcatcattgaccagcgactgcaatcgatccacattggttctcagctgatccacattggcggacagcttccgcataccttcgcgctcctcctgcaggacactgacgcttacagccatggcttgcagggatcgtgccgcattagtgccctcctccctgatcagactctgctccgaggtgatctgagcattggcgaactccagcttggagatctcgtgccgcagctccggtatgctcttgtccatcttggtctggaggccctccacatcttccagcagctccagcatcgaggtatgcagcttgtccagcgaagcgatctggctgctcaaattaaagttggcattggcaatcctgtgctgctccacctcgatgctgcgaacccgctcgtcgatgtggtggaagcgcaatccgttcacctgtcggcgcaggttcctctgggccagttgcagctggtggatctgttcgctctgaaaacggcaatggcgtcgcttgtgatcagcagtggtttcaagtccggtttgctgaaagaaaaataaggaaacattacgatattacataacttatgcattccaaactataatgatatctttgttgtaaaatatgttaagtaaccttcacaagttaaaagttgattcaaaggaaaaattgcaagtcaagacaccaagattgatgccttggcgcaaactgacccagtgccacccacatttcattacattcttcagtatgggcaaaaacccatgataaggatgattcgtggggagagctggtaagctggctgagattctattgtcgctgcgctggctgggattatgtgccgggaattgaatgctaaatccatttattataaatgcatttcataaccaggcaggcagagcgtgccacaataatgtcagctgcagctacgcagcaagctcaagctgcagcttttgcccaaaagcgtgtaaatccccggagctgctgcttcttctgctggtgccacgtggcgtgggtggatttgcatccacatccgcatatcagcatcctcaaccccaacccccggcccaaccccaatctcagccccacaaccccatccgtatccacatccctatcgtgcatctcctagctctcggtggtaaaagctgcataaatttccacaaacatacaatatgcatagaaataattttgctgagtgacagcagcgagcagctgtaaaccaaggtaatgccatttgggtcacattcagccggcgccgtgaatgagtgcgccccaacgccacaggatctattctacatatctgccgccccagggtatccttttcatttatgttcgtggccatcagtcatagaaatgtcctgggtaattgactaataaaggatgctgctaccgggcacaaagggcggcagaaagtgtcctgctaatgaattcaatgagtgaatgcgcaaagaaatcaagttgtatacgagtatactgcaaaaaggggagccacaacataaaaataaaagcaattatgacttttccttgaaacccctttcaatggtagat

SEQ ID NO: 32906 - DNA, 2695 bp, DROSOPHILA
aaaacatccttccattggaaggtgctctagtgaaatcggtgatatacttcatccagtgctgcgagcgaactttccgtggaccaaaagtgaaaagaacagctaagccaagcaacaaggattaagcccgaggaaacgcctggaataattgtagcattgtttgccagcgcctttttataaggtgtttgactgtcacggcgccggaaagtcaaggagaattgtttgtgtgtcggcatgcgtgccagttatttgcataaattgcccatctaactcgagttcccttttttgtgcggtgtgaatgagagattggcaaacattcccggacctccaaaaaaagaaagtttcgcgtgaccatttaaattgccctgcaacaatggcaggttcaaacgttttgtggccaatactcctggccgtggtgctgctccaaatatccgtggcattcgtgagtggagcggccagtggtggggtagtccttagcgacgtgaacaacatgttgcgcgatgccaaggtggtgacctcggagaaacccgttgtgcactcaaaacaggaaacggaagcgccggaatccagcgtggagctgctccgcttcgtcgatgatgacgaggatagcgaggacatcagctccattgaacggcaggatggcaggacaatggagagcaaaaaaatggccgatcaggtgcgcctgttgaccaagcagctcaacgccctgatgctgcggcgccgcgaggattacgagatgctggagcacaatctgcgcaaatccctgcggctcaccacgaatgcgaacagcgtggacgccgacatgcgcagcgaactgaaccaactcagggaggagctggccgcgctgcgctcctcgcagagtggcaacaaggagcgcttgaccgtcgagtggctgcagcagacgatctccgagatccgcaaacagctggtggatctgcaaaggacggccagcaacgtggcccaggatgtccagcagcgcagctccacctttgaggatctggccaccattcgcagtgactatcagcagcttaagctagatctggccgctcagcgcgagcgccagcagcagacggaggtctacgtccaggaactgcgcgaggagatgctccagcaggagcaggacttccagcatgccctcgtcaagctgcagcagaggactcgcaaggacggctcatccgccagtgtggaggaggagagcggtagccaggaagccaaccaggagcaaaccggacttgaaaccactgctgatcacaagcgacgccattgccgttttcagagcgaacagatccaccagctgcaactggcccagaggaacctgcgccgacaggtgaacggattgcgcttccaccacatcgacgagcgggttcgcagcatcgaggtggagcagcacaggattgccaatgccaactttaatttgagcagccagatcgcttcgctggacaagctgcatacctcgatgctggagctgctggaagatgtggagggcctccagaccaagatggacaagagcataccggagctgcggcacgagatctccaagctggagttcgccaatgctcagatcacctcggagcagagtctgatcagggaggagggcactaatgcggcacgatccctgcaagccatggctgtaagcgtcagtgtcctgcaggaggagcgcgaaggtatgcggaagctgtccgccaatgtggatcagctgagaaccaatgtggatcgattgcagtcgctggtcaatgatgaaatgaagaataagctcacccacctgaacaagccgcacaagcgaccacatcatcagaatgtccaggcgcagatgccgcaggatgattcgcccattgactccgtcctggccgaaactctggtcagcgagcttgagaacgtggagacccagtacgaggccattatcaacaaactgccgcacgactgcagcgaggtgcacactcaaacagacggactgcatctgattgcgcccgccggccaacggcatccgctgatgacgcactgcaccgccgatggatggacgacggtgcaaaggcggttcgatggcagtgcagacttcaaccgctcgtgggcggattatgcccaaggatttggggcgccaggcggtgaattctggattggcaacgagcagctgcatcacctgaccctggacaactgcagtcggctgcaggtgcaaatgcaggacatctacgacaacgtttgggtggccgagtacaagcgattctacatatcctcgcgagccgatggctatcggctgcacattgccgagtactccggcaacgcttcggatgcactgaactaccaacagggtatgcagttctcggccatcgatgacgatcgggacatctcgcagacgcactgtgctgctaactatgagggtggctggtggttctctcattgccagcacgccaatctcaatgggcgatacaatctgggcctgacttggttcgatgccgctcgcaatgaatggatagcggtcaagtcaagccgaatgctggtcaagcgcctgcccgccgtcgagtgccaggcgaatgccagtgccagtggcgcttttgtttccgtttccggttcggctgctgatgctgcgccgtcgagcggtgcaacaacaacaacaacaacagcaacagcagcgccggcgacggtaacgacgccgaaaaccaacaacagtgtggtccagttcgtggccgccgggcaggcgtaa

SEQ ID NO: 32907 - protein, 774 aa, DROSOPHILA
MAGSNVLWPILLAVVLLQISVAFVSGAASGGVVLSDVNNMLRDAKVVTSEKPVVHSKQETEAPESSVELLRFVDDDEDSEDISSIERQDGRTMESKKMADQVRLLTKQLNALMLRRREDYEMLEHNLRKSLRLTTNANSVDADMRSELNQLREELAALRSSQSGNKERLTVEWLQQTISEIRKQLVDLQRTASNVAQDVQQRSSTFEDLATIRSDYQQLKLDLAAQRERQQQTEVYVQELREEMLQQEQDFQHALVKLQQRTRKDGSSASVEEESGSQEANQEQTGLETTADHKRRHCRFQSEQIHQLQLAQRNLRRQVNGLRFHHIDERVRSIEVEQHRIANANFNLSSQIASLDKLHTSMLELLEDVEGLQTKMDKSIPELRHEISKLEFANAQITSEQSLIREEGTNAARSLQAMAVSVSVLQEEREGMRKLSANVDQLRTNVDRLQSLVNDEMKNKLTHLNKPHKRPHHQNVQAQMPQDDSPIDSVLAETLVSELENVETQYEAIINKLPHDCSEVHTQTDGLHLIAPAGQRHPLMTHCTADGWTTVQRRFDGSADFNRSWADYAQGFGAPGGEFWIGNEQLHHLTLDNCSRLQVQMQDIYDNVWVAEYKRFYISSRADGYRLHIAEYSGNASDALNYQQGMQFSAIDDDRDISQTHCAANYEGGWWFSHCQHANLNGRYNLGLTWFDAARNEWIAVKSSRMLVKRLPAVECQANASASGAFVSVSGSAADAAPSSGATTTTTTATAAPATVTTPKTNNSVVQFVAAGQA

SEQ ID NO: 32908 - DNA, 2222 bp, DROSOPHILA
ttgtctcgtttagtagaagcaatcaacttcctaagctggtaatttaaataaaatgtgtcgtcataagtgtgcaattttagtttatttattaaaattagagttttaattcaaattgttattttaattacagcaatagcataaatatgtgaaataaaaatcgttgtacacttttatcaatgaatgccattctccacttcgttaattaacaccaaaataaatagggccagtgaataatcgtaggattttttatatgcaacccaaaatatgtgcattcactagcttcattcaactaaaaagtgtttcgccattgaagagtcaaccagaacgccatcaaaaggaagcgctccaataagtttgaatagcatcacaaatacacacgtctacatgcacaaatgtatctgcatgtgttgctggagattgcgcggcttcggccttgcttttgtaattgttaacaataaaggaggcggtctagtgtggggtgggttgtttcatccggctttaattaagatccagctgctagaattcatgtatgacaagtattggactgcacgtaagttgatagtgatataaccaagcttagcatatcacaattcaaacaggagaacagacaaatgaataactttacatatgaatctgcgaaaagataagctggtttatactgcaaggcaaatgaaaaataatattacaaacccaatattaattatcttcaccaactctgtggagtatatataaaacaaacaggcaaatgtagactgcgatgataaaaagtaaaaagatcaaactgatgtttcgacaagaaaacataactggtgtataagttttaattaaatctaatttgggaaataattttaaatagttttctttaatatctgctggcatacttactctcgctaaatgtagaacaattgctttcgcaggccaagctgcttcaaattagttgaagttcaatgggtaatgaattccgccatttccgtggaagtttctatatcgccaggagcactcaatcgcaacggacgtcgtaggaggagcactcaccgaagtccgacttgagggtgaagtacatgcccacaccgatgccgatgaccatgatgaggactcccagccagtagaccaggcgccagaagggccatgacgatggtggcttcttctggggtcggtcggatctcacctcctcctcgtcaacttcaactctttgtggttggcggcgcagcttgtttcccatttccctgggcctttaactttctgtacgaatttgcttcccttgggcgataattgattggattttccctggcaactcgacagcaaccgaatgataacattttattgaaattacttgagcatctcgtaggctgagattcatctccgatggcgaaaacttctggctaattatttaagttaattggcctttgtccgcaaaaggcctgcccaagccatgatgatgatgatggggtggttagcattggcctgaaatatttgctcggaggccacaaaatgtctcgcaaatttgttcaaattacttggaacacaaaacaagagtcgtccgccactcctcgagatccttgcaggcccaagtccgtgcataaatttcagaacaggaggtcctgggtggaatacaaaaggactttgtttgcggtcgagagatgaaaagtcatttctctccattatttgccaactaattggttggtaggacttgtgcatttatgttgctcaaatgtttgcccaaagaattctggaatttggtgaggtgtcaagtgggtctaccatcaccctgaccttttgccgtatcaattaaatggccagctggtcaactggccaaattgagcaaatgaaggatgcaacttaataatggcattctcgtatatgcgcatatgtatgtacatataatgccacttaagcatgccgtagatctcattcttgccatgatttaagtgcatttcgatcggcttttccagcttttccccgtggctgtatcctttggagtgctggcgatgccattactgcttcaatttcagtttctgtttgatgttaatgaaagtttccgtcgtgcaaataaagccaaaagcatggaaatcagtaaaacaaattgcaatctgctttttatcgcacgtcgctgcatgactgctggcagccggcattttccttgctccgtcatcgattgcctggctttcccctcgacttttccctttgctgctggcccgcccggctattgacttgctcattat

SEQ ID NO: 32909 - DNA, 222 bp, DROSOPHILA
atgggaaacaagctgcgccgccaaccacaaagagttgaagttgacgaggaggaggtgagatccgaccgaccccagaagaagccaccatcgtcatggcccttctggcgcctggtctactggctgggagtcctcatcatggtcatcggcatcggtgtgggcatgtacttcaccctcaagtcggacttcggtgagtgctcctcctacgacgtccgttgcgattga

SEQ ID NO: 32910 - protein, 73 aa, DROSOPHILA
MGNKLRRQPQRVEVDEEEVRSDRPQKKPPSSWPFWRLVYWLGVLIMVIGIGVGMYFTLKSDFGECSSYDVRCD

SEQ ID NO: 32911 - DNA, 3429 bp, DROSOPHILA
ctttaataaaaatgaaaggactttaatgattgctgtctttttttagtgggcgccttatacccacaatattataccaagtattattcgatagtcagattcattatggaataaggacattgggcagtcagttagaaaaatgatatttattaaagataccaactagcaaacattttgtgcaatgtttaacaaccagttaagcatttaaagaaaactttagtttgtttcacaaattgtttttaaagcatctccacttattggcgaattagggagataattctattcttctataggaactttcttttttcttactctgcgtctttctgtttgaattgttcgttttacaacagagattgaaagttgagccagagtagtatcgcaccttagttccatcaccattattataatgaacccgattcgcccgacgccactcacctgcaacgtggcattcaaattgaaatgtgttttccccgctccgttttggcatctgcccgccgggttgcctacctatctatgcacctacctacccacattctggatcctggaacctgcattctgcatcctgcgtcgagcatccagcagaatccctgttttcgcacctcgccgactgccagtcaaagtcagcggacgcaaaaagttcgttgacaactttagcaaacaaattttttatcgcgcacagccaaacaccttttccctctttttgcatttgattcacacattttttttcaatttcgtttttcattgttggtatggtgaaaaaatggtgaacgcagcgtgaaatacgcagcaaccgcaaatagtgctcactgaaaaaatacaagaaataaattgcgagtatttccagctaaatacgaacaactatttttcttttcactaatgatttattcaattgtaaaatgtgctcgattgtgtccagagttaatggtaaatcgtatcgtgagagtctttgcatgtgcagtatttaagctatttcataaaatattccagtttggtccttgctcgttcatccgtagactcgcttgagaaccgtaaaaaatgtataggttgtgttcagtaggttttggaacagttccaaagtgatggggcgtatattgcccagtagtatctgaaattaaattaattttaccagcggataagtagaggaatatatgtagtagccacaaatatatgaaaaatctgtcactgaacccttaacaatggttatcgttatcgtacaaggattaatgtaagcaggacttactgcagctggccgctgtgccctcatcatcatgaacaggatgtttttgcgcagtggaacgtcgaaggtgaaccactccgtttcgtaggctgcggtggccaccgccagattctgttcccttaactcatttgcataccaatagagggccagtatttgggccagaatcatgttaatgtacatgcaaacaattatcagctgactggtgccgctgacctatgacaaatggcagacatgcgtacattaggttccctttgtggacatacatatctactcacgataatcagcataaagagcagcgcacagagcagcgccgaaaaggccatcagttcgaataggaacatcatggtggtcagctcgtttatgtgatccatgtactcgataatgctctgctggtaacgtatgcaggctatgatctcctccctcagttcacggggatcgcgatctccgtacggatgcttaagcgccacctggcggaggcgatgctgcaaagccttgcacctcacaatgccgaacattatcaagcccacaatcagactggtgtacggaatgtacatgcaacagcccatcggggtgatgagcatctgaaagatgtaccacatctcatagtacggactctcgtactcatttagaccaggaattttgctgccaaatggcaggactgcaaaaggaaagtgggttttaaaattaagagctaggttgttctcagctcttgaacctataacttagagctttccaattcaacttaagaacttttaaactcacctctttcgctggaggacaatgggtacagaccgaatcccatggatgtgagcatgccaaagaacagattgcccctagccatcaactttcccaccttgttcacctggtccaatatttccgatatatacgaatcgttcagattcagtaaatcgtaataggcctcagttagtttttggatcaaagccaaatatctgtcgtgatccgccagcaagagataagctcgcagcaccgtattaatccaaaggacgagcatatatgagttacgaattatcccggttagtccttcattggtactcatcatgtagacgatttgggtgaagatgtggaatgaggccagtccaatgcacacataacgcctcaagtttttgtcatagagcagggcccagaatcgcaatatcttgatattcatgtagattagctgaatgtcttcaaacatggcttataacttggctttctaatcgaattctgagccatcctgtttgtgcttcatccttttatagcattcttatgggaaaaactagtcgggcagtttttaaaggacacgacttgcatggactcccagctggtctcatttgggtgcaatttctgcctaaattgccaatgattttgcacaaatttttactattgaattgcaacattcatttgctgcatttcattggccacatattgatttctttttgaattacgagtgaaggacggggtggagaggtggtcgccattaatacagattatagcacttcaatatatttttcatttaacttggaagctaattttgctaatgcgttccgctgataactcgactacacttgggctgtatgtttattaaagatagaccaattagcatataaactcaattatatttacacatagataatgcttatcgattggagataaaagtaaaaaacgctataaatgatggcttgataatcagaggcagcttttctcaacagcttttgatagcttcgttgagagggcagcgcattcaatgtgaaatcagttgtgttccagctctcgcgatctacggttcaattagtcgctctcacatatgacatcatggatcagtcgatgatagcactcgctttgtttataatactgctcgttttgctctacaagtggtcggtggccaaatatgatgtgttcagtgaaaggggtgtgtcacatgagaagccatggcctctaattggcaatattccgctgaaagccatgatcggtggaatgccagtactaaagaaaatgatcgaattgcatacgaaacacacgggatccccggtatatggtatctacgcccttcgagatgccgtcttctttgtccgagaccctgagctcatcaagctcatcggcatcaaggaattcgaccacttcgttaaccacaatagcatgcacaacaatatacaggagtcgatactctcgaaaagtctcatttcgctgcgcgatgg

SEQ ID NO: 32912 - DNA, 1128 bp, DROSOPHILA
atgtttgaagacattcagctaatctacatgaatatcaagatattgcgattctgggccctgctctatgacaaaaacttgaggcgttatgtgtgcattggactggcctcattccacatcttcacccaaatcgtctacatgatgagtaccaatgaaggactaaccgggataattcgtaactcatatatgctcgtcctttggattaatacggtgctgcgagcttatctcttgctggcggatcacgacagatatttggctttgatccaaaaactaactgaggcctattacgatttactgaatctgaacgattcgtatatatcggaaatattggaccaggtgaacaaggtgggaaagttgatggctaggggcaatctgttctttggcatgctcacatccatgggattcggtctgtacccattgtcctccagcgaaagagtcctgccatttggcagcaaaattcctggtctaaatgagtacgagagtccgtactatgagatgtggtacatctttcagatgctcatcaccccgatgggctgttgcatgtacattccgtacaccagtctgattgtgggcttgataatgttcggcattgtgaggtgcaaggctttgcagcatcgcctccgccaggtggcgcttaagcatccgtacggagatcgcgatccccgtgaactgagggaggagatcatagcctgcatacgttaccagcagagcattatcgagtacatggatcacataaacgagctgaccaccatgatgttcctattcgaactgatggccttttcggcgctgctctgtgcgctgctctttatgctgattatcgtcagcggcaccagtcagctgataattgtttgcatgtacattaacatgattctggcccaaatactggccctctattggtatgcaaatgagttaagggaacagaatctggcggtggccaccgcagcctacgaaacggagtggttcaccttcgacgttccactgcgcaaaaacatcctgttcatgatgatgagggcacagcggccagctgcaatactactgggcaatatacgccccatcactttggaactgttccaaaacctactgaacacaacctatacattttttacggttctcaagcgagtctacggatga

SEQ ID NO: 32913 - protein, 375 aa, DROSOPHILA [sequence omitted]

SEQ ID NO: 32914 - DNA, 3686 bp, DROSOPHILA
atgccaaagaacagattgcccctagccatcaactttcccaccttgttcacctggtccaatatttccgatatatacgaatcgttcagattcagtaaatcgtaataggcctcagttagtttttggatcaaagccaaatatctgtcgtgatccgccagcaagagataagctcgcagcaccgtattaatccaaaggacgagcatatatgagttacgaattatcccggttagtccttcattggtactcatcatgtagacgatttgggtgaagatgtggaatgaggccagtccaatgcacacataacgcctcaagtttttgtcatagagcagggcccagaatcgcaatatcttgatattcatgtagattagctgaatgtcttcaaacatggcttataacttggctttctaatcgaattctgagccatcctgtttgtgcttcatccttttatagcattcttatgggaaaaactagtcgggcagtttttaaaggacacgacttgcatggactcccagctggtctcatttgggtgcaatttctgcctaaattgccaatgattttgcacaaatttttactattgaattgcaacattcatttgctgcatttcattggccacatattgatttctttttgaattacgagtgaaggacggggtggagaggtggtcgccattaatacagattatagcacttcaatatatttttcatttaacttggaagctaattttgctaatgcgttccgctgataactcgactacacttgggctgtatgtttattaaagatagaccaattagcatataaactcaattatatttacacatagataatgcttatcgattggagataaaagtaaaaaacgctataaatgatggcttgataatcagaggcagcttttctcaacagcttttgatagcttcgttgagagggcagcgcattcaatgtgaaatcagttgtgttccagctctcgcgatctacggttcaattagtcgctctcacatatgacatcatggatcagtcgatgatagcactcgctttgtttataatactgctcgttttgctctacaagtggtcggtggccaaatatgatgtgttcagtgaaaggggtgtgtcacatgagaagccatggcctctaattggcaatattccgctgaaagccatgatcggtggaatgccagtactaaagaaaatgatcgaattgcatacgaaacacacgggatccccggtatatggtatctacgcccttcgagatgccgtcttctttgtccgagaccctgagctcatcaagctcatcggcatcaaggaattcgaccacttcgttaaccacaatagcatgcacaacaatatacaggagtcgatactctcgaaaagtctcatttcgctgcgcgatggtcgatggaaggagatgcgcaatatcctgacacccgcatttacggggagcaaaatgcggataatgtacgacctgatccaatcgtgcagcgaggagggcgttatccacatacaggagcagttggagctgtcgcaggacgcgagcatcgaactggaaatgaaggattacttcacgcgattcgccaacgatgtgattgctacggtggccttcggcatcagcatcaactcgttcaggcgcaaagataacgagttcttccgcatcggacaagccatgtccaggattagcgcctggtcggtggtcaaggccatgctatatgccctctttccacgactgatgaaggtaactattgtccagatgtctctattctttattaagtgataaattaaccagtagacagaaatagacgattagagcaactaacgagagtaaactatttcattggcttatgctcatttcaacttgctctaggttctccgcatccaggtgctggacaccaagaacattgattacttcagcagcctggtcaccgcggcgatgaggtaccgccaggagcacaaagtggttaggccggatatgatccacctgctgatggaggcaaagcagcagaggcttgccgatctgagtgataagtcgaaggatgagctatactattccgagttcaccgccgatgacttgctggcccagtgtctgctattcttctttgccggctttgagattatctcgtcgtccttgtgcttcctcacccatgaactctgcttgaatcccacggtgcaggacaggttgtatgaggagatcatttccgtgcacgaagagctgaaaggtcaacccctgacctatgacaagctgaccaagatgaagtatctggacatggtggtactcgaagcactgcgtaaatggccaccatcgatttccaccgatcgtgagtgccgtcaggatattgatttgttcgatgaaaatggtcagaagttgttctccgcccgaaagggtgatgtcttgcaaatacctatcttctcgctccatcacgatcccgagaacttcgaggatccggagttcttcaatccggagcgcttcgcagatggtcatgctctagagtcccgtgtttacatgcccttcggagtgggtcctcgcaactgcattggcaatcgaatggcactgatggagctcaaatcaatagtataccagttgcttttaaatttcaaactattgccagctaaaaggacttctcgcgatttgctgaacgacataaggggtcatggtttgaagccgaagaatggcttctggctgaagttcgaggcacgtcaataaagtcttatgcatcggagccaactaatcgaatgcggtttttcaattaaaactcataggcagccgttcattaatcaagtggctggatttttcaattaatttaagctgggtgtcttaagtgaatcgcgaattgaaaagaaatctggtgaagaagtgctggtgacatgcactggatggaaaaactcgctcgctggttgtccggtccagtggcgccggaaaaaccaaaactccgggaaatcgggagcagctgaggggccaaaagtttttgacattctcgttatttatgtgcttcgagggtatttaggcaaaagtttttcggtccgcctaagcagttaatacgatattgatttattcgcaagtcaacagctgtgagataataaatattatgcagctcaaatacatatttggaatctagcgacttgttgtccagggccaaaagtttctgttttgattcccagatttgatttataaagcggccagcgattaagctttgatccagccagacttttggccaacttttataagcttaaagttgatgggggtggcacatagcccagggagaagtagctcggcgactttccctctcgagggaaacaacaaaagttttgcccaggcgcgggaaagtcaaagtttttctttgcgttttgcatttttgccgctctggataattattttccttgccactgacgttcgacaatttttttcagcacagagagaataatttaaatgagacaacagcagaattgtataagctttaaactggcgaataatagaaaaaccatattaactataaacaagtgttacaaaaggtatttcattgagaaaacaaacaccacgggcgtcagttaaatacaaacaagcagcgcaatttgaaaagcatcacgttaattatctggcaattactgctaatggaaaatacgataggcaaatataattttacatatgtcagggagtaatatttcacaaaaaccaaaatattcattttcgattttatgttatgtaa

SEQ ID NO: 32915 - DNA, 1557 bp, DROSOPHILA
atggatcagtcgatgatagcactcgctttgtttataatactgctcgttttgctctacaagtggtcggtggccaaatatgatgtgttcagtgaaaggggtgtgtcacatgagaagccatggcctctaattggcaatattccgctgaaagccatgatcggtggaatgccagtactaaagaaaatgatcgaattgcatacgaaacacacgggatccccggtatatggtatctacgcccttcgagatgccgtcttctttgtccgagaccctgagctcatcaagctcatcggcatcaaggaattcgaccacttcgttaaccacaatagcatgcacaacaatatacaggagtcgatactctcgaaaagtctcatttcgctgcgcgatggtcgatggaaggagatgcgcaatatcctgacacccgcatttacggggagcaaaatgcggataatgtacgacctgatccaatcgtgcagcgaggagggcgttatccacatacaggagcagttggagctgtcgcaggacgcgagcatcgaactggaaatgaaggattacttcacgcgattcgccaacgatgtgattgctacggtggccttcggcatcagcatcaactcgttcaggcgcaaagataacgagttcttccgcatcggacaagccatgtccaggattagcgcctggtcggtggtcaaggccatgctatatgccctctttccacgactgatgaaggttctccgcatccaggtgctggacaccaagaacattgattacttcagcagcctggtcaccgcggcgatgaggtaccgccaggagcacaaagtggttaggccggatatgatccacctgctgatggaggcaaagcagcagaggcttgccgatctgagtgataagtcgaaggatgagctatactattccgagttcaccgccgatgacttgctggcccagtgtctgctattcttctttgccggctttgagattatctcgtcgtccttgtgcttcctcacccatgaactctgcttgaatcccacggtgcaggacaggttgtatgaggagatcatttccgtgcacgaagagctgaaaggtcaacccctgacctatgacaagctgaccaagatgaagtatctggacatggtggtactcgaagcactgcgtaaatggccaccatcgatttccaccgatcgtgagtgccgtcaggatattgatttgttcgatgaaaatggtcagaagttgttctccgcccgaaagggtgatgtcttgcaaatacctatcttctcgctccatcacgatcccgagaacttcgaggatccggagttcttcaatccggagcgcttcgcagatggtcatgctctagagtcccgtgtttacatgcccttcggagtgggtcctcgcaactgcattggcaatcgaatggcactgatggagctcaaatcaatagtataccagttgcttttaaatttcaaactattgccagctaaaaggacttctcgcgatttgctgaacgacataaggggtcatggtttgaagccgaagaatggcttctggctgaagttcgaggcacgtcaataa

SEQ ID NO: 32916 - protein, 518 aa, DROSOPHILA
MDQSMIALALFIILLVLLYKWSVAKYDVFSERGVSHEKPWPLIGNIPLKAMIGGMPVLKKMIELHTKHTGSPVYGIYALRDAVFFVRDPELIKLIGIKEFDHFVNHNSMHNNIQESILSKSLISLRDGRWKEMRNILTPAFTGSKMRIMYDLIQSCSEEGVIHIQEQLELSQDASIELEMKDYFTRFANDVIATVAFGISINSFRRKDNEFFRIGQAMSRISAWSVVKAMLYALFPRLMKVLRIQVLDTKNIDYFSSLVTAAMRYRQEHKVVRPDMIHLLMEAKQQRLADLSDKSKDELYYSEFTADDLLAQCLLFFFAGFEIISSSLCFLTHELCLNPTVQDRLYEEIISVHEELKGQPLTYDKLTKMKYLDMVVLEALRKWPPSISTDRECRQDIDLFDENGQKLFSARKGDVLQIPIFSLHHDPENFEDPEFFNPERFADGHALESRVYMPFGVGPRNCIGNRMALMELKSIVYQLLLNFKLLPAKRTSRDLLNDIRGHGLKPKNGFWLKFEARQ

SEQ ID NO: 32917 - DNA, 2993 bp, DROSOPHILA
gcgccaataccgacaagtatcactatgtggcaaccaccgaaatccgtagcaagatgggacggaccaagagccttaaaagtgcgattttagataaattgctgccggagttgtttctggatgtcatgggatgcatgatgaacagtcagaaattagtgccagtaagagaagggtaagtgacgtaaaacgccacctatatctcaagaataggaaccagcttttgagaaggccttttaaaatcttttacaaattattgtattaggttaaatacttcgtttcgaacacatgttagtgggtttaatattacatttttgaaattgcaatatttaactactaagaccatatttatttttactgtagaacctgtgtgggccactatatgcccctgattcaggaccatggttctcgtatgggatgcggccttcgtgtgaaaggtagggacgagaaggagtcaaatattatcctgctctgccacttttcgcgggccagtgtgaacaacctggttccgtacgaagagggccagattcctgccgggaagtgcgccactggaccgagccagatgtaccagttcctctgcagcgaggatgagtacgtcgatgccaacagcatggtggtggaatcgaatatgccgtccagcgaccaaatacaagtggacatttagggtgttatataattgtacacttataaaataagtgcttatgcacttaatattcacataaatactattcatgaaataaaaacctttaaaatcgatgacagcaaattattataacggatttaagtcatgcgaaatgctagaaaaatttgatcagaacttatccatttttttctgtgtacaaaagtgtgcctaatagtgggcctaaccaattgctttactgattggtggtcagtaaatggtcgcaattgatagctccgcttgaccgataatcgatttggccccttcgaactctataagaggcagcctcgggtggccggagctggctaaactggctgcctcgtcgagatgttggacaccaagtggccgccgctgttgctgctgctgatgctactgggccagcagctccaggccttcgactactgcgatcccaccctgtgtcccggacccgagaggcacatagcctgcaacaatttcggggtaagatgcatccaatggtcagcgagccacgtcgctgatgactgatttctttaggcgctggccgacatctgcagtccggatgcccacattgtgcggataacgacggctcgtcgcaccatgatcctcaatgagctgaacgagtaccgcgatcggatagcgaggggcgatctgatgggcttcagcccggccacccggatggccacgttgcagtgggatcaggagctggccagttttgcggagctcaatgtgaaacgatgtgccctggtcaatgatcattgccgcaatagcgagcagttccgcaacgtggcgcaggtggtggccgagggcggttggcagggggatcccttgccgccgagctcacccagcgaccctcccaatccggaagctccaattccggtggagtaccacacggaagatgaggtgatcaaggccacgctggagcaaatgttcgccgaatacaaggaatgcagcatgcgggacattatagcatttagtccgcccaataacaggtaggtggagacgcctggattaagtattgctcacctgaccagaatccttcgcttgcgcgtcagcaagtgcattgcctacttcacacagcttgtccgggatagcaccacccacgtgggctgcggcattctccgccaaaccaagaacaccaccaacgaggccggtcagtcgctgtccagtgtccaccagtacatgacctgcaactttgtccggacaaatgatgtcaatgccccggtctaccagagcggcgatcgtccggccaccgaatgccgcagcggacggaatccggtttttattaacctgtgctccgtcaacgagatctacgactcctccaacctggctggcctcttctgaactggcggactctgcaattccaaggccaatcactaactttaataaaaatgaaaggactttaatgattgctgtctttttttagtgggcgccttatacccacaatattataccaagtattattcgatagtcagattcattatggaataaggacattgggcagtcagttagaaaaatgatatttattaaagataccaactagcaaacattttgtgcaatgtttaacaaccagttaagcatttaaagaaaactttagtttgtttcacaaattgtttttaaagcatctccacttattggcgaattagggagataattctattcttctataggaactttcttttttcttactctgcgtctttctgtttgaattgttcgttttacaacagagattgaaagttgagccagagtagtatcgcaccttagttccatcaccattattataatgaacccgattcgcccgacgccactcacctgcaacgtggcattcaaattgaaatgtgttttccccgctccgttttggcatctgcccgccgggttgcctacctatctatgcacctacctacccacattctggatcctggaacctgcattctgcatcctgcgtcgagcatccagcagaatccctgttttcgcacctcgccgactgccagtcaaagtcagcggacgcaaaaagttcgttgacaactttagcaaacaaattttttatcgcgcacagccaaacaccttttccctctttttgcatttgattcacacattttttttcaatttcgtttttcattgttggtatggtgaaaaaatggtgaacgcagcgtgaaatacgcagcaaccgcaaatagtgctcactgaaaaaatacaagaaataaattgcgagtatttccagctaaatacgaacaactatttttcttttcactaatgatttattcaattgtaaaatgtgctcgattgtgtccagagttaatggtaaatcgtatcgtgagagtctttgcatgtgcagtatttaagc

SEQ ID NO: 32918 - DNA, 876 bp, DROSOPHILA
atgttggacaccaagtggccgccgctgttgctgctgctgatgctactgggccagcagctccaggccttcgactactgcgatcccaccctgtgtcccggacccgagaggcacatagcctgcaacaatttcggggcgctggccgacatctgcagtccggatgcccacattgtgcggataacgacggctcgtcgcaccatgatcctcaatgagctgaacgagtaccgcgatcggatagcgaggggcgatctgatgggcttcagcccggccacccggatggccacgttgcagtgggatcaggagctggccagttttgcggagctcaatgtgaaacgatgtgccctggtcaatgatcattgccgcaatagcgagcagttccgcaacgtggcgcaggtggtggccgagggcggttggcagggggatcccttgccgccgagctcacccagcgaccctcccaatccggaagctccaattccggtggagtaccacacggaagatgaggtgatcaaggccacgctggagcaaatgttcgccgaatacaaggaatgcagcatgcgggacattatagcatttagtccgcccaataacagcaagtgcattgcctacttcacacagcttgtccgggatagcaccacccacgtgggctgcggcattctccgccaaaccaagaacaccaccaacgaggccggtcagtcgctgtccagtgtccaccagtacatgacctgcaactttgtccggacaaatgatgtcaatgccccggtctaccagagcggcgatcgtccggccaccgaatgccgcagcggacggaatccggtttttattaacctgtgctccgtcaacgagatctacgactcctccaacctggctggcctcttctga

SEQ ID NO: 32919 - protein, 291 aa, DROSOPHILA
MLDTKWPPLLLLLMLLGQQLQAFDYCDPTLCPGPERHIACNNFGALADICSPDAHIVRITTARRTMILNELNEYRDRIARGDLMGFSPATRMATLQWDQELASFAELNVKRCALVNDHCRNSEQFRNVAQVVAEGGWQGDPLPPSSPSDPPNPEAPIPVEYHTEDEVIKATLEQMFAEYKECSMRDIIAFSPPNNSKCIAYFTQLVRDSTTHVGCGILRQTKNTTNEAGQSLSSVHQYMTCNFVRTNDVNAPVYQSGDRPATECRSGRNPVFINLCSVNEIYDSSNLAGLF

SEQ ID NO: 32920 - DNA, 5234 bp, DROSOPHILA
atccatgggtaaatagctgcagctcgggaagagttatttatgttttatgatttatgtaattttgaagctgtttcgtactgccaatatcagagataaacaaaaccataatgcaagtacaccacccgcttatcgtattggccataaaatcgaacattgattagacgcgggtccgagtgagtgggttttgtcagacataggacttgcagtctgttctgtgttcgcctggaaagcgattgtgttttttcgagctaaattccctgacttatcgagaatgtgggcattctgggttggattatctatagcctttgccatatttttcattacttccttcgttgtttgcattagacgcaggcagaaagcagcgcgaaatgttggctacacaatcagcgaaggcgttggtaattacattgactgagcaatgaatggattgccaattacacttaaagaaatagtggtgcagcaaattttgttgagccttatcttatttgtctaagtgtgaagtattttcttattcttggttttcgatacaggcagtatatgttttaaaaatattttttatattaattataacacaaaatgtatttatagtgcatataaacgtgacacgggcttgttattacccttttctataaataaattgagtggataagattaaaagctcaaaaaaaaaaaaaagcacagaaattacaccaaaaaaaccccaaatgaaattaaaaaagcaaaatataatatacatcaagtttttatgacttacattaatttagattaatataatattgaaaattttttatagtgctgaaaggggaatttttgttcacactgatgagtctaatcaaaagtgggagcttatcgagtctgcgattcgcggttggcgatgattcagaatcattggcgcagctattttctgtttctaatttctttttttccgttctttctactttcagcgcctgtggtggtgacctccgccacccacacggctcccggcggatatccggtcacacagctgcctccgccgggctatccatcgagcaatgcctacgtaactgcgacctcgtaccccgtacagaccaccgggtaagtacggagcctaaagtgctgccgcaaactattctaatgtccccattttcccagcagcaacgtgactgtgcagatgcccatgccgatgagccaccagaaccagcagcaaatgccaatgcctatgccgatgccggggtaagtggaagctagtgctccagcgaaacgcaaatattaattgatatgcttttatccattgcagtcagcaaacgcatggcgtggcgtatccgacgtatcctggcgccggggctgccaacatgaatccgccgccgtatgacatgtccatggctaatccaggacctagtgttatgcccgctggatatgagaagcaagctccctacaatccccactttggccagtgaaatcgcactgtgaactgaggatcccctttccgtctcgttatagcttttttactcagctgaacactttactttccatgttttcttgcataaaaaactccaaactcctggtaaaaaaccaagtgaaagcgatcgcacaacgagccatttttatattccatgtgatgtatgtaaagtgtacatataacttaagcgcaaccttctatttatacatctatattaagcaaatccaaaacgaaaaccaaactgaactacatgaagtgttaattgtaataaaccagtgaagtgcacatcaaatgcaactgaagcacatttgtttcgatgtgcactttcacaaaatcacaaaaacaagaaatgcaaacatgttttcaattacttctgcactcggatgtttttgccaatgaaaaagcagtgggtaaatgggtttctaaagattactagtggatttacattccaatcgaaagtttttatttattattttcttagttgagatgcgcaattatgttttatgtttttattaccttgatttaattgagtcatgcgaaattccaatgttttacacatattgtaaattttatatcttaataataaccttctagctttttggattccttgttgaatatggctgtctgttggaaataaaactagtaatagctctatatattatagaattgtcacgctgcatttaggcagttacaatggattttacgctgtatagatagatcagttttcttcaaaatagttttgtattttgactccagcaatcggcaccagatgttgtaccttctttcagtccttataatagtccttatcagccaggaggcgttatctacggattactgcaacaaggatctgtgtctgccggaaataacgcatatcgcttgccgcaattatggcgtaagtttggcttcccatcaagttgctcagtaactgtctgagtttcgcaggactttgacgagagttgtggcagtgaagcgatcatcatgaagtttcccatgcacatgcgtgcccatctcctggccgtcctaaacgattttcggaataccgtggctaagggtcagtatccgcacttgcgtccagcttcccggatggcaacactccggtggcacgaggaactggccgggttggccaagtttgccttgaggcgttgtgactatatagacgattactgcagcaatacggatgagttcagctatgtgtcgtatatatatggcagtaccaagtggttgcaactggagaaggatcccatatccgttttggactttgtcttgcagttttggatggatgatgttaagggctgcacgatggcccacatcaatgccgagaaaccggccaaggatgggtgagagtgagagattcaagaggttgatgtatatctaatccacgattgcagacagtgtcgcggctacttcacccagctggtccaagatttggctgcccatgtcggctgtgccatgatgctgcgaaaaggccaaacgagcggactctatcagtacggtgtcctatgtcacttttcgcgcggaaagatcgccaatgagctggtctaccgggcaagtgctcatccgggaagtcgctgctatgcgggaacccactccatatatgaggggctctgctcacccgaggagcatgttaatcccaatgccctgcaattgggcgagcttaattgattcgttcatgctgcatttaataaatctaggtcataagatagctctacacgttagttaaattacttttgccacgagatgaagatgtggtatctgtacctctttttgttaccgctaactgcgagcttgataccagaagatgatccccattgtaagcccaatctctgcatgaactcggaaattcatgtgggctgctttcaacctaaggtagtagctatcattactcgagattgtagtgatttaaccacctcatctgcaggcagtaggtgagcaatgcgggaaaaacaatctgttcctgaacgttaatggagccttgaagactggcatcctcagcaggatcaacatgttgcgcaactatgtggccagtggagtgggcaactattcggtagccgctcgcatgccgacgatgggctgggattttgaactgcagaggctggcggatagacaggttcgccaatgcgatgagacgggaaagttttgcgccaataccgacaagtatcactatgtggcaaccaccgaaatccgtagcaagatgggacggaccaagagccttaaaagtgcgattttagataaattgctgccggagttgtttctggatgtcatgggatgcatgatgaacagtcagaaattagtgccagtaagagaagggtaagtgacgtaaaacgccacctatatctcaagaataggaaccagcttttgagaaggccttttaaaatcttttacaaattattgtattaggttaaatacttcgtttcgaacacatgttagtgggtttaatattacatttttgaaattgcaatatttaactactaagaccatatttatttttactgtagaacctgtgtgggccactatatgcccctgattcaggaccatggttctcgtatgggatgcggccttcgtgtgaaaggtagggacgagaaggagtcaaatattatcctgctctgccacttttcgcgggccagtgtgaacaacctggttccgtacgaagagggccagattcctgccgggaagtgcgccactggaccgagccagatgtaccagttcctctgcagcgaggatgagtacgtcgatgccaacagcatggtggtggaatcgaatatgccgtccagcgaccaaatacaagtggacatttagggtgttatataattgtacacttataaaataagtgcttatgcacttaatattcacataaatactattcatgaaataaaaacctttaaaatcgatgacagcaaattattataacggatttaagtcatgcgaaatgctagaaaaatttgatcagaacttatccatttttttctgtgtacaaaagtgtgcctaatagtgggcctaaccaattgctttactgattggtggtcagtaaatggtcgcaattgatagctccgcttgaccgataatcgatttggccccttcgaactctataagaggcagcctcgggtggccggagctggctaaactggctgcctcgtcgagatgttggacaccaagtggccgccgctgttgctgctgctgatgctactgggccagcagctccaggccttcgactactgcgatcccaccctgtgtcccggacccgagaggcacatagcctgcaacaatttcggggtaagatgcatccaatggtcagcgagccacgtcgctgatgactgatttctttaggcgctggccgacatctgcagtccggatgcccacattgtgcggataacgacggctcgtcgcaccatgatcctcaatgagctgaacgagtaccgcgatcggatagcgaggggcgatctgatgggcttcagcccggccacccggatggccacgttgcagtgggatcaggagctggccagttttgcggagctcaatgtgaaacgatgtgccctggtcaatgatcattgccgcaatagcgagcagttccgcaacgtggcgcaggtggtggccgagggcggttggcagggggatcccttgccgccgagctcacccagcgaccctcccaatccggaagctccaattccggtggagtaccacacggaagatgaggtgatcaaggccacgctggagcaaatgttcgccgaatacaaggaatgcagcatgcgggacattatagcatttagtccgcccaataacaggtaggtggagacgcctg

SEQ ID NO: 32921 - DNA, 1911 bp, DROSOPHILA
atgagtctaatcaaaacgcctgtggtggtgacctccgccacccacacggctcccggcggatatccggtcacacagctgcctccgccgggctatccatcgagcaatgcctacgtaactgcgacctcgtaccccgtacagaccaccggcaacgtgactgtgcagatgcccatgccgatgagccaccagaaccagcagcaaatgccaatgcctatgccgatgccgggtcagcaaacgcatggcgtggcgtatccgacgtatcctggcgccggggctgccaacatgaatccgccgccgtatgacatgtccatggctaatccaggacctagtgttatgcccgctggatatgagaagcaagctccctacaatccccactttggccaccaggaggcgttatctacggattactgcaacaaggatctgtgtctgccggaaataacgcatatcgcttgccgcaattatggcgactttgacgagagttgtggcagtgaagcgatcatcatgaagtttcccatgcacatgcgtgcccatctcctggccgtcctaaacgattttcggaataccgtggctaagggtcagtatccgcacttgcgtccagcttcccggatggcaacactccggtggcacgaggaactggccgggttggccaagtttgccttgaggcgttgtgactatatagacgattactgcagcaatacggatgagttcagctatgtgtcgtatatatatggcagtaccaagtggttgcaactggagaaggatcccatatccgttttggactttgtcttgcagttttggatggatgatgttaagggctgcacgatggcccacatcaatgccgagaaaccggccaaggatggacagtgtcgcggctacttcacccagctggtccaagatttggctgcccatgtcggctgtgccatgatgctgcgaaaaggccaaacgagcggactctatcagtacggtgtcctatgtcacttttcgcgcggaaagatcgccaatgagctggtctaccgggcaagtgctcatccgggaagtcgctgctatgcgggaacccactccatatatgaggggctctgctcacccgaggagcatttaaattacttttgccacgagatgaagatgtggtatctgtacctctttttgttaccgctaactgcgagcttgataccagaagatgatccccattgtaagcccaatctctgcatgaactcggaaattcatgcagtaggtgagcaatgcgggaaaaacaatctgttcctgaacgttaatggagccttgaagactggcatcctcagcaggatcaacatgttgcgcaactatgtggccagtggagtgggcaactattcggtagccgctcgcatgccgacgatgggctgggattttgaactgcagaggctggcggatagacaggttcgccaatgcgatgagacgggaaagttttgcgccaataccgacaagtatcactatgtggcaaccaccgaaatccgtagcaagatgggacggaccaagagccttaaaagtgcgattttagataaattgctgccggagttgtttctggatgtcatgggatgcatgatgaacagtcagaaattagtgccagtaagagaaggaacctgtgtgggccactatatgcccctgattcaggaccatggttctcgtatgggatgcggccttcgtgtgaaaggtagggacgagaaggagtcaaatattatcctgctctgccacttttcgcgggccagtgtgaacaacctggttccgtacgaagagggccagattcctgccgggaagtgcgccactggaccgagccagatgtaccagttcctctgcagcgaggatgagtacgtcgatgccaacagcatggtggtggaatcgaatatgccgtccagcgaccaaatacaagtggacatttag

SEQ ID NO: 32922 - protein, 636 aa, DROSOPHILA
MSLIKTPVVVTSATHTAPGGYPVTQLPPPGYPSSNAYVTATSYPVQTTGNVTVQMPMPMSHQNQQQMPMPMPMPGQQTHGVAYPTYPGAGAANMNPPPYDMSMANPGPSVMPAGYEKQAPYNPHFGHQEALSTDYCNKDLCLPEITHIACRNYGDFDESCGSEAIIMKFPMHMRAHLLAVLNDFRNTVAKGQYPHLRPASRMATLRWHEELAGLAKFALRRCDYIDDYCSNTDEFSYVSYIYGSTKWLQLEKDPISVLDFVLQFWMDDVKGCTMAHINAEKPAKDGQCRGYFTQLVQDLAAHVGCAMMLRKGQTSGLYQYGVLCHFSRGKIANELVYRASAHPGSRCYAGTHSIYEGLCSPEEHLNYFCHEMKMWYLYLFLLPLTASLIPEDDPHCKPNLCMNSEIHAVGEQCGKNNLFLNVNGALKTGILSRINMLRNYVASGVGNYSVAARMPTMGWDFELQRLADRQVRQCDETGKFCANTDKYHYVATTEIRSKMGRTKSLKSAILDKLLPELFLDVMGCMMNSQKLVPVREGTCVGHYMPLIQDHGSRMGCGLRVKGRDEKESNIILLCHFSRASVNNLVPYEEGQIPAGKCATGPSQMYQFLCSEDEYVDANSMVVESNMPSSDQIQVDI

SEQ ID NO: 32923 - DNA, 3288 bp, DROSOPHILA
cgcgctccggctgtcatttaacccatatcacgccgcgggggtcggggacctgtggtcccaatcaaaatcgtgcgagagagccgatttttaatcggcttgcgcgtatatcttttcacatatgcattttgaatttcttccatttttcacacatacactcacaccagcaccaatatatttgccttgtcagcacgagaggaatgcagagcgagacagagagagagtgtgaggcaaaagttggcgatactcccgacggcagcaactaaatttcgaatttcagctctggcaattatgtaaacgatgtaaaacaggcactaaaataatttgcttacatttggcgacgtttgcgggcacgctttacgatatttcgtgagctgttaacgttttattggcaaatgaaaaacacggcgttgcgttcacttcaatttttctcgacggccatgttggtagtatcgatatgccggggcacaatcgatggcttggcttcaatagtctaaggactgttcagagtctgatgaactcgagtcagtttatatattttaataataaatattgtgttatttcaagaggcgctcgtagttgaaaacactattcgttttgggaatgttttatatattagactatttaaatcatatcatattgttttgacattattttaagtatgcattaacgattctgctaattattgcaaaaataaaagttattagttctatttaaattaaaacagaaacaaataataacgatcaattattagttattggtgagcattaattcattttttattgttcagtttccttaattgaccatatgattttaattttaggatctgaatgtagtgtggacgccagtttgctgctatcgcaaacgttatcgatagtacggtgttgcagtattttattacacccgactaacaaatgataataagcagatccacggtcacactttccactttgtgtccatccgactgaagttaaaaataatagtttaattgggagtttccaaaatgcagcgcgacgaaaagctttttgagctgacgctggatacggtccttcagcgtctgaacgacctgaagctggcggttctctcgatgatccaaaaacttgagctagagtacgagaccatcaactggccgactttcctggacaactttgccattatctcaagtcacttgacgggattgacgaaaatcttggcaaaggagcagtgtccgccgctaagaaatcgaacggtcctgccccttctggtctccatggaccgggatgacaccctcatcaacatcacagagggtcgggtgccagtcttttcacacgacattgttccagactatttgagaactcggccggatccgattacggaacagaaaatgctgcagaacgaacagaaggcggcgaacctcaccaacgacgctgccatgaaacaggtcactcaatacaacaaggtcgtctcccacgtcctggatatggtcagcaaagcgcgcgaggagtgggaaatcgagagctcttcgcgcaccggcatccagcagacgagtagcatggccgacacacagctcctggtggccgccgtgggtatgggaaaaggactcaagctgaccaactatggacccggacctggcatgatggtaccgccttcaattcgagcaccctcgccaatgggtggacccgctatgagtcccggcaacgtgcagcagcagctgggaaaggcgccatcggctgtgaaaacaaacatcaagtccgcaaatcaagtgcatccgttctctcgataaaaaacatcagtttattagctattatcggttccatctggcggaatgtttcgtcgtaataagttatatgtatattcctaattctaaaactaggattacgcaaacataaacatgaacaaatttaaatggatcgtctcctccgactcagacttcttatgttgctggctgtgcgtgcttctcattgatgagaatctcgtgcagcttaatatctttcggcgtggaggtgtccaccagctccaggcacagcgctcgtccgccatccttttgtttagtcattcgccgcacaatgccaataaacttctgacccagcgacagttcccggaatcggacgcagttctccttgctccatactacatcagtcagttgtatgcctgaaagaagatcgtttttagttctaacgccaaactgctgaagttctcttgaacttgccataaagttgtgctggcaatgccatcttgggcagctttcttaactccggatttagagttttcagttgatcacaggcaattactccatcgtcgcccacgtcgacgaaacgcacgtgtataatctcatcgtaaatcttgtgaatacttacgctgcaagattaacagatttagtctgcgtttttattgcaagacctgaataagttcttaccgatgatatacgccttcggagtcaggggcagcgtaggcctctccaatggccagttgtgaaggctgcactcccttggctgccgtcttttggcaatgctcttgtaaattcttcatcaaagtctgcagctggttatagtatttgtacggttgcacctgcggaagaatcgcacatcataatcggagtcattaatttgctgatgattgacttaccgcaaagtgaccgggattgacggagagggcaacgcgcacctcgaaataggcacccactgccggaatagcctcgtaatccttgagcatgagagacgaaaaggtgctgccggtcgatcttgcggatggtttcttctctggcgtcaccgggggagtggtagcgacaaggtcgctgctgctgctctgattcgagaacacggagctgaagctaccgcgtctgggcagctggacattggagctcaggagcgtatgatcatacttctccggatgaatggagctgtgtgggtggggaatcaagggtggggcgggaacaagccagattgggggattgggaggcaattgttggtttcaaggtttaaaaaatctgattgctttcgggcttattgggtagtaaagtacatatgtgtggcagcttaagagtatatttttcagattatatacaaagatgtgcatgattttagggtaagcttacaaaacgtagatcgaatttgtgttagcaataacatatcaagtcagttccggtttattgaagcacttatagagatagcattaagcaaaggatcaattatattgttaatataaacttatagggcaccagtcacaattcagatgtcgttgtttagggagcttgatgacgatgtgattagatgacattgaccataatgatatagaatgaatagacattgtaca

SEQ ID NO: 32924 - DNA, 1230 bp, DROSOPHILA
atgcagcgcgacgaaaagctttttgagctgacgctggatacggtccttcagcgtctgaacgacctgaagctggcggttctctcgatgatccaaaaacttgagctagagtacgagaccatcaactggccgactttcctggacaactttgccattatctcaagtcacttgacgggattgacgaaaatcttggcaaaggagcagtgtccgccgctaagaaatcgaacggtcctgccccttctggtctccatggaccgggatgacaccctcatcaacatcacagagggtcgggtgccagtcttttcacacgacattgttccagactatttgagaactcggccggatccgattacggaacagaaaatgctgcagaacgaacagaaggcggcgaacctcaccaacgacgctgccatgaaacaggtcactcaatacaacaaggtcgtctcccacgtcctggatatggtcagcaaagcgcgcgaggagtgggaaatcgagagctcttcgcgcaccggcatccagcagacgagtagcatggccgacacacagctcctggtggccgccgtgggtatgggaaaaggactcaagctgaccaactatggacccggacctggcatgatggtaccgccttcaattcgagcaccctcgccaatgggtggacccgctatgagtcccggcaacgtgcagcagcagctgggaaaggcgccatcggctgtgaaaacaaacatcaagtccgcaaatcaagtgcatccgttctctcgataaaaaacatcagtttattagctattatcggttccatctggcggaatgtttcgtcgtaataagttatatgtatattcctaattctaaaactaggattacgcaaacataaacatgaacaaatttaaatggatcgtctcctccgactcagacttcttatgttgctggctgtgcgtgcttctcattgatgagaatctcgtgcagcttaatatctttcggcgtggaggtgtccaccagctccaggcacagcgctcgtccgccatccttttgtttagtcattcgccgcacaatgccaataaacttctgacccagcgacagttcccggaatcggacgcagttctccttgctccatactacatcagtcagttgtatgccataaagttgtgctggcaatgccatcttgggcagctttcttaactccggatttagagttttcagttgatcacaggcaattactccatcgtcgcccacgtcgac

SEQ ID NO: 32925 - protein, 252 aa, DROSOPHILA
MQRDEKLFELTLDTVLQRLNDLKLAVLSMIQKLELEYETINWPTFLDNFAIISSHLTGLTKILAKEQCPPLRNRTVLPLLVSMDRDDTLINITEGRVPVFSHDIVPDYLRTRPDPITEQKMLQNEQKAANLTNDAAMKQVTQYNKVVSHVLDMVSKAREEWEIESSSRTGIQQTSSMADTQLLVAAVGMGKGLKLTNYGPGPGMMVPPSIRAPSPMGGPAMSPGNVQQQLGKAPSAVKTNIKSANQVHPFSR

SEQ ID NO: 32926 - DNA, 9338 bp, DROSOPHILA
gccacagctggttttccatccagctgctggtcgtttaagtagccacccagcaccctcttgagctcacgatcggacttacgctcattcaaatgctcattgaagttcatcctggccagggactcgaagggatcatccacatcctccttacccagacaatcatcgtgcattccctgtccaatggcgccgtcatcaatcggaaatttgtacaagttatctttgagcatctgggcggcaacattcgtgggaccaaccagatagtgttccgatttcaccttgccagcagcagccattttttctggaattcccaatttctgctccatgtcgtccagccgctggaagagcagttccggatcggagaagtatcgctgctccgaaggcgccaagtcccttcgctcgctgccgaacggccgcctgggccacgaggtatccgcatatgagtacctgcgtactgatcttccttcggatcggtcggtcgcttgtccaacgctcgccaggattgccattgccagtaatgaaagtcggactgcgctgtggctcaaaatccgcgttgacattgttctcataagcacaacatcttgctggaattatcgccgagtcatgtttgtaaaattccttatattcgaaatcagttccatgacatgttatgctcattggttgtttttatgtttaaataattttttaaaaatcttctataattaaagcgaagaattctaaaaaaaaaagtatacattaaaagtgaattggtagattatttgcccaaagaactcaagtggtcaagtagagtttaaatggtagtaaataatctttttaatattttgttgaaagaaggcagtcatatttttcttgctcaacaaaggacgacgtcaggtcgaacttctaaggacacggagaaggcttgttcaagcaacaaagcataacgggaatcagtggttggaaggttactggaaatcggactggaaagtggaaatgctgtgctcattcagttcgtaagccacagtcgagtttttcacgtccaactgtgcagcacatcctcgaaataaatggacatattaaatacaaactaaattataataaattgtgaagttaagcgaaaaacagagatttcccatatctccctgaaagttttgtgtcataggcgtgttttcaagagtttgcgaactcatcgttaaatgacactcaaacgcaaaaggcacaaaaactaaacgctaaacggggtccgaaatccttagttaatgccttaaatacaagcggaaaccaagtgttgcgaaaccaagtgcaatgactgtcctcaatatgcacgccaaaatgataatattgattttatttttctacaacggttcctacaactggagtaaaaagcagtaagaggctcctggcttccacgcatttcctgcggcaggcggcgtttcatttcatgtgtgtgccgtcctgcgattgataatactcccaattataataaggtaatgggctcctggcttctgtttcctggcatctccaactccctctattgattttgccacttggccaaatgactgcggtaaccaggcaatttgagccaaaaagcaacaccaacggggagcagacaacaaagaaattgtcaataaaagtgcgcaagagcagggcatccccaacgcgacagtggcgtcccggaatataaggcccagttaacaactagtaatatttcaataaatgaatgatttcttttgtaaaaaaagaagaagaaaacacaaatatttggaaaaaaaaagtacacaaagcctagtgctcttttctagaattaatgtttatgaatttaatataaacatttattgcagtcattttgtcaaggtagtttctttagacaaagctatatattaactttatatttatttatcttaacttgttatcataagtaatatttaagtcaggacatcgagtatacacatttgaacgccctggagtgttgggctctgtgttctcgttcctccttccaggacttccagcctctgttccgtgtggaatgtgcatagccttccagcgcctgcgccctggtgtcctgttgttttgatagtaaaaaggacatggcagtgcagttgtttacaaacacgcacgccagacacgcgacacgtggcgcagggaagtttctggaaggcatatcgggtcatggatgttgctggttgatagtgggagtgaggaacaccgaatctcgagcggatcccatatattacgcccattccaaaggccggccggctgggacgactgggccgactgggccgacgtggcggatgagcgatgtctgccaacggtgacgtcatagtgggccagcgacattgaactagtttcatcagcacaccgctcacatttcaccagtgacgtcaatggagaaagccgcacgtattaagccaataaggcttaagtcagctcgacctccgaactttgtcttccgatccaataaaaaacacaactcatccaataacattggcgaccaattgttattggcctgcctcgtaaatcgtctgccacaacagccctgagcttcttttgcgtcgcgaattcattagctaattaataattatgaattcgattgatagtttatttatttgaagcttagacatctgaatcgatgtcgcactgtttatttgcttccttctttggctttcaaaataggattgctggtccaaataaattgttatggaacatagataagtgtggtctgtggtaataattttcatttttttatgattactctccagataagtaatcatatttcgagtagccttaaagcactcaaaatagctaaataatcagccaattccctttcaaagtgcgcagtctttataactctcaagaactaagttttcttcaagccgaaaagcaaaaaaaaaaaacttaacagattgccttctcgcattgcaattgctgtttttctagtttcattctcttagatatttgaataaccttgggctggtgcaatacactaaattcaaattgcaccatcaaaaaatgtttgtctacatctcggcaaacacggcgagaatttcattacgacgcagttataaagatctcgactatatggccgctatataaaacgacccaccaaatggggcggtatggtgggcgcagggggcgtggcagtcggcctggttggcacaatccgtaaacaaaaacaaatgaaaagcgccacagcatttggcattgttccgcatggcggtggggcctcgagaaaaatgggatcacaagaacagctgccaaaggcgccctaggcctacgatttggattacagtgtagcatgtaatatatttttaatctgttcagacaaagaagtaataaagttgcatataagtttaaggattataagtttaataatgacatttgtttaactaacgaagcactaactaaacaattatgaaaacatttctaagcagtattcttttcacctgtcattatctagtcttatgtttatgttatgttaaaaattcactgtaattaaatcttttgttttcgcaaacaagctgtttacattgtgtaaatcccattggatgccaattagtctgtgacactcgcaaaagcctgagcccgtgcgtaagcatttataatattaagtatacgtaaacggggggaggggcccttttcccgggcaaccttggttgcttgcaaccagttggcatttcgagtggcacctaagctctttcgcattcgatttagggaaagtttacagtttgcagaatgccagagtatctgaaaagtgcatccaatcgtgtgataacaaatacaatctctggggacaaattttccactctgtgggtcataaaattcaaggttttccattctaaggggagagctaggcacaaaaatagatcataaacaacagttgactcagtgcgataagcttagtaactaaaatcaaagtaagcaaatcaactgattgcgtgactgactgactatcatgggtgtttattattatcatgagctcacaagaccgaatttatttgctaattgtacaccgcaaaatacaaatatatacacatatataatatatattcagacaactttctccctttttgttgcagtgttcccgtcccaaacaataacatccgatttgtttacctacgaagcgttggagcaaaacaaaaatcgcgttcaagtttggctccccttatcgttttttttttttgtttgtgtggaatttttcaagcttttttgcgtcataaattgaaatattttcgagttcacgccaatcgcagtcgacgtcggcagagcggcgagaaaggcagagatcgtttatatagcgcaatactcgcagccgattttcatcagtcgcaacgcgtctctcgttctcagcggagctcctgagcggaaaaaccaagggaaaatcggtaatcggaatattcgaaaatagcgcagtgcaagtgcaagtgcatctagtaactagtagacgaccagtgacgaacgaaatccacttcgatgtcgattaattcgccaatatcgttgaaaaactcggacctgcattgaacaggcaaaagcgacaccagtactaaattaaaacaaactaaacgcaccaattgtttaaataaccaaagcgttaagaaaaaaatcaaagacaaagccacggcaaaaggcgcagacaacaagttgtttgcttttagttcgcgttctccttattttattttccttccgttcgattttccacgcacgcgcgtcgcagaaacgccaaattgaaaacatcagcagttgaaagccaactgttgcattctaccaaccgaaacgaatccaatttaagccagactttccagtgctaactaacacacaggccgtcgagcattgagagtttagtgtggaaaaaagcgaactaagcccgagatcttacctggaaaacaacgattttgttaatagggcttaggccattgtatgggtaagtaatcaaatgcattctactactatgtgcatattaaaaatatatcattgggaaaatacaagagatagctaagaactgctaatcagaaaaactgggaaatcgaatatcgcaaatcatagacaggtattttagtaggaaaacatttgagcagacgaaaaacgatatcgccagactcggaacaaagaagattactcagtactaagaatttataagaagaaaatcacctcatcttacactcgaaacaatcgttcattgcattgccaaaatgtagtaaaaaaaaaaaataagaataataaaaataagcttgacttaggactagtactcttttcttcgagtgttgacagtaccataaatttccaagaagacaattaactcatcttacactcgaacaatactggtaactctgttcatcacattgcacaaaatatgacttgaattaagactaattcacttttcttcgagtgtagtcagcgaaataaacagcaacacattgttgtgctgggggaaaataaacttcatagcccactctcacatccggtgattcacgtgcaattagcaacaattgcgcgtgcctgcgattgaatacgcaaatgcggctattttgaatgtgccacatatgcggatccatgagctgactgctccacattgagtcacattacaaacaaagcgaattcgcaacgcagaatgtctaatcagaaacacacatagacacaaacgcgcagataagcgcatttttcagcatgtcacatgctgggtgacctgacctccactccatgctgctccaaacccatactataccatagcatctggcggcacgtggacactttgaggggggaaaacaattgtgcctttgtgctcgtacttgtacttgtgctgtgttttattgcctgcaactaacgaaagttagcaatcagcacttggaacccatttataagtgcccgcccacttcctgcctcccgttgataacaagtacttacgtagtatgtatatggacattgtattgtcgtatggcaatttgtttattgcccgatggcagagcgactgtacatctctcggacttcatgacaacacactgctcgaaaaactgggtactagacagccagatggttacgaggtgtttttttgcgtacctagggataattacatttgacttgactttgataagggcacaactacctgctgagctgcgatttgcgctaattgctggagggatttcctaatcagtgaaaagggatcaccaagggtgcaggtcaagggtccgtaatctcaagattgaaaagcagatgaagcagagggaatttatataattgatacttaatggaacctaccttatcttgttataaaaagaaggaatgttgaaaggttatattccgctgaaaaacaaacacctgtcgtccttttttctttgtaatccacatctgactatattcttattatttgttattccttaccaattcatcttctaatcaactttcttgatcttatttcttccacaaatgaaatacagatcagtctaaaccaacgacgaaatttggagacgagccggacctcctgttcaagcgagcgcagggccggattagtctgatcagtgctggagctggagccgcccaggctggccaagctgcccaacaaccatcactgcattcaagccaacaacagttcgccaacattcaactagacgccacgctcaatgactgcgaaagtggctatgtgcccaccgtgggccgctggggctccgaatggccgagttgactcgccgttgccaccagtcaccgacgggaggatgggggagtggcctctccggatgaggatgaagaggccactgccgccgccgctgcccacgatccgttgctcccggcggatcagcagctggcggatgcgatggtgcgcggaatgggattgggattgactacgacgcgatctgatttatccgcaactgagcacccaactgcacatggcactggcgccattcgtcgcacaccctccacctccagcgaggaggaggaagaggaggaggacctcgaggaccacgagctggtgccttcgcccgatctgacatcggtggatagatcggagcgttactccgacatcaggcagctgttggccagacagcagcccgtcgcagctgctctggagggcatctccggcgctcaatggatagtgggcgacggctatgacctagaggccttcaatcaggtaaacggagtgtggcccctgggtcatccgctgccgctgcccgactggtcgagctcggagtccgctggcaagggcaccctgatcttcgacaatgtctggcagtatgaggagctgaacggaatagtggagaccacgctgcagcgaatgctggaggagacgcactacaatacggtcaacctcttcgttgacttctatcgcagctttaagcgcacgcgtcgctccgatctgcgtagcttctttcagttctacgatgtgcccatcaacagacgccatcacatgtgcgtctcgctggcgttcgaaatcatggccaggatggtgcagatgttcccggtgctggccaactacttgtacgttgtgtcctgcgaggagcaggtgatggactgcaacgactacgttcagttggacgaggagtgcggccttaattcggtggacgcgggtgtggagaaggagcacgtcatggtcgccatgcgcatcgccatcggcgatcgacggggtgtgatgatcctggacccaggttaccatgtcagccgagcggtgactgttatgcaggatcagagctatccgcacactggtgagttgtaatctccgcttagcctattgtaatacatatatactgatggatgcaatatgtttctaggctggttcacccaatccaaggagccgcatctgcagcgtgattattgctatgcctacagtcagcagaatgggaaattcgtggagtggaaggagcgcgagatccgtggcgaggataccagctacaagacatcgctgatctacgtggcccaagagtacatcacggccatcgacgtgaccgtgcgccgcaatctggtgtacaacttccgatcgctactctcccgcgatgccaagggtcaggtctatgcgggcatctacttcccgctggtggccaatgggcaggaggcctacctcaccatcttctacgacggacccaatgagcagcgagtgcggacgaagctgatgttcagcgcgtttaaagtgggcaagggaaaggtaaggatcactgatagctatagccaatggttacccattactaacccagttattatcacccatcagctgccggactatgtgggtcaacatcttagcaggctggcgccgcaattgaagataccgctgccggaattgaccgaactgtgcaaatccctggccgaggtggtcaccgaccagagcttcatcagccaggtgctggccataaacgatgacatcggcaacatgtccgtggagaattgacagttaaaggagcctaaggatgtcgctgctacggaaacggaaacgaagatggaggaacaggcgataaaagacattgacaacgcagctgcaacttagagttccgaacctatttgaatactttgaatactttgtcctttccacagtaatattctttttagtagcatataggcacctcttacaccagcacacacgattcaagtatatattcaatttagtctagtatatatttcaaaatatttattcacctataaacacgacaacacgctctatatggtaatcccaactgaattatttaatcgaaagcgaaacgaaattttattcaaaatatttaaaagaaatgcgcaaagtttagacttcaatgtttcgcttaggttcttctaatttcaaactatatatatacttatgcgcaactatataatggcaaaattagttataactggtatcaaggcaaaacataaattgtaattgttgtacgaacatatttccgtttaaacacttaaatgcactgtactatttcggttcaataaataaatcagctagcaaaagaaagaaggtattttgttgggagacttaaaacataattttacttgaactttaactaacatgaaaagattaaaggtgtattattgccttaaatttgaatttcgatatttttatggcagtgatatcgattagtttggtaacagtagcttaacatagaatagacatgttactgttaataagcttagctcaacatttaggtattttttgcacacgcaaactctgtttctctgtaataaaaacatttgtttaaaaacctcaggtttcttatgatttacaaatgaataaggacaaaataaagaaaaatgcatactgacggcagatatcgatgattacatcaacaatcgatattttgaaacagagaaagtgcagccctggtgccatcgatgtatatccaccttggattttcgcttgtctgcagttatttcaattaagttgtttcaaatcagcgtttttgtga

SEQ ID NO: 32927 - DNA, 3057 bp, DROSOPHILA
agtttttcacgtccaactgtgcagcacatcctcgaaataaatggacatattaaatacaaactaaattataataaattgtgaagttaagcgaaaaacagagatttcccatatctccctgaaagttttgtgtcataggcgtgttttcaagagtttgcgaactcatcgttaaatgacactcaaacgcaaaaggcacaaaaactaaacgctaaacggggtccgaaatccttagttaatgccttaaatacaagcggaaaccaagtgttgcgaaaccaagtgcaatgactgtcctcaatatgcacgccaaaatgataatattgattttatttttctacaacggttcctacaactggagtaaaaagcagtaagaggctcctggcttccacgcatttcctgcggcaggcggcgtttcatttcatgtgtgtgccgtcctgcgattgataatactcccaattataataagtgttcccgtcccaaacaataacatccgatttgtttacctacgaagcgttggagcaaaacaaaaatcgcgttcaagtttggctccccttatcgttttttttttttgtttgtgtggaatttttcaagcttttttgcgtcataaattgaaatattttcgagttcacgccaatcgcagtcgacgtcggcagagcggcgagaaaggcagagatcgtttatatagcgcaatactcgcagccgattttcatcagtcgcaacgcgtctctcgttctcagcggagctcctgagcggaaaaaccaagggaaaatcggtaatcggaatattcgaaaatagcgcagtgcaagtgcaagtgcatctagtaactagtagacgaccagtgacgaacgaaatccacttcgatgtcgattaattcgccaatatcgttgaaaaactcggacctgcattgaacaggcaaaagcgacaccagtactaaattaaaacaaactaaacgcaccaattgtttaaataaccaaagcgttaagaaaaaaatcaaagacaaagccacggcaaaaggcgcagacaacaagttgtttgcttttagttcgcgttctccttattttattttccttccgttcgattttccacgcacgcgcgtcgcagaaacgccaaattgaaaacatcagcagttgaaagccaactgttgcattctaccaaccgaaacgaatccaatttaagccagactttccagtgctaactaacacacaggccgtcgagcattgagagtttagtgtggaaaaaagcgaactaagcccgagatcttacctggaaaacaacgattttgttaatagggcttaggccattgtatggatcagtctaaaccaacgacgaaatttggagacgagccggacctcctgttcaagcgagcgcagggccggattagtctgatcagtgctggagctggagccgcccaggctggccaagctgcccaacaaccatcactgcattcaagccaacaacagttcgccaacattcaactagacgccacgctcaatgactgcgaaagtggctatgtgcccacctcaccgacgggaggatgggggagtggcctctccggatgaggatgaagaggccactgccgccgccgctgcccacgatccgttgctcccggcggatcagcagctggcggatgcgatggtgcgcggaatgggattgggattgactacgacgcgatctgatttatccgcaactgagcacccaactgcacatggcactggcgccattcgtcgcacaccctccacctccagcgaggaggaggaagaggaggaggacctcgaggaccacgagctggtgccttcgcccgatctgacatcggtggatagatcggagcgttactccgacatcaggcagctgttggccagacagcagcccgtcgcagctgctctggagggcatctccggcgctcaatggatagtgggcgacggctatgacctagaggccttcaatcaggtaaacggagtgtggcccctgggtcatccgctgccgctgcccgactggtcgagctcggagtccgctggcaagggcaccctgatcttcgacaatgtctggcagtatgaggagctgaacggaatagtggagaccacgctgcagcgaatgctggaggagacgcactacaatacggtcaacctcttcgttgacttctatcgcagctttaagcgcacgcgtcgctccgatctgcgtagcttctttcagttctacgatgtgcccatcaacagacgccatcacatgtgcgtctcgctggcgttcgaaatcatggccaggatggtgcagatgttcccggtgctggccaactacttgtacgttgtgtcctgcgaggagcaggtgatggactgcaacgactacgttcagttggacgaggagtgcggccttaattcggtggacgcgggtgtggagaaggagcacgtcatggtcgccatgcgcatcgccatcggcgatcgacggggtgtgatgatcctggacccaggttaccatgtcagccgagcggtgactgttatgcaggatcagagctatccgcacactggctggttcacccaatccaaggagccgcatctgcagcgtgattattgctatgcctacagtcagcagaatgggaaattcgtggagtggaaggagcgcgagatccgtggcgaggataccagctacaagacatcgctgatctacgtggcccaagagtacatcacggccatcgacgtgaccgtgcgccgcaatctggtgtacaacttccgatcgctactctcccgcgatgccaagggtcaggtctatgcgggcatctacttcccgctggtggccaatgggcaggaggcctacctcaccatcttctacgacggacccaatgagcagcgagtgcggacgaagctgatgttcagcgcgtttaaagtgggcaagggaaagctgccggactatgtgggtcaacatcttagcaggctggcgccgcaattgaagataccgctgccggaattgaccgaactgtgcaaatccctggccgaggtggtcaccgaccagagcttcatcagccaggtgctggccataaacgatgacatcggcaacatgtccgtggagaattga

SEQ ID NO: 32928 - protein, 517 aa, DROSOPHILA
MCPPHRREDGGVASPDEDEEATAAAAAHDPLLPADQQLADAMVRGMGLGLTTTRSDLSATEHPTAHGTGAIRRTPSTSSEEEEEEEDLEDHELVPSPDLTSVDRSERYSDIRQLLARQQPVAAALEGISGAQWIVGDGYDLEAFNQVNGVWPLGHPLPLPDWSSSESAGKGTLIFDNVWQYEELNGIVETTLQRMLEETHYNTVNLFVDFYRSFKRTRRSDLRSFFQFYDVPINRRHHMCVSLAFEIMARMVQMFPVLANYLYVVSCEEQVMDCNDYVQLDEECGLNSVDAGVEKEHVMVAMRIAIGDRRGVMILDPGYHVSRAVTVMQDQSYPHTGWFTQSKEPHLQRDYCYAYSQQNGKFVEWKEREIRGEDTSYKTSLIYVAQEYITAIDVTVRRNLVYNFRSLLSRDAKGQVYAGIYFPLVANGQEAYLTIFYDGPNEQRVRTKLMFSAFKVGKGKLPDYVGQHLSRLAPQLKIPLPELTELCKSLAEVVTDQSFISQVLAINDDIGNMSVEN

SEQ ID NO: 32929 - DNA, 2531 bp, DROSOPHILA
agataatttcgtactcttttgtctaaaccaaaataaaaattttgctgcacttcctgcgccaaatcgttgtggttacatttgccttgaagccaaaagcagttatatggcagttaacgccacgcaattgatttttggactggactgcttgagtgttccgacatttacgctgctattcgataaatggaacaaacggaactatggtaatgccacctcaccatggcagccccaaaaagtcaactggacaacaagtcaacgcgactaactgcaactggtagcggttaccaagcaaagtatggttatgattataatgtatatgactatgtaaatgttctttaccttaacatgctctagtttgtagtcacatacaaccgtcaagtgccagtccaacctgtagttgactcacgtcacgcagcgatgtttccgttgaacctgaaagcatttcaatcactgcaatcggtccaatgactttctgaagtcatggccaccgtttaaagtagtctggtggctcagacgcagtgtttgctaattagtcggacaggcaaaagtagggaacccatatgatcacgtgctttttctcacctctctttaacaccatacacacacccatctagacggcttacaaactgtcgtagaacgatgccatgactgcgaagctgtaagaatcgaggcggtaaacgttgccaagagctcgagcggacaacatgaaccttttgtgagttaataagccatgaagtgttatttttagtttccactgacatatcatctactctaatatagggcgaaaatcatactgttccttttcactctcgaggctgtgagtgctttagaggccaatctcacttcgtggcgacatcacagaaggcaaaagcggttcctgatttatcagaatggcggtgtaatcaaggttggacatcaaatatttattgagtattgatcgatatacaataatacatatgtgtcactacagttcgtttcgggatgtgcatttccggctccgtttatggagaaaaaggcatggcgccagttggtttggctgatgaactttcactatcagttcaatgagccgcaaactccaatctactggtggaaactttgggatggctcccgaaatctcaagggaccattgacccaacctgctcctccatccgttccagctcgtcttttggtggacgagcctcaacttctgctattcaagttcgccgaggcctatatgaaccagttgggtcaaaatggtagtgcctgtctggatcgtctgatctgcgagaatggtcaggtggatgagcatagtggactctacgcccaactgctccacaggttgttaaggtaagttgactttcgcgtaagcttaagccatagataactctatgtaacctttagacctcatcaaacgctggacgtgagatatttggatgcctacaggatgggtcgccatggcgttgactgccgaaatgcctttccagaggcccatcattgcattttggatgactacctacacctccatgagcgaggaccgaaacagagttttctttagccgaaaaattcgatttctctttggacacgtggcgctggctgtcagtagttcgataacatttacatgacatgtacaaaactaattaataataattaaatataataactaaataattatatacagcgagtttatctcaattactgcagctctatttgttgctggccatgtgttcttcctcatcatcgtcgtcatcatctgagactcgccaagccaattggtagtacttcttatcattgctagtcaaccaaaggagaccacatcggttggtgcagaagttgcaggtgaagagctgtttggatgtactgccacgcctataaagggtaattggttatcaatcattcaagacaaactataatatggcagtgtaagagctaaacccgcaatttgaagaaaggattacgattgaagtataatcttgagaaagcatttccttcgtaagctgtcttcactgtacttcttgcgataggtccgtttctcccaattagaaagcggaccggtttgggcagtatcaaaacaattaccacatgactaacgccaagcaaacattagcgtaaccccaacccaccttttcacaaccatgaagtagtacgaggtatagagacatctggagcaggtggagttcgtgcagcgggcgatgggtccattgttgatgtgggaactgatgtacggttctgggagcagacgatgcatggctacattctcatatacgggcgtgaagcggttcagcgtctgcagagcgtgcagacagtcatcgtagagcgaaacgcggttctccaccgacggaaccggaaatactgtgcgggtgccaaccggaagaagcaacctggtgctggtctccagctcgcggacccaaaacaaacccttgcgatgcacggcgctagaaagaggatatgtttgcaaattacttaatttcttgtttttttttactttgcttgctacaatttaactgaaatccctttgtcatgattaaaggcaatctgccaggaaatgcacatcaccg

SEQ ID NO: 32930 - DNA, 477 bp, DROSOPHILA
atggagaaaaaggcatggcgccagttggtttggctgatgaactttcactatcagttcaatgagccgcaaactccaatctactggtggaaactttgggatggctcccgaaatctcaagggaccattgacccaacctgctcctccatccgttccagctcgtcttttggtggacgagcctcaacttctgctattcaagttcgccgaggcctatatgaaccagttgggtcaaaatggtagtgcctgtctggatcgtctgatctgcgagaatggtcaggtggatgagcatagtggactctacgcccaactgctccacaggttgttaagacctcatcaaacgctggacgtgagatatttggatgcctacaggatgggtcgccatggcgttgactgccgaaatgcctttccagaggcccatcattgcattttggatgactacctacacctccatgagcgaggaccgaaacagagttttctttag

SEQ ID NO: 32931 - protein, 158 aa, DROSOPHILA
MEKKAWRQLVWLMNFHYQFNEPQTPIYWWKLWDGSRNLKGPLTQPAPPSVPARLLVDEPQLLLFKFAEAYMNQLGQNGSACLDRLICENGQVDEHSGLYAQLLHRLLRPHQTLDVRYLDAYRMGRHGVDCRNAFPEAHHCILDDYLHLHERGPKQSFL

SEQ ID NO: 32932 - DNA, 2895 bp, DROSOPHILA
tttaaggtatgtactctttggccatacgattgtataaatcaaaatcgtgctttaagcaaaagcgaaatactgcattcaaaactagaaacaccctttgctagggtaacacatcacccctaaaaagtgtcaaaaagaccaacttctctcttttccaaagaaccatttctcgaggaggaaaggtgaacgtggccaattagcagctgcgcccatcggcatcgtcatcaacatgcaaacatctcgcctgtttgaccagttgcgagttggcttagtcgtgccacagtcacttccgtcacataataaattcataacaaatcacacggacgcagagccaaaccaaacaccagtccgcagtctacatggccggtgcatgcgacattataatgccacattatgttgccagtgcgtgaaagaaccgtacatcagagcatcatggcgacaataaatcaaatatccgcacactcacacatgcgatgtggttatagcctcgtctcctggatctacaggctcccagttctccaaatccccaactccccaaggctgcgggtttggtttttgcatgtatctggtattcgcaaaattattacacttgacatgattgaatacgccgctgagtaccagttccagatccccagttccagtgccatctgcaggtgactccagccacctcctcgcaaatcgcggtttgaactacactatgtagttgtgactggacatacacagcttttttaaggtttctgcgggaaattcccgtttacaggccgaatgctgttttgcagtaagttgacatgccgcataaatgtaagtacacgcataattcgattgaaaatacactgcagctaaaaaccattgaaaatttttacaagattttgaactcagttattgattttgtaatcataaatgttgagcgtttataaagcgaatattaaatactgggtgtagtttactaggaattttctatcaaatattttcattttcattcaccccaacctgccgcaggattccacgagctcttccaagttttaggttgtcatagcttaaatatttggtggagccatagactccatctcgtgcgatagccaaacagtgcgatcaccatgtggtattcaacggttaggaacccaagtattgccctcatcaaacagggctaccatattctcgccgaatacaatctggtgaaggaagagctaaagaacatctatgccatacccagttacgcttgtggattgcactggttcggcgtcatctttgtgcacagtggaatctatgcgggcagcgtgtttcgcttctccattctgctgccggaaaattttccggcggacatcagcctgcccacggtggtcttctcgacggaggtcctacatccgcacatctgtccgcagaataagaccctcgatctggcgcatttcctgaacgagtggcgcaaggatgagcaccacatctggcacgtgcttcgctatatccaggctattttcgcggatccagagggcagtatttgcaccggacaatcctcttcgggggatctcgtgatcatggatgaggttagaaacatgaatgccttgaatatgttggccaaaagccggcctgaatacatcaaacgagtccaggagcaagcaatcttgtcgagaaatcttatctacgaccgaccaccaacggaagatccgcactatattatcgtggagccctattgtgcggaacggcatctgaagttcatggaccaactgaagagtccctgttggaaggaggccacttccatggactgctcccagccgtcggagtacctgggacacatcgattcctcgaggcagctggacgaggaagaggcgaatcaggtggagaagctacatcgcggacgtattccggaacaccagcgtgaagagtcggaagtttccctgtagcttaatggagatgctagcatacacgacccataacacatttgttaccctgtattcataaaataaaaatatttattattgtattgtaatatatattaatctttattttatcggatttttgaattaaattttcactttattcgtaaaagtgtttgttttgtagtaatttcagcttatgctattgttagatattaattcaatatttatacaattatattattacaaacacattatccgaagtgagccgtgaatggggtcattcagacttttctaaagagttgcaactaaacaatagaaatttgcatgaatggtcgttaaaaagtacgtgctctaaacagtttaattaaaagtattattatataacaaaaagaagagcgattttattaagtggtcacttgtttttaaatattttagaattagtaataataaatcatttctcccagtgagtcacaaccttcagtgtgtgggtaacatgtatatgacatccctgtttcgccacattagcgatgttaataatgtcatctttcaggtgcaataatcaaaataataataattatgactcgttgcgttgcctgttggcaaagtgaaatgcattcctgttctccttgcttttagctcccttccctttttgcaagtgcatttttaggcgttcgcctgcatgcgatacagtgggactcaaggtaatgggactgcatttcaaatttgaattcttaattgctgttcacattttttgtagctcacatatttataatattctctatacaaattgttttttttttttagcacaatatttaaagtgggttttatttgaatgcccgctgctgtgcataaacgcatcaaaagcctgctttcgcatgcgtgcaactgagtttcaagggagacggcgtcgtcagttggcgcaaatatacaaaagtgacaatctgatttatcactgcactttgccagcaacatcgtccgtggccatgcgagctgtcttcctgccccggatcctccatcccatcca

SEQ ID NO: 32933 - DNA, 895 bp, DROSOPHILA
ccacgagctcttccaagttttaggttgtcatagcttaaatatttggtggagccatagactccatctcgtgcgatagccaaacagtgcgatcaccatgtggtattcaacggttaggaacccaagtattgccctcatcaaacagggctaccatattctcgccgaatacaatctggtgaaggaagagctaaagaacatctatgccatacccagttacgcttgtggattgcactggttcggcgtcatctttgtgcacagtggaatctatgcgggcagcgtgtttcgcttctccattctgctgccggaaaattttccggcggacatcagcctgcccacggtggtcttctcgacggaggtcctacatccgcacatctgtccgcagaataagaccctcgatctggcgcatttcctgaacgagtggcgcaaggatgagcaccacatctggcacgtgcttcgctatatccaggctattttcgcggatccagagggcagtatttgcaccggacaatcctcttcgggggatctcgtgatcatggatgaggttagaaacatgaatgccttgaatatgttggccaaaagccggcctgaatacatcaaacgagtccaggagcaagcaatcttgtcgagaaatcttatctacgaccgaccaccaacggaagatccgcactatattatcgtggagccctattgtgcggaacggcatctgaagttcatggaccaactgaagagtccctgttggaaggaggccacttccatggactgctcccagccgtcggagtacctgggacacatcgattcctcgaggcagctggacgaggaagaggcgaatcaggtggagaagctacatcgcggacgtattccggaacaccagcgtgaagagtcggaagtttccctgtag

SEQ ID NO: 32934 - protein, 266 aa, DROSOPHILA
MWYSTVRNPSIALIKQGYHILAEYNLVKEELKNIYAIPSYACGLHWFGVIFVHSGIYAGSVFRFSILLPENFPADISLPTVVFSTEVLHPHICPQNKTLDLAHFLNEWRKDEHHIWHVLRYIQAIFADPEGSICTGQSSSGDLVIMDEVRNMNALNMLAKSRPEYIKRVQEQAILSRNLIYDRPPTEDPHYIIVEPYCAERHLKFMDQLKSPCWKEATSMDCSQPSEYLGHIDSSRQLDEEEANQVEKLHRGRIPEHQREESEVSL

SEQ ID NO: 32935 - DNA, 2553 bp, DROSOPHILA
tacgaagaaagactgccacagtcgtggctcatttgtttggccgactcactgacaaaagtaagacacaggacaagacaggatatacagaggggtatgcttggaaatgcccagttgtatgttaccctctattctcactcaattcaaaatcatagttagctctacaattatgtacatgccaagaaagatgtattgcaaatatatttcgacttgtaggtatactttttagtcgtgctaaggataaaaaggatttccttaccatccaccttcatttcacatctgagggtatctcattcgcatattagtttgccgttgtgggtggcatgacaaaagaagaagtctttattttcgtggcattcgctgtgatccatttccaccaggacttcatcttgaactagttggcaagtctgagccctgagtccgcactgccactcccacttttgcccccatagtaataagtcatgttaaccgaaaaccgggcgttgtgcgtttttttgttactccaccatcttcatttccccctcccctttgtattttttccagcgcgtggcatcaacaaaaaacttttcgcgcacaatcagttgcgtttcaacgtggcactgcatcattgttgcaactggcaactcctgctgttgctgccgccattgttgcctttacttataatttacttttacttgtgcgctttggctttgtgccgctcgtgtgtcgtgtaaaatatttgcacaacaagccaagaagtcggagggaaacaacgggcaactcgacaatggcacgagcattaaccataatatttttctgtggcaggggaaactccgattctggacatggccatatagtcaaggtttctgcagctgccattgttaatcagcagctggtaaacaaaaagttgcattgagtctcatcagaaagggagtcgcaaatgcagcgattttatgggtagaaatcttatttacttggttggtttcgcttgaaggatatttttctgaagtcacaactagtcgtattgggttttccgaaaatttgtttaatcacttaaattttttaaaacagctcataacaatcccggcaaatcatagaaaatcaagtaattgaagtaataaatcatttactttgcacaccagagcgtgaaactgtaaaactgcgactgaagttgcgattacagatttggcatttttggatatttaaccacgcaagcgacgtctaaacgggaatcacacgcctctgtagccaagaacgtttgcgtggcagtcgaattgtggaagttaaatcgtcgtccttgcggccggactcttgcttgatcacctgatcgttaatcttctccggagcgaactgaccattgaacttggcactccacgtgccgtcttgggcgaacacggctgggcaaccggcagccaattttccaggctccgacggactgatcggggacttgcgaatcaaagaggatacaaagcgtttcatacccatttgcgttaatttcggtaaccgcaaaagacggctaattttggtggaatttcttacttttcaaagtagttagaacgtaaaaattgctctgtgactgctagccaaagtattaaaatgtataagctgatatgaagtctttttcatcgctcattcctcaaaatggaaacgaaataaatcaaagaactttcaactgctgagttggctggactttcttgactcgcggaactcaattaggcccagttgcaattgctcgattcgataatcgatttgctgcccatttttatggcagagcagagctgagcgaaggaaaattgcttaccagccagaattgttaaccaagtcataaatacatatctatctgtgtgcatgtctgtgtggtctggcaacttttcgacccacccaacctaaactcaaaatgcaatgcgagcgctttacaagtttttgggccccgaccacccatttgcaggctcatccacaaaccatatccacatccacatcctagtctagtcaggccacgaagctaaaataattgataacagattatgttttacaatctaagcagggagatatataatacgaacattttaatggccacgtgcagcggggcacacgtagtgcacacccggatccggctccatcaacccggggaccccggtttccgagttactcgcaaaacgtttgcaaaacttaattatttcgttttgacctttttgtcttcatgtgtgtgtgtgtggtgcgagtgtggatgtggatatggggttagggtccggggatcagggggtcggaaagtacgcagagagatggacagttaaaaaagttatttattttatggcccaaagttactttggcctgttttatggctccaaaggccggaagggcgaggaaactctaggcgcccagtctattgccagtgctgatgagctgaaaacatataagcagggactactacaaaatagctatatttctcaattaataaaatatgtaaaaaatgttagctgatattttatattgtatgctttaccttaagctcagaagttaattggtaatgaaataatttatctaacaactgccgtcatcactacttgcttttgcaat

SEQ ID NO: 32936 - DNA, 553 bp, DROSOPHILA
gtcacagagcaatttttacgttctaactactttgaaaagtaagaaattccaccaaaattagccgtcttttgcggttaccgaaattaacgcaaatgggtatgaaacgctttgtatcctctttgattcgcaagtccccgatcagtccgtcggagcctggaaaattggctgccggttgcccagccgtgttcgcccaagacggcacgtggagtgccaagttcaatggtcagttcgctccggagaagattaacgatcaggtgatcaagcaagagtccggccgcaaggacgacgatttaacttccacaattcgactgccacgcaaacgttcttggctacagaggcgtgtgattcccgtttagacgtcgcttgcgtggttaaatatccaaaaatgccaaatctgtaatcgcaacttcagtcgcagttttacagtttcacgctctggtgtgcaaagtaaatgatttattacttcaattacttgattttctatgatttgccgggattgttatgagctgttttaaaaaatttaagtgattaaacaaattttcggaaaacccaa

SEQ ID NO: 32937 - protein, 85 aa, DROSOPHILA
MKRFVSSLIRKSPISPSEPGKLAAGCPAVFAQDGTWSAKFNGQFAPEKINDQVIKQESGRKDDDLTSTIRLPRKRSWLQRRVIPV

SEQ ID NO: 32938 - DNA, 3930 bp, DROSOPHILA
agctgagcgaaggaaaattgcttaccagccagaattgttaaccaagtcataaatacatatctatctgtgtgcatgtctgtgtggtctggcaacttttcgacccacccaacctaaactcaaaatgcaatgcgagcgctttacaagtttttgggccccgaccacccatttgcaggctcatccacaaaccatatccacatccacatcctagtctagtcaggccacgaagctaaaataattgataacagattatgttttacaatctaagcagggagatatataatacgaacattttaatggccacgtgcagcggggcacacgtagtgcacacccggatccggctccatcaacccggggaccccggtttccgagttactcgcaaaacgtttgcaaaacttaattatttcgttttgacctttttgtcttcatgtgtgtgtgtgtggtgcgagtgtggatgtggatatggggttagggtccggggatcagggggtcggaaagtacgcagagagatggacagttaaaaaagttatttattttatggcccaaagttactttggcctgttttatggctccaaaggccggaagggcgaggaaactctaggcgcccagtctattgccagtgctgatgagctgaaaacatataagcagggactactacaaaatagctatatttctcaattaataaaatatgtaaaaaatgttagctgatattttatattgtatgctttaccttaagctcagaagttaattggtaatgaaataatttatctaacaactgccgtcatcactacttgcttttgcaattaaaaacgaaaccagattttccaagtgaataattttcccatctttatttaggactttttagcttattttcttcggccatcacacttagttcttgccttagcttcatgtggccacgtgaattcactggagcgtggatcataaatcaaaaacgaaatggattcgaaacgggaacgaacgtggagcagagccgctggccattttattcatggaatgatatctgggaagcgctcttgggttccaacggatccgcagcgctaccattgtttcggatcatggactgatggggcgaatccaattgggactgcgattgcgactgtgattcgttcaaaccggtagcatctgaaccctccttattctccatcgcccgcaacacggagtccttgtagaacgcggtctcatcgatcttgcgccggtacagtccggtcgggtgctccggatcgaaaacaatgtccggacgtatatcgctgtcggtgaccaggacccgagcaccgggaatcggcaggaacttgaacagacgcttgcgcaacttgggcatgtaggtgaccctctggtgatcgggcacctgggtcagtcgactgggaatcacctccggcagctcaatgggatagtccatcagtcgcctctccggcggtagcttctgcttgatggcctccagttggcgtgcggtcagctgcatcggtcgttcgccatccttccatcgctcctggccactattgaaggcgatcttcttgttgttcttcaattgcttgcggatcacccgcttggctgcacagttgtaggtgatcttgggcacgtacggaggaaccggatacgcccgaatggaaatgggatgtcgctgcggctggctcagcatgttaatgtacttggaatcggcatacatgcttatcggcttgccctgctttttggaagaagtgggtttcttggtgggcttgggtctatctttgcgtcccattaggaagacatgacgatggccttggccctcgacatggcgccaatccggctcacagagtcgctttcgactgatcctttcaaatggcaggcggcgaaacttcaggcgcttctggtcatcaatcatcagctgtagtcccggcacactggtcttaccagacggacagggacacacattcggataactggtgcagtagcgacctggagccggttccatgctgatatggcgtcggatcagtcgattgggcttggtgggcacacaggagtggcgcagaaacaggtgcggattagggcgtggcgcctttgtgacgggtacagcatttgcggccaactcaaagatgtttgtatgggtgtcgcagggaccggcatccttgggattacgccagcagccagacagattggaaatcatggcgtgtgtggtcggtcgacgatcgcgggcatctggatgggtgtgattgcaatattttatactgatacaaatctcttacaaaaattaagacctcatggtttttataatttaactaacttactatctgttctttccactacttacttgaaaggaagatacccttttgcaagttcgggcgcttgaagagcctctcgatttccgccggaagttcgtaaaaatgatatggcggtggtttaatggagacgcgactatgattcgtgtgcggcttggcgaatacggagcccttggtgcccttcagtcggagatacggttccgggggcactccgtaatgatttgggggcagttgccagcccctccatttggtcatactccgatcgatgtgtagccttcgacgttccggatacggattctttggcgtcttgtcgaaacccgtaatgtggcggtagtgatcaaaggtggctttgctgaaggcctctcgtctgttttctggaaaaaaagaattcgttttcagcccattttgaaactgtaagaccacttacccttctggcagaactcattgtaatgctgaccggccaacttaaattgcttctccactcgcggtaaattttcctttctaatacgattgcctgaatagaaggtttattaatgaatgtttcgatggtattttaaacaagtccttcttacgggacaccataaagagcggcagactcatccgtgtggccacaaaattctgccggtcctcattattgatcttcagtgtgctcttctccatgtttgctgtactactttatttcttaaatatatacattaactttaccgagttttgtgttactacagaaatgtttgctatttgaattaagcccggtatactaagatttatataactattcacaaacctattcatgatacatggcggcaatgattggaaacaaattaatggccaataaatggtttctaataatttaggcagaataacaaattgcccaatgtttcggtattgtgccgaattccaatgtatcgataaatcgcaacactcagatttagatggtaatccatcctagtagatatacatatatatatttccaaaggtacaattctgactaaatgcccaatatatcaatgtatgcgattcgcttggagtatacttcaccaacgcttttacaaccgattcgatgttcaatttattgtttgtttatcaatttgcagggacaaccaaagccatcaattcagaccaatttaaattgcagaccattcgacaaccaaataatttggttacgctacccagatatcccagatatccgtacacacgcccctcctccttgccgagaatatttgtaaatatatcagtacgcccacatctgctctcacatatagtggccacataattagcgtagccaagcgaactgattaacttgcattcaacgattttcaattgaatttcgcagttcgttgatttgtgccaaaaaaaaaaaaaaaagatgccaccgtgtacaaaaaattcgcaacaaaaagctgtgtgtggtatgaaaagcagcgactgccgtgcaatttcaatctcaatcgcgagcgaagggcgggaaaatgtgggcgtggctccagccagagaagcccgaagcggagcactggctttttgctgcatcgaagaatgggaaaatatgcaaccgggcaaatgatgaatgtgaaatgtgccattaattaatttgattaaatgcaggcaatcagtcgagcgagggcagcccaaggggtccaaataaaatgaagcgtgaatccag

SEQ ID NO: 32939 - DNA, 1707 bp, DROSOPHILA
atggagaagagcacactgaagatcaataatgaggaccggcagaattttgtggccacacggatgagtctgccgctctttatggtgtcccgcaatcgtattagaaaggaaaatttaccgcgagtggagaagcaatttaagttggccggtcagcattacaatgagttctgccagaaggaaaacagacgagaggccttcagcaaagccacctttgatcactaccgccacattacgggtttcgacaagacgccaaagaatccgtatccggaacgtcgaaggctacacatcgatcggagtatgaccaaatggaggggctggcaactgcccccaaatcattacggagtgcccccggaaccgtatctccgactgaagggcaccaagggctccgtattcgccaagccgcacacgaatcatagtcgcgtctccattaaaccaccgccatatcatttttacgaacttccggcggaaatcgagaggctcttcaagcgcccgaacttgcaaaagggtatcttcctttcaaatgcccgcgatcgtcgaccgaccacacacgccatgatttccaatctgtctggctgctggcgtaatcccaaggatgccggtccctgcgacacccatacaaacatctttgagttggccgcaaatgctgtacccgtcacaaaggcgccacgccctaatccgcacctgtttctgcgccactcctgtgtgcccaccaagcccaatcgactgatccgacgccatatcagcatggaaccggctccaggtcgctactgcaccagttatccgaatgtgtgtccctgtccgtctggtaagaccagtgtgccgggactacagctgatgattgatgaccagaagcgcctgaagtttcgccgcctgccatttgaaaggatcagtcgaaagcgactctgtgagccggattggcgccatgtcgagggccaaggccatcgtcatgtcttcctaatgggacgcaaagatagacccaagcccaccaagaaacccacttcttccaaaaagcagggcaagccgataagcatgtatgccgattccaagtacattaacatgctgagccagccgcagcgacatcccatttccattcgggcgtatccggttcctccgtacgtgcccaagatcacctacaactgtgcagccaagcgggtgatccgcaagcaattgaagaacaacaagaagatcgccttcaatagtggccaggagcgatggaaggatggcgaacgaccgatgcagctgaccgcacgccaactggaggccatcaagcagaagctaccgccggagaggcgactgatggactatcccattgagctgccggaggtgattcccagtcgactgacccaggtgcccgatcaccagagggtcacctacatgcccaagttgcgcaagcgtctgttcaagttcctgccgattcccggtgctcgggtcctggtcaccgacagcgatatacgtccggacattgttttcgatccggagcacccgaccggactgtaccggcgcaagatcgatgagaccgcgttctacaaggactccgtgttgcgggcgatggagaataaggagggttcagatgctaccggtttgaacgaatcacagtcgcaatcgcagtcccaattggattcgccccatcagtccatgatccgaaacaatggtagcgctgcggatccgttggaacccaagagcgcttcccagatatcattccatgaataa

SEQ ID NO: 32940 - protein, 568 aa, DROSOPHILA
MEKSTLKINNEDRQNFVATRMSLPLFMVSRNRIRKENLPRVEKQFKLAGQHYNEFCQKENRREAFSKATFDHYRHITGFDKTPKNPYPERRRLHIDRSMTKWRGWQLPPNHYGVPPEPYLRLKGTKGSVFAKPHTNHSRVSIKPPPYHFYELPAEIERLFKRPNLQKGIFLSNARDRRPTTHAMISNLSGCWRNPKDAGPCDTHTNIFELAANAVPVTKAPRPNPHLFLRHSCVPTKPNRLIRRHISMEPAPGRYCTSYPNVCPCPSGKTSVPGLQLMIDDQKRLKFRRLPFERISRKRLCEPDWRHVEGQGHRHVFLMGRKDRPKPTKKPTSSKKQGKPISMYADSKYINMLSQPQRHPISIRAYPVPPYVPKITYNCAAKRVIRKQLKNNKKIAFNSGQERWKDGERPMQLTARQLEAIKQKLPPERRLMDYPIELPEVIPSRLTQVPDHQRVTYMPKLRKRLFKFLPIPGARVLVTDSDIRPDIVFDPEHPTGLYRRKIDETAFYKDSVLRAMENKEGSDATGLNESQSQSQSQLDSPHQSMIRNNGSAADPLEPKSASQISFHE

SEQ ID NO: 32941 - DNA, 2648 bp, DROSOPHILA
attccaatgtatcgataaatcgcaacactcagatttagatggtaatccatcctagtagatatacatatatatatttccaaaggtacaattctgactaaatgcccaatatatcaatgtatgcgattcgcttggagtatacttcaccaacgcttttacaaccgattcgatgttcaatttattgtttgtttatcaatttgcagggacaaccaaagccatcaattcagaccaatttaaattgcagaccattcgacaaccaaataatttggttacgctacccagatatcccagatatccgtacacacgcccctcctccttgccgagaatatttgtaaatatatcagtacgcccacatctgctctcacatatagtggccacataattagcgtagccaagcgaactgattaacttgcattcaacgattttcaattgaatttcgcagttcgttgatttgtgccaaaaaaaaaaaaaaaagatgccaccgtgtacaaaaaattcgcaacaaaaagctgtgtgtggtatgaaaagcagcgactgccgtgcaatttcaatctcaatcgcgagcgaagggcgggaaaatgtgggcgtggctccagccagagaagcccgaagcggagcactggctttttgctgcatcgaagaatgggaaaatatgcaaccgggcaaatgatgaatgtgaaatgtgccattaattaatttgattaaatgcaggcaatcagtcgagcgagggcagcccaaggggtccaaataaaatgaagcgtgaatccagaggtatggggaaaaaaggggacagttaagaatttcccaatctgaaaagccaaaccaaaggatgagcacccatttaaaatgtagcagactcaaggacagctcaagtacctccatgaaatatgcatgcgataataagaaaaaggactaagtttatattttttatacgccttcaaaacgtttaaaaattatcgaaattcactttaatacaccgggatttgaatataatgtgtaatcattatgctttctcggcgtcttcgtatgtcctaatgacctttggcttaagatcgccattaccgccctttcctttgccctttttgcccgccttcttggccttcttcgcttcctttttagcctttttagctgcctgtttttcgcgcttcgccttcttgcgcagctccactgcaaaaattgaacaagaattatagtaaaatgttaagttttttttgccaaattcatcttacctttgacaattcgagcggtggccagattgacgggcagtggtgcacacttgaagcccgctggtggtgccttggtcagtcggatgaatctgttgcccgtggcatagagcaatcccaagcaggcctgtggacggatgcgggttttgggccaattggtgaagtacagatccttaagcttgatctccgtcttcttcacgccctcgatgtcgcgccaatagtacatttcccgcgcggtggtccgatcgtgaatcttccagctgtgcgtgggtggatacttttgatagctgttcaagcagctggtcttgtccacacagaaccagacatctgcattcggatagaacttcatggcggcttctgtactaaagttcacacgattcaaaatttaaaaccgaaatttagtgatatttttttgcctttattttttcaaagaaaacatctaaatgttgttgagttaaaatcgaaaatgacaaatttgatttaaaatcactgttatgttagtcgagggtaactcgagcaagttgtagtcaaaaaaagtattcattcttacccatttgccagctgcgtgcttttgtatttttccttctgcttcatctgcttaaaatgtattttattccgccggtgagaattaaacttaactaaaagcagctaactaactggctacttactctcggccgtaaaaactaagcaggcacttgctgctaaaagttaagctcgttaggaggagcagtgagttggtagtggaaaagtgtcctgacttgtcacaccaaagcggcaaaggtgatgtcgaaaaactgtcaattaagtttaattattttatgcagcaagagagtggaaaggatctccaaacacactcacacacacacagggggcagctaatgtgcaaaaggcgtcttatgcaaacccagcggagtgaagtgaagtgaaggctaagcaaagtcaattatccaagcagctttgatgcaagtaattggcataatgaaatttcctctccaggccaaccgcaaagaatagaagccgcaggagcagccagagcatccataccagctggctgagcagcagtggcagtagccagtaaccagtaaccataaccgtattagcatatcgcacagttcccgggggttaactgacaagccgtggcttttttaagttcctgtcctgtgtattgggtaaatatttaagcagttcgccagctgtcgcacaatattaatagcatgcattcgggcgcaacttgagccccaaactcgactccagttcttctggccgtggggaaaaaaaaagaaaggaaaaggacaaatagtcggagagcagaccgtggccccaaagtgcaaatatgttgcggccaaagccgcaaaaacgtttaaatattttataagccaaaggcacttgccagccgcagttgcaactgagacagagcagcagccagag

SEQ ID NO: 32942 - DNA, 586 bp, DROSOPHILA
gaaaaaataaaggcaaaaaaatatcactaaatttcggttttaaattttgaatcgtgtgaactttagtacagaagccgccatgaagttctatccgaatgcagatgtctggttctgtgtggacaagaccagctgcttgaacagctatcaaaagtatccacccacgcacagctggaagattcacgatcggaccaccgcgcgggaaatgtactattggcgcgacatcgagggcgtgaagaagacggagatcaagcttaaggatctgtacttcaccaattggcccaaaacccgcatccgtccacaggcctgcttgggattgctctatgccacgggcaacagattcatccgactgaccaaggcaccaccagcgggcttcaagtgtgcaccactgcccgtcaatctggccaccgctcgaattgtcaaagtggagctgcgcaagaaggcgaagcgcgaaaaacaggcagctaaaaaggctaaaaaggaagcgaagaaggccaagaaggcgggcaaaaagggcaaaggaaagggcggtaatggcgatcttaagccaaaggtcattaggacatacgaagacgccgagaaagcataa

SEQ ID NO: 32943 - protein, 168 aa, DROSOPHILA
MKFYPNADVWFCVDKTSCLNSYQKYPPTHSWKIHDRTTAREMYYWRDIEGVKKTEIKLKDLYFTNWPKTRIRPQACLGLLYATGNRFIRLTKAPPAGFKCAPLPVNLATARIVKVELRKKAKREKQAAKKAKKEAKKAKKAGKKGKGKGGNGDLKPKVIRTYEDAEKA

SEQ ID NO: 32944 - DNA, 3563 bp, DROSOPHILA
tggtcattcgagtagcccagcctgcgaaagggtatcggctcaccctcaatctccatgtaatctgcgacgatggaccgcagcgtaaccggcggcttagctgacgtgattagggccctgaccaccttggccacgtattccaggacctcctgcttttccattatgatcgttccacgattctgtcgaagagagcgagaggcggagagaggttaacccattgagcatgattcaagtggcgtggaatgcgtgcgcccaccgccacccccactcccaaatcagcaacaattaagcatgcacagaaaaaaacaacgcggcaaaaagaaatttctaatatactatttctaaactatagggtctaaagggttgaaagggtctaaattattctgcaaacattgagttgcgcctgttccgcgttattctttcagtgtgcacaataaaattggcaaacacagggctagaaaaataagacggacaaggggcaaaaaataaagagaatagagacgagaaagagatggacgaaagcggcggcgcagacgcagaattaaattattttgatctatattttagaatttgatttcgtttgtgcaaatacaaagaatgtgtcgtaatgcgatattgtgagttttctgtccttaccaaactattaaacaattaataaaaatcgagtctcagcaagatatgcactgcaaactgcataaatgagactattggggttttcctgagaaatgaatattccgatgatcccgaacgaagttccttttaacacaacaatacgggagttcattctcgcttgacgtttctaaaattttcggcgccttctagtgagaccgtgggctggatgtcaaaaaatacgtcaagtggcatataaatacgaaaagctataagcaagcactgtcttagggttaacgtattggcgccaaaattcaaacttcttatttttaaaatatatttaagtgttgaataaatgtttcaataaaactctgttaatatttatacaaatgacttaataaaaaactcctgcaatgggtagctttttagtctgtgtctgcttttccatagcgtacaacttgtgttttttcttctttcttggtctcaattcaaatgtattgcctggatgcagttcatcatcgcttgtgccctccaattgaacagcattcatttgtgctcgcggcgacgagctaagagaatcctttctgggaaaggaggacattggcttgactaccacgctcaaggcttccagattgatacgtctgttgtcgtcggaggtttctggttccaaaggagtaaaaggctccatggaatttatggacttcagtggctttcgaggctcctgaaaaggttccaggcgtgcagcagccgccggagcaacctcaaacctctttggcttcattggcctccttagcttcatctgctgctggtgctcctcccacacccgatcctgcagtttcaactcctcctccttggccactgccaagtcgtacaagctctctttttggctcgctggtcgaattccaaaggaaaataccctggatggtggccttggctcgggtttttcgatacgttcagacgtctttgttgttggttctttctctttaacgtggttctccgatacatcgtcgtccgttgagtgacttagcagttccaattccaggtagttgagattcttgagcaccgatagggcatgctgcttggtggccaaaatgatttccagcagcaccttggcacctcctagcttttgagatttcgtcgatatggggcacttattactgggcttaatcctttgagcagatggctttcgcgtcgttggtggacgcgaaggtgcggaaggcggaggacgaggtgttggtggagatgtgggaagcggcttgagcggaggatcggatgagggttccggaaggcagaaagtggtgggactgcgcgttgtggtactaagggtcgtccgatgagtcgtagggcttcttgtggtgaacccgtgggatcgagccgtggtgccacgacaaggcccagacttcctgggctgatcgaccttggagctaatgaccttggccagcaaattggctgttgccacagctggttttccatccagctgctggtcgtttaagtagccacccagcaccctcttgagctcacgatcggacttacgctcattcaaatgctcattgaagttcatcctggccagggactcgaagggatcatccacatcctccttacccagacaatcatcgtgcattccctgtccaatggcgccgtcatcaatcggaaatttgtacaagttatctttgagcatctgggcggcaacattcgtgggaccaaccagatagtgttccgatttcaccttgccagcagcagccattttttctggaattcccaatttctgctccatgtcgtccagccgctggaagagcagttccggatcggagaagtatcgctgctccgaaggcgccaagtcccttcgctcgctgccgaacggccgcctgggccacgaggtatccgcatatgagtacctgcgtactgatcttccttcggatcggtcggtcgcttgtccaacgctcgccaggattgccattgccagtaatgaaagtcggactgcgctgtggctcaaaatccgcgttgacattgttctcataagcacaacatcttgctggaattatcgccgagtcatgtttgtaaaattccttatattcgaaatcagttccatgacatgttatgctcattggttgtttttatgtttaaataattttttaaaaatcttctataattaaagcgaagaattctaaaaaaaaaagtatacattaaaagtgaattggtagattatttgcccaaagaactcaagtggtcaagtagagtttaaatggtagtaaataatctttttaatattttgttgaaagaaggcagtcatatttttcttgctcaacaaaggacgacgtcaggtcgaacttctaaggacacggagaaggcttgttcaagcaacaaagcataacgggaatcagtggttggaaggttactggaaatcggactggaaagtggaaatgctgtgctcattcagttcgtaagccacagtcgagtttttcacgtccaactgtgcagcacatcctcgaaataaatggacatattaaatacaaactaaattataataaattgtgaagttaagcgaaaaacagagatttcccatatctccctgaaagttttgtgtcataggcgtgttttcaagagtttgcgaactcatcgttaaatgacactcaaacgcaaaaggcacaaaaactaaacgctaaacggggtccgaaatccttagttaatgccttaaatacaagcggaaaccaagtgttgcgaaaccaagtgcaatgactgtcctcaatatgcacgccaaaatgataatattgattttatttttctacaacggttcctacaactggagtaaaaagcagtaagaggctcctggcttccacgcatttcctgcggcaggcggcgtttcatttcatgtgtgtgccgtcctgcgattgataatactcccaattataataaggtaatgggctcctggcttctgtttcctggcatctccaactccc

SEQ ID NO: 32945 - DNA, 1563 bp, DROSOPHILA
atggcaatcctggcgagcgttggacaagcgaccgaccgatccgaaggaagatcagtacgcaggtactcatatgcggatacctcgtggcccaggcggccgttcggcagcgagcgaagggacttggcgccttcggagcagcgatacttctccgatccggaactgctcttccagcggctggacgacatggagcagaaattgggaattccagaaaaaatggctgctgctggcaaggtgaaatcggaacactatctggttggtcccacgaatgttgccgcccagatgctcaaagataacttgtacaaatttccgattgatgacggcgccattggacagggaatgcacgatgattgtctgggtaaggaggatgtggatgatcccttcgagtccctggccaggatgaacttcaatgagcatttgaatgagcgtaagtccgatcgtgagctcaagagggtgctgggtggctacttaaacgaccagcagctggatggaaaaccagctgtggcaacagccaatttgctggccaaggtcattagctccaaggtcgatcagcccaggaagtctgggccttgtcgtggcaccacggctcgatcccacgggttcaccacaagaagccctacgactcatcggacgacccttagtaccacaacgcgcagtcccaccactttctgccttccggaaccctcatccgatcctccgctcaagccgcttcccacatctccaccaacacctcgtcctccgccttccgcaccttcgcgtccaccaacgacgcgaaagccatctgctcaaaggattaagcccagtaataagtgccccatatcgacgaaatctcaaaagctaggaggtgccaaggtgctgctggaaatcattttggccaccaagcagcatgccctatcggtgctcaagaatctcaactacctggaattggaactgctaagtcactcaacggacgacgatgtatcggagaaccacgttaaagagaaagaaccaacaacaaagacgtctgaacgtatcgaaaaacccgagccaaggccaccatccagggtattttcctttggaattcgaccagcgagccaaaaagagagcttgtacgacttggcagtggccaaggaggaggagttgaaactgcaggatcgggtgtgggaggagcaccagcagcagatgaagctaaggaggccaatgaagccaaagaggtttgaggttgctccggcggctgctgcacgcctggaaccttttcaggagcctcgaaagccactgaagtccataaattccatggagccttttactcctttggaaccagaaacctccgacgacaacagacgtatcaatctggaagccttgagcgtggtagtcaagccaatgtcctcctttcccagaaaggattctcttagctcgtcgccgcgagcacaaatgaatgctgttcaattggagggcacaagcgatgatgaactgcatccaggcaatacatttgaattgagaccaagaaagaagaaaaaacacaagttgtacgctatggaaaagcagacacagactaaaaagctacccattgcaggagttttttattaa

SEQ ID NO: 32946 - protein, 520 aa, DROSOPHILA
MAILASVGQATDRSEGRSVRRYSYADTSWPRRPFGSERRDLAPSEQRYFSDPELLFQRLDDMEQKLGIPEKMAAAGKVKSEHYLVGPTNVAAQMLKDNLYKFPIDDGAIGQGMHDDCLGKEDVDDPFESLARMNFNEHLNERKSDRELKRVLGGYLNDQQLDGKPAVATANLLAKVISSKVDQPRKSGPCRGTTARSHGFTTRSPTTHRTTLSTTTRSPTTFCLPEPSSDPPLKPLPTSPPTPRPPPSAPSRPPTTRKPSAQRIKPSNKCPISTKSQKLGGAKVLLEIILATKQHALSVLKNLNYLELELLSHSTDDDVSENHVKEKEPTTKTSERIEKPEPRPPSRVFSFGIRPASQKESLYDLAVAKEEELKLQDRVWEEHQQQMKLRRPMKPKRFEVAPAAAARLEPFQEPRKPLKSINSMEPFTPLEPETSDDNRRINLEALSVVVKPMSSFPRKDSLSSSPRAQMNAVQLEGTSDDELHPGNTFELRPRKKKKHKLYAMEKQTQTKKLPIAGVFY

SEQ ID NO: 32947 - DNA, 3283 bp, DROSOPHILA
ttttatacattatgcatataggcggtgggaactcattaatagcgactctgttcctggatcagtccttaacccatcacagcctttcgtggcatcaattattcaggcggcacgcgatggcagacgagaaatggccgacggcaaaatggcgtcacagccgctaaagtaccgttacccgcctgggaaattaccttgcgtttgcgggtgtgtgcttgtgtgtgtgtgtggatcaagtgcgtggctcgcaaatagcttgaaagcccaaaaactttgaatcactgcccgcagatggcacagcagcaaatttatatccaatgttaaaaaaaaagtattgagatagtataaattaaaacaaaatgtatgtatgcctgccttccgcttcatttatgtatggcttaactagctgaaacttgcaaaaatctaagctagacacaagtagataagatatccttcccagtgtaccaaacatcaactaactaacaacatctcggatgcactttcgcaatgattttccaagtaatggaatttcaatatgcacagcttctggcaactttgcagtaggcaaacagaatagagtgaacctggtaactttcacttgacagtcgtcatctatacacattttgcatgttatctggctggcttgtgtccttgatgtttaaagtaatctctcaattgtacaatgaccgaagcacagacaaacgaggaactttaattataaataattagatgcggtcgacgcggaggcagaagtgcactcagtcatgcagagttaaggagtagtccagcccaatttcccagagcatgtgttattaatgatgactaatgtggcagtaaatatttgtttatccaattaatattgccaggcctacagagccgagtgtgaaatgcactcaaacctatactgattaaacattagactgataagaactaccttgctttccatataaaagaacgctgcccaagatagagcgttagaagtaggagagactggacgacgtaaacaatgttacccaattggcttaccgaagaatatttacagccgaaattgagggcttactacaaggatgatcagctgaaggtcgtgaaagtctgggcaaagccagcaaccgaaaaaggtcaaaactacatgagccttatgacccgtatccacgtggagattcagcagggcgatggattattgcaaaatagaacctacattatcaaggaatccctatcagaagattgtccccaggcgaaggtatttttggagtatgatgtgtataaccgggaaatggatatgtacgagtttatcctgccgaaaatgaatgaacttcttcaagaagttggccttactggaaagttcactgcagatacgattttcgtagaccgggaatacagaaccataatattggaagatctggcgcagtataactacgtgaatgcggatcgggtgaagcagctggatctggctcatacgaaattgactttggaagtgttggcaaagttccatgcagcatccattgtcgtgaaacagcgccatcccgaactcctgaccaagagcctttttattcactgtttttcgcgagacaataaaggttacacggaggtgtacgaaggtgttttatcggcttttataaggttcataaatgaacaaccagttttaaagaaaaagtacggtaataaattacaaaaaatacatgaaaatatcatggattatggagccaggacctttgaggtcggagaacaagaactgctgaccttaagtcatggtgattgctggaccaccaactttttgtatcagtatgatgatgcgagcaatccccaatcagccgtagccatagactttcaattcagcaacttcacctcccctgtcaacgacttgcatcaattcttcaccgtttcactgcgagatgaagttcaggacatggaatccgttcttgttgagaaatactacagcgacctcaaaacgaacgtggatactctgtcctataagggaatatttcctagtctccaggggttccagaaacagttcgaaagtcgtcgattcatgtgtaagtacctagagctaatccataaagcttatactaaacccttttcctttttcaaataggtctgttagcccatctcttcaagcccgttataatatacgacggcactgaagtgagctcagacttctcaagtgtctataaagataccgaagagggcattcgattccagaaagctatctatgccaacgaaagggtgttgaaaagtgcaacaaaattattagctatgcttgatgccaagggtgttttgaatcttcagtagactaagctattcgagtacttatcatagattcattcagctatatcagtaatacattttaataatatacatatagattttactagtaatattcgtatatatttcgaatgaaaagccatattttccaagctctgcaatctcgaatcgcatctgctacatgggcaaacactcatctggagttatgctggtcagtattttccaggtgcagagatgccaatatcgtgttatccattctaattagccctgcccatgctcgtgggccatcattcgtccgctcttagcccccgatggtcggtacattcgagtcgggccaagacggcatagcctttcgaaatttacattggccattcggcgcctagcatgcactaaatttaacgtcagtgccccttggccaaagtcgaagccacatccgagccccataaacttggtcggcgctcttctgagatgggaactgcatatatattgtacatacatacatatacgtacatgggatagccctcgctttctggccaattaatttacgcgcacttggcgagcactttggcttagagagatgcggcacgatgcttatcgccggattaaacctatatcatttcattattatttgcccgctaacggtggaccaagtggatatggcgctccctttggtgggctcgtcgcgctgatgctggcaacatttctaaattaattagccgaggacgaggggcttggctgcactgcagcaactcccgggttgagcaaccaattttgacagcatcagccaaaaaaaaaaaaaaaaatcgcaaaaaatataaagagtggaaaagaaaagccagttaacatttcggtagtcgtcgggggccgtcttatcttaaagccacacgatgccaggcgacgtcgacgacaacgacaatttattgacaagacaatggcgctcagcgtatgtaattaatctcgacataatctgagtagataatttttgccgctcgttgtttgtttgctgttggttggctcaggcttgttg

SEQ ID NO: 32948 - DNA, 1224 bp, DROSOPHILA
atgttacccaattggcttaccgaagaatatttacagccgaaattgagggcttactacaaggatgatcagctgaaggtcgtgaaagtctgggcaaagccagcaaccgaaaaaggtcaaaactacatgagccttatgacccgtatccacgtggagattcagcagggcgatggattattgcaaaatagaacctacattatcaaggaatccctatcagaagattgtccccaggcgaaggtatttttggagtatgatgtgtataaccgggaaatggatatgtacgagtttatcctgccgaaaatgaatgaacttcttcaagaagttggccttactggaaagttcactgcagatacgattttcgtagaccgggaatacagaaccataatattggaagatctggcgcagtataactacgtgaatgcggatcgggtgaagcagctggatctggctcatacgaaattgactttggaagtgttggcaaagttccatgcagcatccattgtcgtgaaacagcgccatcccgaactcctgaccaagagcctttttattcactgtttttcgcgagacaataaaggttacacggaggtgtacgaaggtgttttatcggcttttataaggttcataaatgaacaaccagttttaaagaaaaagtacggtaataaattacaaaaaatacatgaaaatatcatggattatggagccaggacctttgaggtcggagaacaagaactgctgaccttaagtcatggtgattgctggaccaccaactttttgtatcagtatgatgatgcgagcaatccccaatcagccgtagccatagactttcaattcagcaacttcacctcccctgtcaacgacttgcatcaattcttcaccgtttcactgcgagatgaagttcaggacatggaatccgttcttgttgagaaatactacagcgacctcaaaacgaacgtggatactctgtcctataagggaatatttcctagtctccaggggttccagaaacagttcgaaagtcgtcgattcatgtgtctgttagcccatctcttcaagcccgttataatatacgacggcactgaagtgagctcagacttctcaagtgtctataaagataccgaagagggcattcgattccagaaagctatctatgccaacgaaagggtgttgaaaagtgcaacaaaattattagctatgcttgatgccaagggtgttttgaatcttcagtag

SEQ ID NO: 32949 - protein, 407 aa, DROSOPHILA
MLPNWLTEEYLQPKLRAYYKDDQLKVVKVWAKPATEKGQNYMSLMTRIHVEIQQGDGLLQNRTYIIKESLSEDCPQAKVFLEYDVYNREMDMYEFILPKMNELLQEVGLTGKFTADTIFVDREYRTIILEDLAQYNYVNADRVKQLDLAHTKLTLEVLAKFHAASIVVKQRHPELLTKSLFIHCFSRDNKGYTEVYEGVLSAFIRFINEQPVLKKKYGNKLQKIHENIMDYGARTFEVGEQELLTLSHGDCWTTNFLYQYDDASNPQSAVAIDFQFSNFTSPVNDLHQFFTVSLRDEVQDMESVLVEKYYSDLKTNVDTLSYKGIFPSLQGFQKQFESRRFMCLLAHLFKPVIIYDGTEVSSDFSSVYKDTEEGIRFQKAIYANERVLKSATKLLAMLDAKGVLNLQ

SEQ ID NO: 32950 - DNA, 3917 bp, DROSOPHILA
tgtttcagtcgtattttcatttcgtttgattttattttattttaggaacggggaaccacatttcaccttccccgggattccatggcgcgccaactatgtaaatatttgtcacgaccgcatgaaaatatttgttcagactttgattcactttttaagcgggacatagatttgtgaccagacaaccaagaaaggcatgtagatgatttaattagccatttattacataggaaataacaacaaatacaaaaacactctgttaataataatttaaataataataattaaaaagtctctgattagaatgaggcataagcataacttgataaatcatttaagagtatcatatattctatatgacagttgtgcactttcactagatattgttttcctaagtcttctctttgagagcactattatggaggaaatattgaggcactcactgatgcttgttgtttttgctcgttcgtttgttgaaatgtgtatcttgtccccagtgcatttccgctcgaaatgcatcataaaagtatttcaaatgaacagtagtaaatcaggcagcaaacatgcattctgatgcgcgatgcgcggtgagcgggcggtggaaaaattgttgggtaaacaaatatcgacatcagcatgcgtgctggtttcgtgataaatatgcattctccccacccatatgaaaagcattcaaacaccgaagaccgtggaacgtcagaaatgcagcggcgcacttgtccgggatatctgtcctctgggaggaatcccagcgacaggtgttttggtccgcgggggagtactgagttttgaatatgtgatgcgttcattaactatttaaaacattcaatagttatgaaaaataaattgaacactgtaatttgttatttaatctaagtgtgtgctcaagtaggtattatggtatctttaatatttcacctttcttccagctgacaaacgaacagttccccacatttttaattcgtaaatccaaaattcagcccgaatgtttgaaattgaatcgacgaagactgtgccgccacttccgccaaaatgtccttgccgccaaccagatcacaaggactgcggtgagggaaacagggagctgcaggcggaataccacctcctagatattgcggatgtcacggacagcgttatgaaggtaatgaggatctgcggtctccgtccctgggaagtcaagcgagccgctggggtcatcaagagatccctgcagcactacgaagagatcgtccagaggatcgaccgagtgccccgaaaacgattcgccaaagagagtttcctgcacgggttggctcacgaggcgcagatgtcccgaatggatgcccagatggcttactctattgtaaaaagagcattcaaggtaggtcgtattgagcaatacaggtttctagcatatactatttcattatgcaattatggttatggtattctgtaggccttttactttgccaccggaatagagggacgtcggtacatttgcctggcggacaagatgagccacgagatggagtgcctctggttgcatgccgctcgccgcacggcgcagatccacgccgtcttggccggactcatgtactccgaggagctacagttcgaggaacggatcgagtgtgtatacaaaaacctattcgatgtcctaaagaaacgaatcctctgggcggataacgtgacctgtacgtgtggacagcatacggcccccatatcacaagcaccttccaaaactccttcctccgccacggcgcaagtggaggtgctctacggcagatacaatatggccgtaagtagtgctccctcaaagatttccactcgaggagggacgcaaaaaccatcggcggcggttagtactgcgtcatcacgacacaatcacattctgaaaaaggtcgaccagcctttttcacaaaagcaaactccacggaagggcagtagcaccacctctgctagcaagaccaggtgtaactgcccgcacctgagatgttgccgggcaaatggtgaagcccgggaatcgccggagattacagcggaatgcagccagggaccgtacatctgccgttggttgccctacactgaggaggacgatgagttcccggagcaccaggtgccctttccacccatggaagtggtgtgtcctccatgtcccaaggatgatctgtcctgcgactcagaatgcacatgcacctgccaagtgtgcacttgtcagccggagttcgatgacggaagcgatgagggggaagatcagggcgagaacttatccaaatttggagtggaagaccaggacacggacttttgctatgtggctccattccgtggaagcagtgtcgaaaggatagcccgactaaaggcaaaggaacagcttttggaagtggaagagcaccttgagaacgaagataaggaagaggatgaggagttccagtgcggctgcacctgcgagttaaagcagcatgcctatccgcacctcttcacctacttgacaccatttaggatcaaagaagagctggtggacaagacccatccaaaggaggaaaggatgcaaacagtggaagatagtgaaagtgaggatctgctgtcaaagccaccgcctcctggcgtatccttaaacacctatcgctgctgggtgaagcccccatcgagcagccattctagtgatgaggctaagccaccactcgtggtggttatgggcgaaaagcgtaagagcaattttcaggttacggtcaaggaacaacatcactccaaccaagcctcaactgttccgccagcagctccactacccaaggctcctgtcctgccaaacaaaccagctccaactccagctccctcaaagcctccacctgtctctcaaaaagcggaggaggacaaacttaccaaggaagatatcttggacatcataggcttaagatttcgatagggaaatatctacgtttaatgtaaaactaattgttgaatcttgagatgggagctcaaagtatataaagaataaataaagagttcgtgtgctgtgtcaatgggaagctcatcattcattatgattttttatacccgttactcgtagtttagattcatattgtcataatctcgtattttatataatcggttaaaaaccatagttttgccgattgaatgacagctcaaaggttgtatttgtaacctcagctgcgcacacaagcactttgtttccggcacttaactaatgtcatggggaaatcgaagttggccaacgcaatttgctgtccaatacttttgcgaagttatttgatattttattccatatttttattgtcaagggctttgttgcatatttctgcgcttggcgagtgcgtgtttgcatttgtgtttctctgtttacccaacgaactgtcaattgattgtcaaattataaagcaaaaacggtcagttggaaaagcaagtaggggagggtccctgtcccttgaaaatgaaaactgtttgctttgtcgccaacaacactttgcaacagtatgctgacaggatccatggggaggggctggtatcaaatcgaaccacttcagctacaaaactatgcgaaacattatacaacacgcatcgccgacaaaacgttttcgaaggacccacaatagaaatcagcgactgaatcaattcctgatttctgacacacgatatttcgcattgtgtgttacaaataatagggggtgccacgccccacaatggtcgacatcgggcgaagcattaatttacaaaataggatacatacgcgatatttgcatttttcgatcgttggcgctgccatgcccaaagctcgttacaatcaaatcacgtaggaatttcatttttgaagtaagagaggagtacggaaaaacccaggagttaccgaactttttcggctgtcgtaattacagacaaattgtgaaaagtattgctcgacatgggcg

SEQ ID NO: 32951 - DNA, 1842 bp, DROSOPHILA
atgtttgaaattgaatcgacgaagactgtgccgccacttccgccaaaatgtccttgccgccaaccagatcacaaggactgcggtgagggaaacagggagctgcaggcggaataccacctcctagatattgcggatgtcacggacagcgttatgaaggtaatgaggatctgcggtctccgtccctgggaagtcaagcgagccgctggggtcatcaagagatccctgcagcactacgaagagatcgtccagaggatcgaccgagtgccccgaaaacgattcgccaaagagagtttcctgcacgggttggctcacgaggcgcagatgtcccgaatggatgcccagatggcttactctattgtaaaaagagcattcaaggccttttactttgccaccggaatagagggacgtcggtacatttgcctggcggacaagatgagccacgagatggagtgcctctggttgcatgccgctcgccgcacggcgcagatccacgccgtcttggccggactcatgtactccgaggagctacagttcgaggaacggatcgagtgtgtatacaaaaacctattcgatgtcctaaagaaacgaatcctctgggcggataacgtgacctgtacgtgtggacagcatacggcccccatatcacaagcaccttccaaaactccttcctccgccacggcgcaagtggaggtgctctacggcagatacaatatggccgtaagtagtgctccctcaaagatttccactcgaggagggacgcaaaaaccatcggcggcggttagtactgcgtcatcacgacacaatcacattctgaaaaaggtcgaccagcctttttcacaaaagcaaactccacggaagggcagtagcaccacctctgctagcaagaccaggtgtaactgcccgcacctgagatgttgccgggcaaatggtgaagcccgggaatcgccggagattacagcggaatgcagccagggaccgtacatctgccgttggttgccctacactgaggaggacgatgagttcccggagcaccaggtgccctttccacccatggaagtggtgtgtcctccatgtcccaaggatgatctgtcctgcgactcagaatgcacatgcacctgccaagtgtgcacttgtcagccggagttcgatgacggaagcgatgagggggaagatcagggcgagaacttatccaaatttggagtggaagaccaggacacggacttttgctatgtggctccattccgtggaagcagtgtcgaaaggatagcccgactaaaggcaaaggaacagcttttggaagtggaagagcaccttgagaacgaagataaggaagaggatgaggagttccagtgcggctgcacctgcgagttaaagcagcatgcctatccgcacctcttcacctacttgacaccatttaggatcaaagaagagctggtggacaagacccatccaaaggaggaaaggatgcaaacagtggaagatagtgaaagtgaggatctgctgtcaaagccaccgcctcctggcgtatccttaaacacctatcgctgctgggtgaagcccccatcgagcagccattctagtgatgaggctaagccaccactcgtggtggttatgggcgaaaagcgtaagagcaattttcaggttacggtcaaggaacaacatcactccaaccaagcctcaactgttccgccagcagctccactacccaaggctcctgtcctgccaaacaaaccagctccaactccagctccctcaaagcctccacctgtctctcaaaaagcggaggaggacaaacttaccaaggaagatatcttggacatcataggcttaagatttcgatag

SEQ ID NO: 32952 - protein, 613 aa, DROSOPHILA
MFEIESTKTVPPLPPKCPCRQPDHKDCGEGNRELQAEYHLLDIADVTDSVMKVMRICGLRPWEVKRAAGVIKRSLQHYEEIVQRIDRVPRKRFAKESFLHGLAHEAQMSRMDAQMAYSIVKRAFKAFYFATGIEGRRYICLADKMSHEMECLWLHAARRTAQIHAVLAGLMYSEELQFEERIECVYKNLFDVLKKRILWADNVTCTCGQHTAPISQAPSKTPSSATAQVEVLYGRYNMAVSSAPSKISTRGGTQKPSAAVSTASSRHNHILKKVDQPFSQKQTPRKGSSTTSASKTRCNCPHLRCCRANGEARESPEITAECSQGPYICRWLPYTEEDDEFPEHQVPFPPMEVVCPPCPKDDLSCDSECTCTCQVCTCQPEFDDGSDEGEDQGENLSKFGVEDQDTDFCYVAPFRGSSVERIARLKAKEQLLEVEEHLENEDKEEDEEFQCGCTCELKQHAYPHLFTYLTPFRIKEELVDKTHPKEERMQTVEDSESEDLLSKPPPPGVSLNTYRCWVKPPSSSHSSDEAKPPLVVVMGEKRKSNFQVTVKEQHHSNQASTVPPAAPLPKAPVLPNKPAPTPAPSKPPPVSQKAEEDKLTKEDILDIIGLRFR

SEQ ID NO: 32953 - DNA, 2366 bp, DROSOPHILA
attatagcaacattagccgcactgcttgtgcaaaaaagccaattaccataaaaccgtacaaatgcaattacgaaatatccgaatcatctaacagccattgggacagtgaatccctttcgttccaattaaaatatgcactagggtgagcgtgaaaattaatcaaggtattttcaacgcaaattgcagtgcagtaaattggcaaattgttcagttgacccatacgttaatagcctttgagcattaagcataaacaaatgcataccgataataatcacccgaaaatgaacaataaattatgcataattaagcagatatcagtagtaattattaaatatctgaacgtgttttgttacctaacattctaatgccctgccaagcttggaaccttaacttaattatagcttaattttaacttactgaaatgtagaagaaatgaaataattaagtaatacaatgtaaacaattacttcttcaactcaaaactttcgcagatatttataaaacaagattgggcacttctaatgatcgaagaaacaatatatcaaatattaaatgaaaattgtaatacttaagatttcttttgaaaatttcctatttagaataagccgtgcacttttcagtttaactgtatcgattctgcagaatgcattgctatataaagcaaaaaaaaaagagtctttcctaatagtaaatattccgacctttaggttagaaaccttgacagtggcaataacttttggagttagtcagtcagcgtgaccaatgcgtctctgtttttagtgataatcaatatgcggcacaataagaattgacaaattcaaagcgtcacgcaaagtgctaaccgaactataaaaaccgatgtaattttagctagcgattagtaaacgaaaaagtgaactaaaatgagggctacattcgcattgactctgttgctcggctgcctttcaggaattttggcggtaagttcgatatttcgctgtacaagtgacaaaaaattaacatgattaccaattatgatgcacagcagcaagccaacatagacagttcggtgtccaaggaactggtgacggattgcctcaaggagaacggtgtcactccccaggatctggctgacttgcaatcgggcaaggtgaaggccgaggatgccaaggacaatgtgaagtgctcctcacagtgcattctggtcaagagcggtttcatggactccactggcaaactgctgaccgacaagattaagtcttactatgcgaactcgaactttaaggatgtcatcgaaaaggatttggacaggtgcagcgcggtcaagggggccaatgcctgtgacactgccttcaagatattatcctgcttccaggcagccaattagggtcttaacgatccgatcaatctgtagaaaagtagagtttaattcttccaagagcaataaaggcttgcagtagaaactattatatcaaacacattaattccaaaggaaacaaaagtgaattttatttataagttatatttaaaaggtttaagcctacaattcgatcagatagaactagttatttttagaagagaaaagcgccgaaaacattatatatggtaaagggatacactgcctaccccattctatacatacccctacattatttatatttccatttcctaaaactttaccatttcagttcccgtacttatttatttcccttttgaccctcttagcctttttggtggctaatttgtgaaatattcccgaagcatctgtgaaatgccagcaatttaattattacgaaccgctttggcaaaaaggcaaacagagcactcataaaatcatagccatcggcaacaatttcaatcgaattgtcagggtcgggacactctttgctatgccccaactctgcaaccccatgtttttgttatcgaagacaaactaagttttcatatataaatagacgctgccggctggattctcagcgatttttgggggcaggctacatattgtattccgaggaatttttaatttcttcattgtgaaaatatttattgaaaccgaacatcgccaaaggcaccgaaaagttgacggagccctcgcaccaggcggctataaggggggcaaaagaaaaacaagagcccgaaaattgcgcaacgcgataagttcagtggtatcgatgtatctccagatggaaagctaaaaaggagaagttgactggctgggttactgactttaatggagctcagttgcagcttaaaggaatgttcgggttcgggccaaggggtttcctggacagctccggtaatagccactgaaacctgggcaaacaaattgaatgaaatcaactcgttaaaaagtaaataactctgatgaatggctgaaatgcacaaag

SEQ ID NO: 32954 - DNA, 366 bp, DROSOPHILA
atgattaccaattatgatgcacagcagcaagccaacatagacagttcggtgtccaaggaactggtgacggattgcctcaaggagaacggtgtcactccccaggatctggctgacttgcaatcgggcaaggtgaaggccgaggatgccaaggacaatgtgaagtgctcctcacagtgcattctggtcaagagcggtttcatggactccactggcaaactgctgaccgacaagattaagtcttactatgcgaactcgaactttaaggatgtcatcgaaaaggatttggacaggtgcagcgcggtcaagggggccaatgcctgtgacactgccttcaagatattatcctgcttccaggcagccaattag

SEQ ID NO: 32955 - protein, 121 aa, DROSOPHILA
MITNYDAQQQANIDSSVSKELVTDCLKENGVTPQDLADLQSGKVKAEDAKDNVKCSSQCILVKSGFMDSTGKLLTDKIKSYYANSNFKDVIEKDLDRCSAVKGANACDTAFKILSCFQAAN

SEQ ID NO: 32956 - DNA, 2327 bp, DROSOPHILA
ttcaaattgtcattgctgggctgggtccttcaaagaattcttggctttctttttcagtttctgttgtctcatgtcgctgctgacttgtcaacctgccggtcccgtggttcctcactctcacacccagtatggccaagtatctccccatctctgatgcccaggaatcgaatccactccgccccaccggcggacaagtgcaacgaaccgcgtttgtcttcctccattgcaggctgctgcggcgttgatttatgtaacatcttctatggttacattggctctcgatcccatacaatccccgttcgccccgattttcgccattaagcgcagctcatatgttacccgaaaggtacgtacatatgggtatatatatattgtaaatggaggcagaggcgggagagtctcacacgtgaaatgatttattagcggtaattggtgtcacagtgttccaaagaaaaggaaaggattctcatccccacatcccgcattccatccgccgtcttctcggttgcctggcacccccttgtttcgaagttctcttttaattatcttgattttaaacttattaaaattgacaaatgattttcgtagacaacattgcgttggctcgaaggaaacaggttgtcaatgacggcttcccagaatctcgagagttgagttctttaactctgccttttccgtatttctggtagttgttagcttatcattctgggctacccgagcgatttcttttgaactgggttttgggctcaatgtgacgcacctatgtagttggattggaattccgattagattatgataggtagtatcttgaaataaataaaactcctgtatgattgcattatttagcattaataggattttgcgattttaatgataactatataggctttgatagttattcctgttattatccctgcaaataatctttgatttggtaaaacttgaacaagtttattttacaaaatgcaactaagccaactaggacgaacaggatcaggcattagtgatgtcctggaatggccttgtgctccttcaggcacatggtaaccttaaaggccgtgtcgcaatcgttggttcccttgatgtccttgcaggcattcactcccgaggaaatctcgtccattttgtccttgatctgaggcacatttttgagagtgtcgagcatagcctgagcattgaactggccattggtgagatgaccctgcttctccatcaggcacttggtgtagcacttgaggttctccttggcactgctctgcatcccgctggccatgaactccttgagatcagcctcggtcacttggttggtctccatgcactgttgcattatttggcgaaagtccggattacactacgaaaagcaaattcatggtttaaaaacaaatgtacacagtgcgtgcatatttcacctgtcccatggacaaaaaagctgccagagcaatacagaatagggtgaacttcattttgaggtatatatttgttaaagctgttccgggtttactcgaaaatttcgactgttggtcatttgattgaaacttgcggcttttataccagatcagtctgaatcagaatcagagggaatgcaattaaggcaattaaactttttgcgagatgaatcgaaatttgattacgcacaatacggacaattactacacaacaaatttccctttttcgattgtaattatattccattatcagtccatttgccatattcgatggccaggctggacagaaacttgctacacaaatcagcaaagttagtcgcaattagttgccggccccccacaacaaatcaattattcatttattgtatttagatgcggtcagagtttgacaatttttggcctttgtttgagccattcacactcgcccaattgatttgcataccatttgttctggcctttctgccaattgccgaatccccaattgatatttcagaaggcatttaatctcacataatcacagcaatatatcagagaattctgccatcggacgagagttggcgctgaataatttaccaaattagcacagctctagcaaacaatttgtagcaaaacgataatcatgaactccaccatttgtgaatcattaaagttattaaaaattcagttttattagtactgtgcttaaaatgttcccttatcagataaggttgtcattgcgaattgcatttaatttccttcgctctattttacacttatttaaagtgccagctagttattgcttaatgacaatttacttacaacagatatgtaattataaagtctcattagtcgaaaacgtgaatttaattacaccataaattaaaaaaaaaaaacaacttataa

SEQ ID NO: 32957 - DNA, 327 bp, DROSOPHILA
atgcaacagtgcatggagaccaaccaagtgaccgaggctgatctcaaggagttcatggccagcgggatgcagagcagtgccaaggagaacctcaagtgctacaccaagtgcctgatggagaagcagggtcatctcaccaatggccagttcaatgctcaggctatgctcgacactctcaaaaatgtgcctcagatcaaggacaaaatggacgagatttcctcgggagtgaatgcctgcaaggacatcaagggaaccaacgattgcgacacggcctttaaggttaccatgtgcctgaaggagcacaaggccattccaggacatcactaa

SEQ ID NO: 32958 - protein, 108 aa, DROSOPHILA
MQQCMETNQVTEADLKEFMASGMQSSAKENLKCYTKCLMEKQGHLTNGQFNAQAMLDTLKNVPQIKDKMDEISSGVNACKDIKGTNDCDTAFKVTMCLKEHKAIPGHH

SEQ ID NO: 32959 - DNA, 3309 bp, DROSOPHILA
ttgtgcacctgcaattcgacccaacgagcagagatcaaaaattaattttattaaagcctgaagcactactactcacatcttatttattcgttttccattacctgattacactctggccccggccgctggaaaagggacactctcgaaaagtagccagaacaagttgggaaaaagtttaatttcactagcaaatttcactcactcgcatgcaacgctgcctaaacacatttgacattgctgcccctgaatgtggacaaagttttgggcgtcgcacagtgtaacatgcaaatcgaatttaaacttcgccacaaataattgaaggccatctggctggagggcttacacctagcacattaccaaatcgtctatgcagaactgcagcacctgtcggtaaacaggtaaacagagacaattattggacaattattggcacttaacggggccccttgctaatcaaaccacttagcacctcaaaaaaagtggctgtgaaatcctataaaagacccttgaatatggttaacgctaaacagtttaacatgtttaaagttaaggatctgttgctttcgccgacaactttcgaggatccaatttttggaacccacctgcgatacttccaatggtacggatatgtggcctccaaggatcagaataggcctttgttaagtcttatacggtgcaccattttgacggcatcgatttggcttagctgtgctttaatgctggcgagagtgtttcgtggttacgaaaacctcaatgatggggccacaagttacgccaccgcagtccagtatttcgcggtatcgattgccatgtttaatgcttacgtacaaagagatagtaagtttaaattataaatttaatttgtttattgataaaaacaacaaggaaatcacataataaggcggtaatattaagcctaggatatgttcttttatacttacacattgttttagaagtaatatcccttttgcgagttgcccactcggatatccagaacttgatgcacgaagcagataatcgggagatggaacttttggtcgccactcaggcttatacacgaaccattaccctgttgatctggataccatcggttattgctggcctaatggcctattcagactgcatctacaggagtctgtttctgccgaaatcggttttcaatgtgccagctgtgcgacgtggtgaggagcatcccattctgctatttcagctgtttcccttcggagaactttgcgataacttcgttgttggatacttgggaccttggtatgctctgggcctgggaatcacggctatcccattgtggcacacctttatcacttgcctcatgaagtacgtaaatctcaagctgcaaatactcaacaagcgagtggaggagatggatgtaataatcatttctaaatttgtatactcaaaaataaaatatataaatattctcgtttgagcagattacccgacttaattccaaattggtaattggtcgcctaactgccagtgagttaaccttctggcaaatgcaactcttcaaggaatttgtaaaggaacagctgaggattcgaaaatttgtccaggaactacagtatctgatttgcgtgcctgtgatggcagatttcattatcttctcggttctcatttgctttctcttttttgccttgacagttggcgtaagtttcaatatttatagttttatagttttcaaactaatatttaatgtggcccattaggttccaagcaaaatggattacttcttcatgttcatttacctttttgtgatggctggtatattgtggatttatcattggcatgccacgttgattgttgaatgtgtgagtataataacaagaatagcatgatatatttttgacaaattttcaaaagatccgcctaaaaaagttaatttattctctcatttttttcattcatatgtcggatgaagctctatcaattcggagaaaaaagtccatagcaatcagacaatatctccgcatgatttttgtttacttccttttagtagcctcccaaaatgtccttttttcagcacgatgaactgagccttgcttacttttcttgcggatggtacaacttcgaaatgcctttgcagaaaatgctggtttttatgatgatgcatgcccaaaggccgatgaagatgcgcgccctgctggtcgatttgaatctgaggaccttcatagacgtaaggctgctaactgctaactcgatattggatttatcgaattcaagcctttcctttccagattggccgtggagcctacagctacttcaatttgctgcgtagctcccacttgtattagagggaaagccttttcttcagggctaatcaaatgccgttgcgcctgtcaactcgtttggctaacatgacagtaaacaagccatgcaattcattttgcccagcacatatactcacaaaaaccgaggaaacggtagaaagcacatatgtatgtagaagctgaaatgctaaaaccattttagagtgcaaataaacgtggctcaaactgaagagacgcctgttactcaaaaaggcaatgcaagtaacgggcgacatcatttatcacttgagaaacgtcgcatgtcactggcgttgtatgtgttttgttatattgtctttctcaatggatataaaacgatttttgcacttcttaccaacctacccgcccgcccttggcattatttccctgccgtgcctctaattgtcttgggggtttagacaaaggaaatttatgcgtctaccccagacaaactggtcagatacatcaactgaccaccgctaccacaaccatcagcgaaactaaccaaacaaaccgaatcgttgtccccctgggtgtattttttaatattattaagagtatagacaaaaaagtaaggaaacaaaaataaaaacaaaccgggacccacacccaaataaacacgcattttgttgcggttgttgtgctccctgggattacacaaagtggctaaatggctgataaaggcacacgacgaacctcggctactaatgagtattaatggcagggttacaaacgcggcaggtatgctagaacgcagaactcagaagcccaaacccattccaaaaacctgggcatccacgtatgctattcctcggagggtgacaatagcgagggtcacagatagttgggtaacagcgtgaaaagggttgttggcaagccactcgattgaaatctctccgaggagagcgttaccccttcgaaaaaatagaagaatgtgctgatatatgtttgtgatagaactccttttatatttccgcgacatctgtagttcatatttgttcaaaca

SEQ ID NO: 32960 - DNA, 810 bp, DROSOPHILA
atgcacgaagcagataatcgggagatggaacttttggtcgccactcaggcttatacacgaaccattaccctgttgatctggataccatcggttattgctggcctaatggcctattcagactgcatctacaggagtctgtttctgccgaaatcggttttcaatgtgccagctgtgcgacgtggtgaggagcatcccattctgctatttcagctgtttcccttcggagaactttgcgataacttcgttgttggatacttgggaccttggtatgctctgggcctgggaatcacggctatcccattgtggcacacctttatcacttgcctcatgaagtacgtaaatctcaagctgcaaatactcaacaagcgagtggaggagatggatattacccgacttaattccaaattggtaattggtcgcctaactgccagtgagttaaccttctggcaaatgcaactcttcaaggaatttgtaaaggaacagctgaggattcgaaaatttgtccaggaactacagtatctgatttgcgtgcctgtgatggcagatttcattatcttctcggttctcatttgctttctcttttttgccttgacagttggccacgatgaactgagccttgcttacttttcttgcggatggtacaacttcgaaatgcctttgcagaaaatgctggtttttatgatgatgcatgcccaaaggccgatgaagatgcgcgccctgctggtcgatttgaatctgaggaccttcatagacattggccgtggagcctacagctacttcaatttgctgcgtagctcccacttgtattag

SEQ ID NO: 32961 - protein, 269 aa, DROSOPHILA
MHEADNREMELLVATQAYTRTITLLIWIPSVIAGLMAYSDCIYRSLFLPKSVFNVPAVRRGEEHPILLFQLFPFGELCDNFVVGYLGPWYALGLGITAIPLWHTFITCLMKYVNLKLQILNKRVEEMDITRLNSKLVIGRLTASELTFWQMQLFKEFVKEQLRIRKFVQELQYLICVPVMADFIIFSVLICFLFFALTVGHDELSLAYFSCGWYNFEMPLQKMLVFMMMHAQRPMKMRALLVDLNLRTFIDIGRGAYSYFNLLRSSHLY

SEQ ID NO: 32962 - DNA, 3640 bp, DROSOPHILA
tatctgaaaattaggttgtttcgaatagagacgtctatactagtttggttcaaaatgataatcgcttgagctcgaagtttcgtggagcccacaactaagtattcttgagttaaagtcagtgtggtttcaaagctgctccgcgcaccaccgaaccgatctccgaatctcagctctgtttatcatttttctgaaagtccggcgctgaggaacctatagtaagcctatctccatctcttataataatagcgaaagccagacgtgaaggcagagaatatcttggtgtaacatcaatcaccaagggggagtggctggtccactccataaacttaccaacgataccgtaaagtctcaaagagaaaaacaagaggtgtagcagagctacacctgcaaaactttctcatgcccaactggctgggcgcattggccactgttttcgttgctcttgccttgtttcacctctctggcacgctctcccttaaatcgagctgcttctatgtccgacttggggcagtggctcagttgtggcgaagataccgagcgcgctggtaaggcacggttcgcatcgaaaactttaaactgtcttcggtcgggccagtggaacgcgagaaagttaaaattgtaacaataaagacactcataatagcgctccgtgagtaacttagtgtttacatgaagaaggctgattctagttcatcactggtccaatcgaagcgccatacacaagttaccacagattttcataactagctaatgaccgaaattgacacgttctgacggccgcagccgatgagaggaccttattctaaagaagaactgttaactaattgtcagctctgcttacaagcggttaggttgcataaattacaccaaatggtttgttcgccacgcttcttataccatatctgtattagcatatctaaggttctcttttggctaaccccttcctttgtgatgcctccatagagcactagcttacacaataaccagtaaaggcttcgggatgcagagcctaccactaccaggagatgaagccataggcttgctaccctctcagtcagaaagcttttccatttgggtcaacggcgaggagcactggatatccggtgcggactcaagcaccacctgcgcagatctaatatgcgcgttaatcagctaccaaatagaccagaaacatgtgctcagcaaggaagaaatactcgctccacagcaatttgctattgtccaaaagcagcgtcactacgaggagtatttggatagtagtgccaggctccttgatgttataaccagccctcacgcaatgccgaaagaggaagtaaataatttcacgagaaaaacgattctcaacatttcaaattaccttattccacacagtaccagctacatcttcgtcacttggccacttcaagtcgaaagcaagtcccgacgaccgataaggacagtggaatgggcagtccagtagatagttcgcggagcatgcgcatccggcggaggggcaagcttctctccactaagaccacagacaatatcaacactaagcagtcgaagagaagccggaagcagcagcagaggaaccaccacttaactccgaacgagagcctgcttaccattatccttgcccaagatgaaaccattctgcagcaaatgaccatgttgcagtaagtttcgcctttatctgtccgagtatctccgattttcattggcgccattctgtagcgaaaaggatcgacagatttttaaaatcgaggaggagaagcaccaggtgagggagcgagagctgggtaaaaactacctccttgagacgtacttaaaggacttggatgagccccaagaaaagggcgaagacctggaactgtttgaagaaatgacacacatagacgtagatcgagactttggtataatgtcaggtatgaatgaagataaagctggtagtcttatcaatttgctattgcaacgcttgtcatcctagatagtaccgtccaaactgcgttaaatagtggcactatgcaggacgacatccggctttactggctggaaaagattcacgaggtaaacaaagagctgcaatgtgaagaggaacttttactcagcctgcactccaaggtacgtagacaccaggtgaagcgggcgtaccaaacgaagagcgaggtgctactacaaatcgaaagactcgatacagagttggctactcaggtggcggatatccaccatgtggaacgaaaacttttcacggccaatgaacagcttaaagccaaactggctgttcttgaatgtttgagtcgtgaatttgagactacagtatctggaggcgttcaagaaggtgatgttgccactggcagcaatgcaagtgcaaaggttcagcaaagccaatcagatgatctccaacacgctgggaactggctgcacgttgttaagagactctttgcggcagatcatcttaatcggcgattaacgcaacaggcactaagtgaaaagaacttaacggatcgactaatacccagcaaaggaatatccaagcagatgttcgaagttctaagatccccagatccttctacctcgaacagcgtaaacaaaaaagagttgagtactaggcaagcaatttctttagaaagggatattcaacacctcggcacccttgtttaatgcaaagatcaagcagttgacttaatccaagtatctcatgtaacgtattttgaacatccgtaccaaatttgtgtcaattaaccaaatagagattaaatttttgttatgtttaaaacttgagagtttagtggataatatcgttgtgttgtacaacaaatgtggattagtaactaaaacccacaaacaaaaaacagaacaacattcataattacttatcatatgcagtatcataaactattaatcagacctctttaactgttgtatgaatcccgcattgggctgaatacacggtctccatgattttaccagattgtatgcatcttcgtagcacatgtcacggcgctgcattaaataaccgattaccacagagggggatcgcgaaacgcctgcgttgcagtggacgagcacgcaaccctgcgatctgtgcgcatcttcaataaactccattgacgcgggcaagatgtagttcatcaggttggtttccggcagatccaggcagggcaaaaatgtacaatttacgggtaagggccactccacctcgggcgtctgtatgccgacactcaggatgtgagttatcttatattttatgatgttatccgcgctaactgcatcctgcgagcccaggtagagaaagtcgctcagaatgcaggcgggcacagagtccggcttggtatccacgacaaagccgtattcacgcggatccagttgctgggagcagtgcgcaatgtcctccacgcagacggatgaagtgcttcgctcaatgtagcgtacaccggtgggggtggtcacaaccgtggcggtgggtctcaggttgcccattcgcctttgcagctcatacagcagtatcatagcggtattaaatgtccgtttctcggtagtgcactctgcaaaggtaaagcccacaggctggagccaggagcacacggtgatcccaagaattcttcgagggaacggtgagcatctgatataggcacctctcgtcgatacgtccgttacccaa

SEQ ID NO: 32963 - DNA, 1461 bp, DROSOPHILA
atgcagagcctaccactaccaggagatgaagccataggcttgctaccctctcagtcagaaagcttttccatttgggtcaacggcgaggagcactggatatccggtgcggactcaagcaccacctgcgcagatctaatatgcgcgttaatcagctaccaaatagaccagaaacatgtgctcagcaaggaagaaatactcgctccacagcaatttgctattgtccaaaagcagcgtcactacgaggagtatttggatagtagtgccaggctccttgatgttataaccagccctcacgcaatgccgaaagaggaataccagctacatcttcgtcacttggccacttcaagtcgaaagcaagtcccgacgaccgataaggacagtggaatgggcagtccagtagatagttcgcggagcatgcgcatccggcggaggggcaagcttctctccactaagaccacagacaatatcaacactaagcagtcgaagagaagccggaagcagcagcagaggaaccaccacttaactccgaacgagagcctgcttaccattatccttgcccaagatgaaaccattctgcagcaaatgaccatgttgcacgaaaaggatcgacagatttttaaaatcgaggaggagaagcaccaggtgagggagcgagagctgggtaaaaactacctccttgagacgtacttaaaggacttggatgagccccaagaaaagggcgaagacctggaactgtttgaagaaatgacacacatagacgtagatcgagactttggtataatgtcagatagtaccgtccaaactgcgttaaatagtggcactatgcaggacgacatccggctttactggctggaaaagattcacgaggtaaacaaagagctgcaatgtgaagaggaacttttactcagcctgcactccaaggtacgtagacaccaggtgaagcgggcgtaccaaacgaagagcgaggtgctactacaaatcgaaagactcgatacagagttggctactcaggtggcggatatccaccatgtggaacgaaaacttttcacggccaatgaacagcttaaagccaaactggctgttcttgaatgtttgagtcgtgaatttgagactacagtatctggaggcgttcaagaaggtgatgttgccactggcagcaatgcaagtgcaaaggttcagcaaagccaatcagatgatctccaacacgctgggaactggctgcacgttgttaagagactctttgcggcagatcatcttaatcggcgattaacgcaacaggcactaagtgaaaagaacttaacggatcgactaatacccagcaaaggaatatccaagcagatgttcgaagttctaagatccccagatccttctacctcgaacagcgtaaacaaaaaagagttgagtactaggcaagcaatttctttagaaagggatattcaacacctcggcacccttgtttaa

SEQ ID NO: 32964 - protein, 486 aa, DROSOPHILA
MQSLPLPGDEAIGLLPSQSESFSIWVNGEEHWISGADSSTTCADLICALISYQIDQKHVLSKEEILAPQQFAIVQKQRHYEEYLDSSARLLDVITSPHAMPKEEYQLHLRHLATSSRKQVPTTDKDSGMGSPVDSSRSMRIRRRGKLLSTKTTDNINTKQSKRSRKQQQRNHHLTPNESLLTIILAQDETILQQMTMLHEKDRQIFKIEEEKHQVRERELGKNYLLETYLKDLDEPQEKGEDLELFEEMTHIDVDRDFGIMSDSTVQTALNSGTMQDDIRLYWLEKIHEVNKELQCEEELLLSLHSKVRRHQVKRAYQTKSEVLLQIERLDTELATQVADIHHVERKLFTANEQLKAKLAVLECLSREFETTVSGGVQEGDVATGSNASAKVQQSQSDDLQHAGNWLHVVKRLFAADHLNRRLTQQALSEKNLTDRLIPSKGISKQMFEVLRSPDPSTSNSVNKKELSTRQAISLERDIQHLGTLV

SEQ ID NO: 32965 - DNA, 2921 bp, DROSOPHILA
aggatcgaggaggcgcaaatttatcgcaaatttctgacggacataagctagctttttaccccaccccttttcctgccatgtgatttatgaagaacatataataaagagatagattttcaatcggccatttcggaatagatcagatgagggaatcgattcatctgaaattgacgtacctcaaccttcccgcccacggccacaagtttcttgcaggcaccggtgatgcactcgttgaccgtattcactatggccatgggatcctgctcgcaccatccctccttctggaaaatagactccacttcaatctgatgaaagcacacaatttcgtcagtgcccgcacgaaatataataaatcgcgcggaagtggttccctcgtcaatagccccaacgaatggaccagatagcgtgggtggaggcggtgtcgtttcggttgtgggagaatccattttttttacgtggtgtccagagttcacctttacagtcaataaatgccagcacgctttctcgcgagattgtttcacactaaaattagttattggaatcttgtcgacatattcgacggaaattatgcgataagagataaggtgagcgagccttctctttgcaaatcgttacgatagcggtgtgtgcaagctaaaaacccgtcggatagtaaatatttactgcgaatgggcgcgacataacgtttatgcatcataaagaacgtgatttttgctatcgggaacaaaccttaaaattataaatcatttatttcttcattaagtgcattataatttaatatttacatattaaaattttgttataggtaatttttcacaaaatacacctatatataaaacgtattgcgcataaacgaacattcacaacgaaataatgtgtctggtaagtggggtaacacttttgcacgcaggctaaagagtatcagctgatctgaacgccaaactggataataacaaaaatatccagtttgttaccgccaagtaaactagtatattccgacatgatgatttcagacagtcagaagaaaggactgcgggagttacttctaaatgacaagaacttaactgttctgctacagttggccaaaggggccaccaaaaatatgtgcaaaaccgaagacccggagggtaagatttaattttggaatttgcacaaccaataagtattttgtatttaacttgcagaggcccttcgtctgatcactacacacattccagacatttacgtactgctttccaagcgcgctataaaaaaggaactcctctttacgtatttgagcaatcgacgcgctgacgcagccacagactttagcaaggcagacctcatagccaaggttatacagtattggaagcaggagcataaatcaagcatagagctttccggagaccagacttccagctcacttcatattcagagcgaagaggattatcccattcacacgattgcccgcaagttcggcgagtggttcttcgaacgcttcaacgcagacgcccttagtctggtggatttatgggcagatgcggctctacatctcacgatcatagccagtgatggaatcaatgagtgggagtgtacgacggctgccgaggtgttatcggcactaacgagcgctaagcagcagtttgacttttactttaatccaaacctgacgcacgccggaattcagggtcgaatggactcgtacggacatttcttagtgatctgctgcggcactctgcactcccgtgatagctgcgtcggaatctttgaatgtgccttcgggctttttcgggaccccttggctgacaacaactggaaacccaaaaaagtgaagtgcttccttaaaagtgaagctcagcccccagagctgcactatctgtgctcgagcgaaactctgcagacagctctggagctgtcagtaccctctgatgacttgaactagcggactgttatgtatcagcccgtccacatgaagtataatttcaaaaagaactgaatacttacttggacagaactatattaatcaatttgctctatgaatgttctacttaatatactcacgagttgaaactgcaaggcgtggaacaaatgtgttgactgcacaaactgcaaaattaaagaaaacaaatttattaaagaagtgtgggttaaaaaatatgagctgaatctgacagttagtcactcagatttgagcttatatgcctgatactttcttcgaccaaccgaagatacgattttctattttaccaactaaattctttttgtttactatttaacaaattcatattataatcattgagatacttttaggacatccaatttacgcaagaaactatatacattaaaaaattgttattaatagtgttagttattggtaatattaggtaaatcggagggacatacagcgtttgaattgtgttaggtatcctctgctaaatcgtgagtgtaaattattaccagttcagccagccacaaggccaaagaaggctcgcccgtaacaagcggcacactgaaattttagtacacataaatacgattcacaaaacaggttgaaactgtacttatgtgtatttatatatacatacacacatatatacatatgtatacatatatatatatatgtatacacatatataatagaactatatagtgtttggcgaatccgttacatgcattttatacagtagcataaacatttacacacgcaggaaacattaattgaataccaatattttgtataattcggttctcaaaacgccatagagcttaaaaccacagaacatatttagatcgcttgtgtagatgtaatgatctagtgatttttggttgagcagatgtatctaaaataacaaacgataactagtagctaacggctgagttagggaattgttgtcttagaactatgcgaaattaaattacgtttcattaacttcgtcggtcga

SEQ ID NO: 32966 - DNA, 864 bp, DROSOPHILA
atgatgatttcagacagtcagaagaaaggactgcgggagttacttctaaatgacaagaacttaactgttctgctacagttggccaaaggggccaccaaaaatatgtgcaaaaccgaagacccggaggaggcccttcgtctgatcactacacacattccagacatttacgtactgctttccaagcgcgctataaaaaaggaactcctctttacgtatttgagcaatcgacgcgctgacgcagccacagactttagcaaggcagacctcatagccaaggttatacagtattggaagcaggagcataaatcaagcatagagctttccggagaccagacttccagctcacttcatattcagagcgaagaggattatcccattcacacgattgcccgcaagttcggcgagtggttcttcgaacgcttcaacgcagacgcccttagtctggtggatttatgggcagatgcggctctacatctcacgatcatagccagtgatggaatcaatgagtgggagtgtacgacggctgccgaggtgttatcggcactaacgagcgctaagcagcagtttgacttttactttaatccaaacctgacgcacgccggaattcagggtcgaatggactcgtacggacatttcttagtgatctgctgcggcactctgcactcccgtgatagctgcgtcggaatctttgaatgtgccttcgggctttttcgggaccccttggctgacaacaactggaaacccaaaaaagtgaagtgcttccttaaaagtgaagctcagcccccagagctgcactatctgtgctcgagcgaaactctgcagacagctctggagctgtcagtaccctctgatgacttgaactag

SEQ ID NO: 32967 - protein, 287 aa, DROSOPHILA
MMISDSQKKGLRELLLNDKNLTVLLQLAKGATKNMCKTEDPEEALRLITTHIPDIYVLLSKRAIKKELLFTYLSNRRADAATDFSKADLIAKVIQYWKQEHKSSIELSGDQTSSSLHIQSEEDYPIHTIARKFGEWFFERFNADALSLVDLWADAALHLTIIASDGINEWECTTAAEVLSALTSAKQQFDFYFNPNLTHAGIQGRMDSYGHFLVICCGTLHSRDSCVGIFECAFGLFRDPLADNNWKPKKVKCFLKSEAQPPELHYLCSSETLQTALELSVPSDDLN

SEQ ID NO: 32968 - DNA, 2411 bp, DROSOPHILA
aatatgcatgtgcatattttttttaaaacattgttcacagaatgcgtgtactggttttaaattccaattcctgaatttacggattttgctaacagtcgaaagcgaaaggcgctttcaagtttcaaagaatcaattgcgttaatctggtaggcaaccggcctataaataggcgtcactgggtttccggggacctcagaagtgcctggtagctcaagcgaagcggaaccaacaaactcccgaaatggattggatcaaaatatttggtagatgttgtgacgacttgagatcagcgatattaacttagactctagtttcaggtcttgccctgctattgattgggatggcgcagtgctacccgcagttcgatagcgaaaacccctggttgaggcctcggcaacccactgaacctacgatatctccgaatgcggggggcagtaccccggccaacgctgctccaccaaccacccagtcaccgcgctatttcgcctgtttccattcatgcccggccaccagcgagtacaatccaatctgcggcagtgataacgtgaactactacaatgaaaacaagttcaactgcgccttgaactgcggcctaagtgagtatataggctgcgtgcctccccagattcctttctaaaacgatgtatgtacacatggatgccttcttcattatagacatccggaaggtgcacaagggaatttgtcagacttagtctagatcgcttgaattcagttcacttgtgtatgtaagcatgaacgtattgcaaatactctattcatcgtctgatcgatgacatcagcgaatataaatatgtatatatgtacgtacataaataaaaacttagcgctgttactggtatatggacggtgtatgaccccaaaaaactcagaatctcttgcttccaatcagtcacagtcgggttgcttgtctgttcgcctgtagcgctaaagtctccatcatctattacctatttattgaggctttgtaaaattaaagaaaatggtttacatatgcagtaagtcgaggccatacattaatatatacataagatgtatatgtacatattgcatatatacgtaccttgcgttcatcccactagcagctcttgtggtgttgatctttcccgtcttgttgttgggtgcaccatgggaagggtcgcatcctaagtctcaggtggaatacatcagcaacgacaagagagttgattctggcttcgccaaccccaatatcgtgcccatcacccagccgtcggtcgtaacgcaaacagctcctcctccgccgccaaattccaaaaactttgcatatagtccgatgacgcagagctggaccctcattgcgccaggcgatccgctgcccaataatgacaccctcgtctggaaccagagcaatgacaaatggctcactcgctaagcaatgcaaccatcgatggctttgctttaatcattgtgtattactattgaaataaatataactaattcactgtaggacttagcggtggcgacggatgtggctggaggccacagactgaccctgctgccgcagccggcacaactcgtcggtactgtagttcagcttgcgggttgcgttttctgagaaacgctcgaacttggccactaggtccaccagttgcgtcttgatcgcctgcacctcggcgagcactgcgcttaggacattagcctgattcttcatctgtactgttccctccgcctcctggcggaactgctgcggcacatttgtagcggatcgggggcgcaaaagctcgtgcatgtgaaataaattctgtggagtcttctttgtggtccccgtggcaggttctggcttgaggaaatccgtgtggagcggctgctgctgacgctgtagactgcggctgaaaatgttgtagttgttttcgaactggcgccgtcggaggctctggtttctgtcgcgccgttcagccactagcttatagacatttaacttaatatcctcaggcaactgattgtcccgggggtcgttgggccgtatagtgaactgaagtttgtcccgggacgtgcgcaaaagagcactcctcttacacagctgaatgaggttagtgggcgcacttcgcagtaggcgggagaaaaataggctttccaagcgtgacaccagctccgcttggcgcacgagacgatcgagcgtggcgctcacttgcaatccttgtatgtcgcttacggccaatcccaccatgagattggttaaaattaccgtaacaagaagcacgaaggagagaaatatgatgtgagcggtgacagggaatttgacggcatagtccccatagaatatgtcttcaaactccagttccccagacatcatcgtgatggacttcaaaaaggaccatgtgatgttctcaaaggcaggataatcattgaagagcacggcaaagctgaggcca

SEQ ID NO: 32969 - DNA, 324 bp, DROSOPHILA
atggtttacatatgcactcttgtggtgttgatctttcccgtcttgttgttgggtgcaccatgggaagggtcgcatcctaagtctcaggtggaatacatcagcaacgacaagagagttgattctggcttcgccaaccccaatatcgtgcccatcacccagccgtcggtcgtaacgcaaacagctcctcctccgccgccaaattccaaaaactttgcatatagtccgatgacgcagagctggaccctcattgcgccaggcgatccgctgcccaataatgacaccctcgtctggaaccagagcaatgacaaatggctcactcgctaa

SEQ ID NO: 32970 - protein, 107 aa, DROSOPHILA
MVYICTLVVLIFPVLLLGAPWEGSHPKSQVEYISNDKRVDSGFANPNIVPITQPSVVTQTAPPPPPNSKNFAYSPMTQSWTLIAPGDPLPNNDTLVWNQSNDKWLTR

SEQ ID NO: 32971 - DNA, 3294 bp, DROSOPHILA
acagtttagatgctatggaattgtaccacgtagttggaccaccacacaaatttaattaaagtatggagaaaaacttttttctgttttcaagctgttcccgttgaatgtgcctgcccacatctcatctatagcttctgagtaaatccaacagcgaaccgtctattcttgggactttaacagcgtttgagaaatggttggatctttacattgctcatttaatactaaagttaatcttctttcccaatacctagacgcttatttatgaattcattgcagtgtttatacagagacatcggtttcaagcaaccagtcttatcaatcacatagttgacataccagtgcacatttgcctgtattaaaaccaaccgagaacatgtagcaaaatttcttgaggcaatgggaatcaaatgccaacttgaaagcaataacaccaacactaagtcgtcgcagtccaacatccatactacacggcgaattcgaattgaagacgctggtcaggtctgaacccaactagaacccgcttacacctgtttttcagcaatttttctggtcaggatgtggattatctgtcacagaaacttcgtttgtcttgagcgtcgctaagattggccgtttgaccctcccaaaagtgagattctaagcagccttaaatttattttacaattcttacagcggtgccgcacagttgagtgtgcctgtgggcatcgactaagcaatatttgaaccgaagggcagggcagtggaccgttccgttgatgatgatgtgcaccgctccgagctggctaagtctactgctgtgctgctgcaaatcgttaaagggaacccaaaacgatgcatcaagtccatccagttaggcttctcttccaaagcacagctcacctgcgctacaacgacaaccaattcaatcgcacctgcttctgcaagcgatcacaatacgtcaaatgagcatcgagcacagaaagcaagcaaacaaccaggttaatggcttcctctgctgactatgaaactatacgcctttacattgcagccaagaagcctcttagtgcatattcaactaccagcacagagcttctcaatgactggagtaagcattgttctgaccgcatcggaccctgaccgagtccgacttgggtgcctctggtcgcaagatctacattaggacagagccagaataggagcgcttatctagcgccatgatgtgctgagctgaacctaagcacgtactgcattgcaccgcacagatatgtgcgttcggtccacgctaaagggaatcaaatgcgtttggaccgagagccgatacaccgcaccatcaccagtattcgctgtgaagtgagctgatgtgttgtcgttgttacagggctgctgctgcaactgctccacaggtatcctcgcctagcgtcggtaactatcatttgtcaattttagcggccggcagtgtacatcaaacattgaagtccggagtccggagtggcatgtaattaacggcagatgtgaaaccagcaaatggtgctcaagcattccattttaaatctgaagattgtcagcagtaacagttaaagactatcgacgcagacttgcagaacgaagcgcaggaaggacaaagcacttcgatcaccagcgggttgtcgttttacttgcactttccttccgtaggtagcccagaattcgagaaagcccatatccatcgcaaagggaaacaaatgcgattagtgtttgaagaccaagctgggtgtccaatgtgtcgcaccacgattagccagttgagcccataactcctggcccgccgatcatcgtaccgcaaaagggaatcaaatgcgaggtggtactacagcagtcgagctcctcgttgagctcctggtttaagtcgaactcccaactgagctcctggtcgagttcttcgcttcagcgtttttatcgtaaagggaatccaacgcgatgtacagcgacagcggcaggcagggtcacccaatacacaaaggtataccaatatgatcagagttccagtccgtgcaattacgcttttcagaacctctcaaaaactaatctgcacgtgtctaaatctggctgccatgccaggcgcgacatcaatcatattcgccatgttggtctcaaagggaatccaagagacacgcgccccgcggtacaaccaactgaagaccaaatagattttgttatgcatttataaccaagcattttagaagtcatatcctcataattttttcctttagtgtttccaaatctatgtattctaaacgaatcgtttcattatcttgtaggcttttataaacctttaatttattacttgtaaacctttcctctaagagtcaatgcagacatccgacttcgctgacgattgcatcgggactgcattaccctaggatagacggtccggtctagaagtagcagcaagagtcagttaaatatcagtaccgctattagcagaagattcatggcagtaagatgatgtggatgcaccgtacatagacgtttcaaactgcagaggatcgtttgacccccgaaccaaggcagggagaccatacatacacaggcggaggcagtgctgaccctcaatacattcgagtatttcaacactctaccttttacctatatttactgggcattcaatcaccaaattcgcatcctgggtctatttggagcatattaagaacgaacactacacggcgtaggagcaccacacgatttggtcatttttattatgagaagtcctaaaatcctcctcggatcattcctcattatctgcatttggagcaacaagtaggctggaggtatcatttcttcactaagcaccatcgatttcacactactggcttgggatagcacctaattctttacgagtttcggcactgatgacgacttcaatccttgtttcaacccgtaccccttcgaaccaatataaaagttggattgcatacagctttcgcttcgctacacactggtcgattctttttctttgtgaggacccttcgtgaggatattagatttgttgaagaatgattctctaacttggactgcggcgtgggattcagtctaatttaaccatcgacagcggcctaggagtaaatttggacagcggcgtgggattttcggctctcaaagacgacggcggcggacgtacggatagttcagactgcggcgagggatatcaagtttttgcaacgcgggattattagggcgtttaggccagggcgctaggaaccatattcttaagactactggaatttacatcaatggagatgactgcggcgtgggagacggagatcgggactgcagcga

SEQ ID NO: 32972 - DNA, 447 bp, DROSOPHILA
atgaaactatacgcctttacattgcagccaagaagcctcttagtgcatattcaactaccagcacagagcttctcaatgactggaccagttgagcccataactcctggcccgccgatcatcgtaccgcaaaagggaatcaaatgcgaggtggtactacagcagtcgagctcctcgttgagctcctggtttaagtcgaactcccaactgagctcctggtcgagttcttcgcttcagcgtttttatcgtaaagggaatccaacgcgatgtacagcgacagcggcaggcagggtcacccaatacacaaaggtataccaatatgatcagagttccagtccgtgcaattacgcttttcagaacctctcaaaaactaatctgcacgtgtctaaatctggctgccatgccaggcgcgacatcaatcatattcgccatgcttttataaacctttaa

SEQ ID NO: 32973 - protein, 148 aa, DROSOPHILA
MKLYAFTLQPRSLLVHIQLPAQSFSMTGPVEPITPGPPIIVPQKGIKCEVVLQQSSSSLSSWFKSNSQLSSWSSSSLQRFYRKGNPTRCTATAAGRVTQYTKVYQYDQSSSPCNYAFQNLSKTNLHVSKSGCHARRDINHIRHAFINL

SEQ ID NO: 32974 - DNA, 2512 bp, DROSOPHILA
tacaactcagtcgccgcactttaacaacaatattttatttttgtgtgtattattcaaataggtataccttccgacagctctaagtccagttcggcgagcttctcgcggacgtagccaggcagcgaggcagtgtgctccatggcagatgaaaagtgtggctttagggttttgttctatcctcttccttggaggattcgtctaaactttggctggtcgcagtacacaaacacacccagacaccgctactttcccacttcgttgtcaaaaatcgatcgatttgccatttattctatttcacattttgccgacgcaaataaatacatccgtacttgcgcagcaccagtactttgggttagttagaaaacacgatattacgaatgtcttttacgaatttgcacaatgaaagtaaacaaagaaaaatagcagtacaaatcgattttatgaactagcgaaaaattgataactatttcttcatactcttgggacaacggcctttttcaattttcgagatgcggtcacactgcccaagtaatcgaaccacgaatttaagtgttatttttaatgatattaggcatagaaccattacaattaaaaagctctattatttattactttaatcgcttgtctcttaaaattcgattcaacaaaagcaattggtggcattttgctaggtagccctgaaatactgtagagactatcgatatctgcacctaaggcgcctattatcacattcggattacgaagacaaagacatgcgaaacctggatacgattagtggcgaagaaaagcaaagtcctgccaacttagtctaaattgtttctaagccggctgcctatacgcctgcgttttgagcaaagcggtagtatctttttcggaaccatcgatagcttgtcatctccagtaaaaatgcgtgagtttatttaaaaaaaacgctaggcatacaactaattattcttatgatgcagagaacttgaagatccaagaggaagtcaattcattgatgcgtctaggccagcacttcgatgaccagttaaagctggctagcgtcgagttgggcgatttctcggacgatgacctggcgctccttgacaaatgcgcccaatattattcacttttgcacattcacgacatcaatctgaactacttgcgcgacttctattgtgccaagaagagggaatgcatagaaaaccggcagaccacagtgcagcaacgcgtagagctgcagcgcatcctctcgtccatcgaggaggcgactagggacgtagttatgttggagaggtattggtgaacaaatccctttaatagttgaatccctgaccaaaaccattcttctgcagatttaatgctgctgcggaagagcggctcatcccggatatcgtcgtaatgcagcgaaacgcccaacagcttgcaacaaaacaggccttactggaccggcaaaaaacccttaagatcccaaaggattttagcattgaaagtgtcatcgagaaggtagattcgctggagcagcgctaaagaagtgaattgctttcgtttttaaaaaattatttaattgtatttactcagtaatgcaaaacactttacaaaaacataaaatctgcaaattttaaagatgaatgttgaggtttacaacttggaacactacacaatcagagggtgcacttattttggttattgtacgcattttaaaaacgttccaattgttgctaggttgtgtcaaatatttatttaaagtatcatgataggaaaactagaagaccaaataataatttgccagctgcttaaagcatacaaaaagtgtaccgtgttcttccatgccattgctcatatgtatgtatttgtgtatttccaatgtggtatatgtatcatatatattggtgtatagatagaattagtaatttcatattctttaagttcttgcttgttgttatgtatataaagggcgggtatgtggcagacaatcttttcggctagcaacgcgctccacgccacaggcctactccacgtttccgggcatcttttagcggaactcgggcgcatcatcttgcgttatgtcaccgtacttccagatggccagatgcgcgacccgagctgcttcctgcgcggctttgtactggtccactagttccttgagcttccgctctccacgctgttcggccagaacaaggccctcggctacaagctgctttccaaaatcgactttagtagttggatcgcgaagagtggccaagttcggcgacccagtcacctttagctcgacattgagttgaaccttatggttcaaaacgtcttcggaaaaggcacgcaaggcttcttccttatcttcgttgtcagttggcagggcgactaaggccaaagcatactccgtagcgtagggcttttcgctgctgaaggctggtggcagggctgccaaacggttggtcggaagtgtctaaaaatggaaacgagtgttaatactgccaggaaaaaatcacaatggttttggtatgagtgtgtcgcaactcgaatacttttg

SEQ ID NO: 32975 - DNA, 453 bp, DROSOPHILA
atgcgtctaggccagcacttcgatgaccagttaaagctggctagcgtcgagttgggcgatttctcggacgatgacctggcgctccttgacaaatgcgcccaatattattcacttttgcacattcacgacatcaatctgaactacttgcgcgacttctattgtgccaagaagagggaatgcatagaaaaccggcagaccacagtgcagcaacgcgtagagctgcagcgcatcctctcgtccatcgaggaggcgactagggacgtagttatgttggagagatttaatgctgctgcggaagagcggctcatcccggatatcgtcgtaatgcagcgaaacgcccaacagcttgcaacaaaacaggccttactggaccggcaaaaaacccttaagatcccaaaggattttagcattgaaagtgtcatcgagaaggtagattcgctggagcagcgctaa

SEQ ID NO: 32976 - protein, 150 aa, DROSOPHILA
MRLGQHFDDQLKLASVELGDFSDDDLALLDKCAQYYSLLHIHDINLNYLRDFYCAKKRECIENRQTTVQQRVELQRILSSIEEATRDVVMLERFNAAAEERLIPDIVVMQRNAQQLATKQALLDRQKTLKIPKDFSIESVIEKVDSLEQR

SEQ ID NO: 32977 - DNA, 2566 bp, DROSOPHILA
ctttcatttctttggatcggacagcgtgtgcaacgtgtcacacacgcacagagtctatacgcgtctcactcgcacttgtcagagttgcactagagctgctttggtaggcgctgccgcgtttgccacgccgataggaggatagtacctcttagtttggacgaactttcttttcaaggagtctgcgcactgaaatcctagccacgagtttcatcccagagccgcagaccaatccgacttacctgctttacaatgccggacaacgactttgtaggcgctggcggggcgtctttagctgctccggcagctgtcgcggtgttcgctgctgttgccatttttttattgaatgcgggggagatactagcagagggccgtggcactaggcttcaatagcggaatattgcgttgattgcgtttcggagctaaacaccgctttcaacctaatgaagtttgaccaagagaagaaccgctctcaaaatctaaaaaattttcactgaagtgacactgctagctagagctgagaagtcagcgcgatagcatcgatattttcgtgacacgcttgtcatccgataggtagtgctaaacatttttcttaattgccaacttaatttacaaaaaatatgaatgacggtaaaattgagagggatttgggatcctttatattgggaatttttatatattcatatttattttaattgtatttatgcgtaatttatcagacgaactttggaatttccaataattctagatttttttgtttcatttcaaaactaattttaattcgcttaacgagtgcatatctatattatgtttactttaaatttatctgtgggggcagccttagatgttcacattgcaggccatagtgtcgatagatccaggcgccaaaagagtatcgctatcgataaatggtcgccagctgttcggcgaatgttacgtgatttcctatttgtaacattgctaaaaatcgagtaaaatgaatcaagccgatgtaacaaagctcatgtcacagctgcgtatagcggtcaggcccaacaagcgccatctgaagaatgtcgatggcccggaaggtcggctgctgaagctgcgtaagaccgtcactgcgttggtgaagcacgagcgtattgaactgttctacaaccgtgccgatgaagctcgtggctacgccgaactggtaagagaccaccggcgatacgccaaaggctggaatccaaataaagtttcctcccctcgcagctcatttccaatgccatacgccatggggaccgacaccaagccaccatggaactggcggactattggctgctggaaaagcaactggttcataagctcttcaaggtgctggtaccgcgctatgagacttacaatgtgtcctacactcgcatgtacaaagcccctcgggagtatcctggcatttactacaggcggtctgtgctggagcttcggggcaatccctacccttcgctggcggcggatcattctcagaaccggaatctgctgcacaatgtgcttctggacgaggcgagaaaggagtttaggcgtcaaaaactgtcggagttagttcactaatagctcttttcactaaccgcctgtttatttagtagattagcaagcagtttgtcgcttagaattcacgtaagacttaaaagcatctttattataaatgtatgtatacacaaaacgaattgtttgaattaagagttgaacttatacaaacgactaaagtctactgacattgcagtgattgaagtaatccggtttccaatctaccgagttagagaattagctttagaatgattcaatttctgaacggataacttaccctttcccgtaaggcaggcatccagcaacatttcacaaatgctgtagaagaattggtgctcatttgtcgacgatgcgcagacaggcaaaaacggatcacaattggtaatagcactacaacccgagttgctgctcaatactggcagacatacggacagcgcgaggaacattatgatgttgaagatcaggaaccaagccaaatagatattcattttggatgaattcgcagaattatcattcactagcgtattaaatgacatcgtcacctaaaaattatttcatagcagcaaacagattgggagcgaatcttttttcgcagatcaatctttatatgtatatattttatttattttgaaatatgatccgttaaagttcctctttacgttccattcggtcacagaatgtaaatccgaatttggctgccgacatgaacagccatctaacaactgataagcactgggggacctacgcgctgatgcatactaattcgctcatgttcctgaaccccaaagttaccatggaaacgagctcggaacactgaccaatgaatcaatgataacttcacctctatttttcaccggaagcttttgttcgtttcctcccagacttcggtatgaatggggttgctcaactgactggaacccagcgttctttgtagtttcgcgtacatttaatccggccggccccgatatgtttgtaaactagtgcaactttgcggatgaaatggtgttggagagcatgtttgata

SEQ ID NO: 32978 - DNA, 504 bp, DROSOPHILA
atgtcacagctgcgtatagcggtcaggcccaacaagcgccatctgaagaatgtcgatggcccggaaggtcggctgctgaagctgcgtaagaccgtcactgcgttggtgaagcacgagcgtattgaactgttctacaaccgtgccgatgaagctcgtggctacgccgaactgctcatttccaatgccatacgccatggggaccgacaccaagccaccatggaactggcggactattggctgctggaaaagcaactggttcataagctcttcaaggtgctggtaccgcgctatgagacttacaatgtgtcctacactcgcatgtacaaagcccctcgggagtatcctggcatttactacaggcggtctgtgctggagcttcggggcaatccctacccttcgctggcggcggatcattctcagaaccggaatctgctgcacaatgtgcttctggacgaggcgagaaaggagtttaggcgtcaaaaactgtcggagttagttcactaa

SEQ ID NO: 32979 - protein, 167 aa, DROSOPHILA
MSQLRIAVRPNKRHLKNVDGPEGRLLKLRKTVTALVKHERIELFYNRADEARGYAELLISNAIRHGDRHQATMELADYWLLEKQLVHKLFKVLVPRYETYNVSYTRMYKAPREYPGIYYRRSVLELRGNPYPSLAADHSQNRNLLHNVLLDEARKEFRRQKLSELVH

SEQ ID NO: 32980 - DNA, 7006 bp, DROSOPHILA
aacatatgatttctgatttggcatttaaagcagactgccctgcggaacgtcaatgcttccttgaaggtaacagtgcagccactaggcggatacatagccgtaatgttgtgaaaaatgttgtgttacggttttatatgaatgcaggcttccagaaatcctcagtccagcacgagcacgcaagctcagcaacatgttgctgccatgtgatggtgtgcgtgagcacgtgccaaaataactacgacacatgtgtactcttgagggaatgtttccacaatcaacaactacgcacttcacaccactaggtgagtcatgcgcagtatcgtccctgcgaacattcatccgaatgttggcataagtaagtaaagggatcaggtgtactgtaagccttccgtctagttactttcgatgcagattttgattctggctgagggttcgtggctggctgggcctcttctccttatgttgaaaacacacaacaattcggtggtggaagtatactgcggacgtcaaactggcgagccagggcgcaggcgttggttcatttggcactttgtctggtactctcccacatcggcatcctgcaatctctttggctcagcatccttgtaagctgttgtcggagcaatctgggcatggggcaactgaaaggaaagcaactttcccattcaggagcgcacaagccgcaggaatcgcgagcgcagacaattcagttcggctttaacgtaatggacggaaggtttgaatatcgcttctcgccccagttgtacagataaagtcccactgcacgcaatagggcacttggaagatacaatagaacgccgagcagtgtgtgtatataggtttgaatgcttacgattgggaataagtggcaaaatattgcaactatgacctaaacgcaaggcagttaataacttcgccagcttttggccagattcgtgacacacttaacttgaaacttcaatgctagtgggatggatatctactctcaagccgtgttttaatgccccaaggattccgctttcttgccacagacaatgagcaggtgcgtgtgcagttaaactaataaaattgtagtggacccacccgacccacatattttgcctatttgctcctatttgtgttttttttggttacctatgcatatgttatgcatatgtatgctcaacaaaccatgtggaaattgccgatgggaagctttagactaaatgcattgactgcgtatccttcactgccacaccctaaagtgactatgctatcactcactcgcagggggaaatgacccacaatcataacaataaagatacagatgagagcccacatgtacatattttatggaatgactgataaccaatgtatttagaatgcatgacacactttgaattaagtgctgtagttaagtcacacatggcactgcactatctgcagatttcagccaaattggccatttaaaatcttattttctagatttgcatgtaatctataaataatggcaactgaaacctttttggatctgaattatgagaggggcaaggtgtcgaagaggtcactgcgaccaaagctattaaaattgacagatgtgacgataccacatcgaagtcggaagaaaaacaaagttaaggtgagttgcgagttgtgagagggaaagaacatttgagcaactagatcttaaagcgctgtttgttttcagaccaaagaccgatcagccacatccgtgcgcgacaggatctatgatgatcctgcctacacagaggacataagccacttggcgaatcccatgcgtcgcagtagcatttctgggaaatccttcttggaacacaagacgaggtcagatacgggcggtcaggcatcatccagcagcctactggccaaaaaccagctgccccaggagctgcatcagtatgtgtcagggaagcaggccaagatcaaacaacaccacacagccacaatagcttccggtagcaccgccatcagcataaactacgaatgtgattcgagcagcaccgacaacgaggtccaggaaccaatccaaaccaaaggtggtatgaaccgcagggtgcgcagcctagagcgcaatctggccgccacaggctccgaaagggccgaaaagaagggaactcagaagcgcacctcgaaacaaaagcggaatcttagcttagacaacaatcgccatcagcccgcaggacatccgaagcgggaggcggtagctgtagctaaggtcggtcacgatgctgacacacgagcccgcaaagagcgaaatcggaagccctacggcgagatgggtccggatggtggtgtcccgaccgaggtcagtgagttagatgacgggtactctgctcgcggttccgctcagagttccgcctgcaccttaccagcagaatcagccgccgacgcggcgaaagttgctatcggcaaacggttcctgcgcggcgagattggaattaaaagctttaactactatctgctaaaggagggcttaaagagctcgaaaaaactagtggaccaacagcgaaccccagctggcagtggcagtgtggagtcacctctgaaggccgaaaaacgacattgccgcagcgaggaaaacatctacgaggagatcttctttaaggacacggccaacgcggtgagctcgtcggcaacaggagtagccaccggcatggcgatgcccgttgccctgacaatgtgtgatcaagagacgcacagcctggaaaaaggagctcagccgcatggaataggcgccaccaatcccgcatttgcagactgcgagttttgtatggagcaatgcagcaaggaaaactgtgaatattgcttggcccacgttgaacaagtagcaagtaaaaaactgaaggcggggcaaacacaggaagagcagtacctcaaccaaggacataggaaaaaccacactatggattcgcggcctagtgctccggtggtcgaggtgccgaccgcccatatactagagttccagtcgtacaacccaaataatccaggcgtttacaaaattgagacgactccagtggccataacaggagactacaacccgattctacaatttcagcagtcttctgctactacatcgacctcagctaccaccacgccaagtgaaccccagatttatggtggatactacctgccccatgcgaaccagaggccataccactcgccaactgttaacagccagctgccaaatcactacgccgtgggtggcagtctgctcttggcccaggttacgggggccactcaagggtccgccacgccgcctcggcgaccccagcagcactttatagtgggatatcagaacggaggaggtatgtccgcaggtgcggcttccttacagcgctttaacacgaagtcctcgtcctcgagcgactcgcttccctatcacaaatataataccatggcgcgactggaggcaaatgtgctagcagctcctgccactggggatctttactatgcggtcagtgggacgcagccactgcatccgcttatgtatgctgccaatagacccattggaggatcccagatactggtggatccctacgatccgcagatgtacaagagcgactcaaaggcatcaattctgagcgagttctcccttcgcagcagcgacaactcgcaacgctacgctcggcatcctcatcggcgacatggcgggcgcgtcagtgattccagtctgttttcagtgtactcaaactctggccaaaggcggtactttggaagctcggaaggcaggttcggatacgattgtagacgctgcagtctggatggcgtcattggaatgagtactgcgactggagggtctatgatggctcccgataagtgcagctactcggacaactgccggttcgagtgccgaaactgcgactgctcgtcaaattactttagctcagactttgatgatgtttacggatcaatagcgcgaggaggaagcagcggaatcccgcgaaaaactgcagcagggacactgccatcaagcgcacaagacgatcaagttgagcgattggaagccccaccagcgtcgatggagcagcagcagtacgcagacctaaaacagaacaagtacgcccaagatttctttaagcatgttaacgacgtaaaacgtagcatttaccagtcggaaatgaagagaaacaatagcttggagtcctcaaggagtggtccaagagctggcggcagcacaaaaagcaatgtcaaagcaagtcccaagcgggccgcctcacaggaaactagattagtaactactcttccgctaagcaggagtcggctttctgccggcgtaaagccgacacctgcaccaaggaccagtctccagacaccgactcctttgccggagactaccgtcgcaagtaagtacaaccgatgtgggattctattgtatagcattgtaaataaccctggaattattcatagaagatcccacgcctagtaagcgaaaaagtcaaccaactgtccggagagagtatccttccttggacaggctcgttgcgtctaccacgggcaccattccgaagaagaacagcaggaacataacagcggccagcttacaaagcccgaagctgacgcaaaaaactagatcagaggctcccgaaaagaaggttgcacctgaagatcagttgccgctgcctccgtccggcaaacgacaccatcgcacaggcgcatcgaagacaaatacaaacgctccctgttccagcctacgcaggaaagacattccggctccacctccgccttcccccgctacatattccgacctccaggagctaaaggccaatatggagggttttcgagacgatactaagtcacgaagcttggagtacgacactaacgatcttacggctgacgataattccaataaaactcagaaaaaaagtctcagcggaccaccgaatccaatgacggaagccccaattggagccactgatgcaggtgcagtggagactgacgacaacgacgtcttctatgatgcacgcagcgaggattctggcggtggtatcttgccctcgaataccagtgatatatcgaaaatggtgagtgctttgctattggtagcagaattttggaatcgtgtaatgtgaaatacaagcccttatttgagtagcccgactagtagctatgacaattaatacaaattactattgtagatatatattatttttattacttcaaattttggctatttgtaaaatcgattttccaaagcctacatttgtttgaaagacgaacttttaaaagtacagaacaccgaaatttgccaactcagttacagcctgaacatagattaatagttgttagaaataattggacggggagcattgataatgaaaaggggccgagttgaaataaacatgaataagatttcaattaaacgattttttacagagtccatcccacatggcgacattcacacgggcggcaactaacgaaaatcgcaaaggcgcctttgacaacgaaaaggagcactctgccgaggatgatgattctccgtctcccgccgcccctgcgccagaggggcgtgagcaggcgtcctccatcacgggcagaccgaaagggaatggcaacagtaaaataaccacaaccccaagctgtgagctcgggagctcggccgaagcggaaagcaagctggactccgccgcactctgtcgaccccgaccacgacctcgccaagcgtctccccacctcccgcccgaatgcacggacactgggggggctggtgacgaacaggcaagcaaaacaaaacacgaaaagaagactccagcagacgcccccaggcaacatgttggaccaacatgttcggaggggcagcgaaccgccgcgctagcaacaaatgttgcttgcgcactctcaacaaccaccaacgctggcaacacgagcgccagcaacagcgtattggagctggagctcagttgcaagacgggcaacacggacagcgaaacgccagcggtagcgcacaggtacgcgactctgccattgcgcccaatctatgatgtgaaacttaaagtgttagtcacctgaactttttgtggcaacgggcaattttcggggcaagcatcggtgcacggcgaacacttgttgttcttggctacttggatgcccaggactctggccaagtgaagtgaaatgtttttcgtgctcctcaaaacacaggggcatcggtgaaaaattcaatcaactagtgaacttaaatagtaaattcccattaccacatggttcgattttaaagtgcgttaattgggctagtgaagctatttgcactccacgagaggcaaccgtatgcgcagcagctcctgagagggttactgtgggtgacatttggtatcaccttgtgttagcctccccttaaaacttcactttaaagcggctggtatctgaaatgggtgaaatgggggatcgatggcagcagctggcttgccaattgcattcccagccggatatgtactttgcagtggtctgattcgtgagattatttcattcaatgtttggatactttatcggcgttcaatcaattacctaagagcccagctgggtgcaaagttcaattgtggaaggagctacattgccgtgtttttatggcctgattgaaccatttgaaaagcaagtgccgggctaaaagcctactgaattgatggttgattgcccattcaatcaactcttctttcgcgataatttgtcgagtgtgtcttaaagcagctgggcatattaatataattaattaccaaaccttacgttcacgtgatggatgacagtgtatatgtacatatgacagaactcggcgcgtttacatctgcgtgtaaatatcctgcggcatggtgaatagacataaatcaacctcagagcacaaattcaggaaaacaacgagcggctaatgcaagtgtaatcgtggatatgtgcttttttccgccaactttttccaaccatatcccttgattataaactgaacgatatatgtataagtttttttcaatagcgcgtcctgtgttgcgctatgtccatttccctttcttctctacaaaaa

SEQ ID NO: 32981 - DNA, 3888 bp, DROSOPHILA
atgccccaaggattccgctttcttgccacagacaatgagcagaccaaagaccgatcagccacatccgtgcgcgacaggatctatgatgatcctgcctacacagaggacataagccacttggcgaatcccatgcgtcgcagtagcatttctgggaaatccttcttggaacacaagacgaggtcagatacgggcggtcaggcatcatccagcagcctactggccaaaaaccagctgccccaggagctgcatcagtatgtgtcagggaagcaggccaagatcaaacaacaccacacagccacaatagcttccggtagcaccgccatcagcataaactacgaatgtgattcgagcagcaccgacaacgaggtccaggaaccaatccaaaccaaaggtggtatgaaccgcagggtgcgcagcctagagcgcaatctggccgccacaggctccgaaagggccgaaaagaagggaactcagaagcgcacctcgaaacaaaagcggaatcttagcttagacaacaatcgccatcagcccgcaggacatccgaagcgggaggcggtagctgtagctaaggtcggtcacgatgctgacacacgagcccgcaaagagcgaaatcggaagccctacggcgagatgggtccggatggtggtgtcccgaccgaggtcagtgagttagatgacgggtactctgctcgcggttccgctcagagttccgcctgcaccttaccagcagaatcagccgccgacgcggcgaaagttgctatcggcaaacggttcctgcgcggcgagattggaattaaaagctttaactactatctgctaaaggagggcttaaagagctcgaaaaaactagtggaccaacagcgaaccccagctggcagtggcagtgtggagtcacctctgaaggccgaaaaacgacattgccgcagcgaggaaaacatctacgaggagatcttctttaaggacacggccaacgcggtgagctcgtcggcaacaggagtagccaccggcatggcgatgcccgttgccctgacaatgtgtgatcaagagacgcacagcctggaaaaaggagctcagccgcatggaataggcgccaccaatcccgcatttgcagactgcgagttttgtatggagcaatgcagcaaggaaaactgtgaatattgcttggcccacgttgaacaagtagcaagtaaaaaactgaaggcggggcaaacacaggaagagcagtacctcaaccaaggacataggaaaaaccacactatggattcgcggcctagtgctccggtggtcgaggtgccgaccgcccatatactagagttccagtcgtacaacccaaataatccaggcgtttacaaaattgagacgactccagtggccataacaggagactacaacccgattctacaatttcagcagtcttctgctactacatcgacctcagctaccaccacgccaagtgaaccccagatttatggtggatactacctgccccatgcgaaccagaggccataccactcgccaactgttaacagccagctgccaaatcactacgccgtgggtggcagtctgctcttggcccaggttacgggggccactcaagggtccgccacgccgcctcggcgaccccagcagcactttatagtgggatatcagaacggaggaggtatgtccgcaggtgcggcttccttacagcgctttaacacgaagtcctcgtcctcgagcgactcgcttccctatcacaaatataataccatggcgcgactggaggcaaatgtgctagcagctcctgccactggggatctttactatgcggtcagtgggacgcagccactgcatccgcttatgtatgctgccaatagacccattggaggatcccagatactggtggatccctacgatccgcagatgtacaagagcgactcaaaggcatcaattctgagcgagttctcccttcgcagcagcgacaactcgcaacgctacgctcggcatcctcatcggcgacatggcgggcgcgtcagtgattccagtctgttttcagtgtactcaaactctggccaaaggcggtactttggaagctcggaaggcaggttcggatacgattgtagacgctgcagtctggatggcgtcattggaatgagtactgcgactggagggtctatgatggctcccgataagtgcagctactcggacaactgccggttcgagtgccgaaactgcgactgctcgtcaaattactttagctcagactttgatgatgtttacggatcaatagcgcgaggaggaagcagcggaatcccgcgaaaaactgcagcagggacactgccatcaagcgcacaagacgatcaagttgagcgattggaagccccaccagcgtcgatggagcagcagcagtacgcagacctaaaacagaacaagtacgcccaagatttctttaagcatgttaacgacgtaaaacgtagcatttaccagtcggaaatgaagagaaacaatagcttggagtcctcaaggagtggtccaagagctggcggcagcacaaaaagcaatgtcaaagcaagtcccaagcgggccgcctcacaggaaactagattagtaactactcttccgctaagcaggagtcggctttctgccggcgtaaagccgacacctgcaccaaggaccagtctccagacaccgactcctttgccggagactaccgtcgcaaaagatcccacgcctagtaagcgaaaaagtcaaccaactgtccggagagagtatccttccttggacaggctcgttgcgtctaccacgggcaccattccgaagaagaacagcaggaacataacagcggccagcttacaaagcccgaagctgacgcaaaaaactagatcagaggctcccgaaaagaaggttgcacctgaagatcagttgccgctgcctccgtccggcaaacgacaccatcgcacaggcgcatcgaagacaaatacaaacgctccctgttccagcctacgcaggaaagacattccggctccacctccgccttcccccgctacatattccgacctccaggagctaaaggccaatatggagggttttcgagacgatactaagtcacgaagcttggatctcagcggaccaccgaatccaatgacggaagccccaattggagccactgatgcaggtgcagtggagactgacgacaacgacgtcttctatgatgcacgcagcgaggattctggcggtggtatcttgccctcgaataccagtgatatatcgaaaatgagtccatcccacatggcgacattcacacgggcggcaactaacgaaaatcgcaaaggcgcctttgacaacgaaaaggagcactctgccgaggatgatgattctccgtctcccgccgcccctgcgccagaggggcgtgagcaggcgtcctccatcacgggcagaccgaaagggaatggcaacagtaaaataaccacaaccccaagctgtgagctcgggagctcggccgaagcggaaagcaagctggactccgccgcactctgtcgaccccgaccacgacctcgccaagcgtctccccacctcccgcccgaatgcacggacactgggggggctggtgacgaacaggcaagcaaaacaaaacacgaaaagaagactccagcagacgcccccaggcaacatgttggaccaacatgttcggaggggcagcgaaccgccgcgctagcaacaaatgttgcttgcgcactctcaacaaccaccaacgctggcaacacgagcgccagcaacagcgtattggagctggagctcagttgcaagacgggcaacacggacagcgaaacgccagcggtagcgcacaggtacgcgactctgccattgcgcccaatctatgatgtgaaacttaaagtgttagtcacctga

SEQ ID NO: 32982 - protein, 1295 aa, DROSOPHILA
MPQGFRFLATDNEQTKDRSATSVRDRIYDDPAYTEDISHLANPMRRSSISGKSFLEHKTRSDTGGQASSSSLLAKNQLPQELHQYVSGKQAKIKQHHTATIASGSTAISINYECDSSSTDNEVQEPIQTKGGMNRRVRSLERNLAATGSERAEKKGTQKRTSKQKRNLSLDNNRHQPAGHPKREAVAVAKVGHDADTRARKERNRKPYGEMGPDGGVPTEVSELDDGYSARGSAQSSACTLPAESAADAAKVAIGKRFLRGEIGIKSFNYYLLKEGLKSSKKLVDQQRTPAGSGSVESPLKAEKRHCRSEENIYEEIFFKDTANAVSSSATGVATGMAMPVALTMCDQETHSLEKGAQPHGIGATNPAFADCEFCMEQCSKENCEYCLAHVEQVASKKLKAGQTQEEQYLNQGHRKNHTMDSRPSAPVVEVPTAHILEFQSYNPNNPGVYKIETTPVAITGDYNPILQFQQSSATTSTSATTTPSEPQIYGGYYLPHANQRPYHSPTVNSQLPNHYAVGGSLLLAQVTGATQGSATPPRRPQQHFIVGYQNGGGMSAGAASLQRFNTKSSSSSDSLPYHKYNTMARLEANVLAAPATGDLYYAVSGTQPLHPLMYAANRPIGGSQILVDPYDPQMYKSDSKASILSEFSLRSSDNSQRYARHPHRRHGGRVSDSSLFSVYSNSGQRRYFGSSEGRFGYDCRRCSLDGVIGMSTATGGSMMAPDKCSYSDNCRFECRNCDCSSNYFSSDFDDVYGSIARGGSSGIPRKTAAGTLPSSAQDDQVERLEAPPASMEQQQYADLKQNKYAQDFFKHVNDVKRSIYQSEMKRNNSLESSRSGPRAGGSTKSNVKASPKRAASQETRLVTTLPLSRSRLSAGVKPTPAPRTSLQTPTPLPETTVAKDPTPSKRKSQPTVRREYPSLDRLVASTTGTIPKKNSRNITAASLQSPKLTQKTRSEAPEKKVAPEDQLPLPPSGKRHHRTGASKTNTNAPCSSLRRKDIPAPPPPSPATYSDLQELKANMEGFRDDTKSRSLDLSGPPNPMTEAPIGATDAGAVETDDNDVFYDARSEDSGGGILPSNTSDISKMSPSHMATFTRAATNENRKGAFDNEKEHSAEDDDSPSPAAPAPEGREQASSITGRPKGNGNSKITTTPSCELGSSAEAESKLDSAALCRPRPRPRQASPHLPPECTDTGGAGDEQASKTKHEKKTPADAPRQHVGPTCSEGQRTAALATNVACALSTTTNAGNTSASNSVLELELSCKTGNTDSETPAVAHRYATLPLRPIYDVKLKVLVT

SEQ ID NO: 32983 - DNA, 6912 bp, DROSOPHILA
tcttttttcctccacagtttgtacaccgaatggcagtttcatatttagtttttaactacaattttataagttagaccttccaagcagaagtagaatgcgattacaagaaatacttcatggtaatgtaagcactcatgacgtgggactactattgatatctagccaaatatttaatagactgaccaacgagatactcttgtgattcgacgtggtcgacgacattcaaaaagtatcaacgcttcccaaagtgaactaggcttaataacacctacacacaagcaagataatttggcagataggcaagaatccgaagactttaacgtttggtgttggctgttgaccattttggtatgacaagttttgaagtgattgtatttgtatgccaaattaaaagcgtggggctgaacagattctttggttttgcgttactagccccatcagtatagagccgcttacaaacgaagcatcaaagatatgtaaattgagagatacactttcaaaggctagttgtactaaccactgacacttttaaccataaatttaacggactatttacgctaatttaaagtcatgacacccaccatacaccttgcaatcgcagcgttaattatgaaatgagcttgtatttatgtgtgtgtgtcattttctccgcgactgtttttccaacaggtttagcaacagtttctcccacctattgttcagtctcagggtcaagtttaaaaaacattgacagcttttcgaaatatctgccccaacgagaacaccgaagacgcccaagttttaccaaaatttgagttgcgattgagttagtgcttttgcctccgtccctgggctcaacttgcgaccaacactcgaaagcgcgtcgttgtcagccaccagcagtggcagtggcagcaacaaggcaaagcacttacagctggtgaaactgcacaagactgctgtggcagcgtttactgctgcattggtgcagatgtcaacgagttcacgcgagtgctgaaccatgttcccggacattgaaccgatgttcgagcgccggctctcggcctggctcgattgtcctagccattaggccggcaagccgctggaagagcattagcgctcgaacggataagggtcctaagtcaattcactgtgaaccctttagcagtcgacactagagaactgtaatgggggggcgactaatgatttcagatgttctacttcatttcccgcacttatattacagtgacccgacatccgatgtgcctgcctgtgggacagcggagaatccaacgcacctaagagcactgacacgccaggactacgcctgcatcgactcgagcgaggctcaatcggacgacagtcacctgacacgcgactctatcacccgggagtcccaaaatgacgagctctcctcgtcgactcttgagaaactagacgttagcacactgccactgcccgcactccccaaacgtcgcagaacccgctcccgcaccagcccctccaagcacaggcaacaacagcaacagcagcagcaacagcagcagcagcgtcatgaagttatcgaagatgccaatgcggttgatgcatcgaccgcagcagcaggacaacagcaccccaagccacgtcagggagcagcctctccagagtcccaaaagccagaaataagcggtgcaaagaacaacgcagccggcgagcagcaaaagcagccacagtcgcaacagcagcagacacacctctccgccttccagcagtacgtcgccaagcgaagggagagtctggaggcgtccaatcgttgtttcaacgagaagctagaggcgcgcagaatgcattaccacatgggtgggagcgcagcaaatggtaacgcaaccgcctcccatctgacggctggctccaatggagtgcccacttatcttttcggtgaaaatttctatggagtgcccgcaactggacgtaagtccatatctcccaccaccaagaaggaggaaatattcctgaacaagtccggatgggtgcaggtcaacacgacgcgtggggtcaacaaggatgacaatggcgggggctaccgaagcctcagctacgcccaacaaaatggtggcggacgtgttgcggcgatgctgacggatcctgggagacgctcagacctggcacgaaagtcattcatcctgcagcatcagcaacagcatcaatccaatatcagcatgactgagccgaagtttgttggctccaaagtggaagagctgattcaaaggaacgaagcacggctaagcggctgttccatacggtacccttccctgcgtccgggccatcggattatcgatccgcagctggctaacatccttaacgaacggccaggcttcttgccagtgaagggcccgactgatctcgactcccccctcactcccattctctccccacctcccgctttccaggacaacagccgaagtgctcggcgtcaggagaggcgcaaccccggacgccagcagggtcctctgcccctgcccgtgccgtttcggtcggagccccagatggaccctcaaaaccccattaatggctccgccaaaggcatggttttttcccgtagtttcgagtacgacacacgtcgtcacacgcccaccgacaactacgtagagacgttttcccgcagctttgatggaaacttgtcggatcgcctgctcaacctggccgttctggccggccagcgggaacggtcgcccaacttcagcaccctgaccggtaactctccgaactaccttacgaaacgggagagcggcggtggaagcagtggctctcttcgcagccgcgacagctcgcccaagtatctgcatccgcaggccacaactgcttacttaaatgccgctgtcaaagaggcgcctcctgtctacagtgtccccactggcagtcaggccaagtattcgccgcgttcccgtttcgaaaggactactgagcgttccaaaacccacgccctgggacgttcccgtaagtcccagttcagccgcgtgggcagtgccggacctctgatagcgcatccaaacactgcaaatgtgggagtgtctcgtttccgaagctttgacacgtccaagagccagcgtcttaattcgtgcgacagtggtgcgagatcaggtcagtagacagaatcatttgattaccaataactttcgccttgtcaaagttgctcgataataaaacatgggaaataagcacctgcgaagtgtcacgtgcaccttgtccgtccgacttttatacattttattgtttagtccgttcaggagcaccttgtgctcgtaagagcttcagaaaaaagcctgtcaaatcagcgacagaggtgtcgttatttctcataatatttgttattagtcgttggccagttcactgggtccaaatgtgttcagcctaattgaggttttttttttgacagatctctccaacgatgagctggacaatgaagatggcgggttgaacgactttctatccgccggcagccacaagtttcctaaaattggaacgagtagcgtcagcgtatcgccattcaaaatgcaacgccagagatccctgacaccagatcggaatgactcccatagctcgactagcagcttacggaagcaaagatcaaacacccctgagtccagatccttgactcctgaggaacggcgcaagaaggggtcccagctttcattgggcggtgcccggcaaagctccagctcgaggagcaacacgtttgagggccgccagcggcacgatgacaaaaccccacccaacatatcacgcagctcctccagctccagctacagtggcggcgagtcccacgagccccttaatggcaccggcagcacgactgttacaccctcggccggaagtggctccaccagccatcgacgcgcattgaccgcgaaacaagcggagcaggagcaccgcattcgacgctcgaggttggttaaatgacttattgttaatgcgttaaagccacaaatattccattgcaccaatactttgctttcaacctcacgactcctttccagatcgttgcaactaaccgaacgctctccgaaccgagcgcacaaatccattgttaacgtgggtgccctggtcccgcagcagcggtcggtaggtgttccctatcagcagtcccgtgtaccaggtgggggcgttttcccccccactatccgaacctcgccagcgggggcaaagatccatgtcaattcgcctgctccacccaacagctcggtgagagtgcgacacaacgagacggacaaggcgcgctccttcgactttgactacaacaactttagtcgtggtggaggagcaaagggttcaagtcgcaccgcacacactagtggcagcggaggagatagcggaagcaatcagaatctgcgcgtggagagggagtcccgctccttcgacgacgaaatttgtgaagcggtgctcaacaacaacaacggcagcaacggaagtgtaagtggcctgcgcttcctacagcctgcaaccgattccgggcaggtgtcgatggcatccacgtcgtcttcccgcctgcgcaagtccaactcgcctgtcagcgcgtctggaatggaggcgtcgcggtcgccacagtcatcgggatcctcaaccaacaatctccatcagcaggcgaggcaatcgggcagtccacagagctacgggacgcgactttgcgaccacgagctgacttacgaaatgctacgaaagtcgccgatcatgaacttccggcgtggggacagcggcgactacgaactgccagtgatgctacggaatcgggaaaccatcaattcggggggcaacagtgagctcaactttatgagcaacgagacgcgaatctacgagcatcctacaaccgttctaaagtcacagcgatccctccgccaaagtccggggtctcgggacgacctaaatcttgaggttgcagtgggagtgggaggcgactacatctacaggcagccggccaaccagccgcgtagcagcaggtactagaacgaaaacctctacagctgaagattcggcatccccagtgacggcgtgctatctgtatattaacctaatctaactaaccgcacacaatccgaagtccaccacttgaaccaaatttaagaacgcccaaggcactaacacgaccagagaagcacctgtaggtgtttgtgtttaagagactgcttattcatactaaataatctaggaggtaaccaaattgatgaactgtgtggtggtggcagacttactcctttcataaacccgccacgggtggctacatccgtactaaaatacacgtactaacttaccaactatacgcaaactagatacccaaaggaagcgttcccacctctaatttcctatatcagattaaggatgtcttgtgtgcgtggcttatgtatctcgtgctgtttcatagtgttaaagcggagttcctcacaacggcaacgacgaaaagttgcaccaaaactttggacacatgcgattattggccacgctgcgccgcctgtcagcataaaagtgtctcgggagaactcaaaaaaggaccgtctgcctccggaaaaccattaaccgttctggataacgtgcagccccatgtcacctcagtgatcgttaatgaagacaacgcagtcccgggcccacagctccgaagcctggaaaaatccaatccgtcatggaccttcctttgtagcggaattgccagcatttgccaacctgtgcagcagacggaaaccgaccatagcactgcccaggaggcggcggaggaggatattgtcatcaggtgagttttaccttgcaacttttgaagtgacagattagagccagacacgtcttcccctgctaatggcttcattttgacgagctattgccgactaacaagctctggcagccggtccaacaataatatgagtggctacgccggaataaaactggatacggtcaataatggataagagtcatcaaaatttgtttccccttttaggaaggtaaaacccaacaaaagccgcaggacgggacgtagtcgttctctgccaagtgtaatgctgcgaagactttatcttgctgggtaagatttcatttatatactcttgattagttcaattagtgtctagaacgattgctcgtcagctcggtagcaagagaatgtcccttaaatgattcaatgttcaataatcctttgtacgcaagccagctattatgttgtcttccacccgcctggtcgacaggacaaaaaaggagacgcttccactttcttgtccaacaaatgaacaaccggttgtggcacagcctcccatatcaaaatactgagttcagcgacctactactcgactacactaaagacacacatttgacatcgtcctacctttccccctctcgccatttggccatcgtcctttttacgtagtccattaataagcaatgacggtgtcggtaggggagcgttcgtgtcgccgaggggcaaaatgagcgaagtgcagctgacgagtattgacatagatggtagaggccatacggaagttgtgcaaaataaacagcctcctgaagtcctgactgttgcaataaaaatccctaaaatccccttgtcaatttgtaaaagtaccaagtggaattgtcaaattggttgcatacttgtaggcgcaagcatgcgcagaaagttgaccccttcattgcgtaataagaagtcaagtttatggcaagggaatacttaaagaaacaatattaggaaatctaaacaattattagctagttagaacgatttaagttcgtcgttaaacaacatttatatgcacgctttgatttccaatattcgattggcttatattatgaactaggcagacttatttcgattaaagcttcatttgtcatttgttcaccaaaaaagacagttgaaattgtatattaactgaactgatggcagagacttattgctgtcatgcatctaattttaaaaga

SEQ ID NO: 32984 - DNA, 3795 bp, DROSOPHILA
atgttcccggacattgaaccgattgacccgacatccgatgtgcctgcctgtgggacagcggagaatccaacgcacctaagagcactgacacgccaggactacgcctgcatcgactcgagcgaggctcaatcggacgacagtcacctgacacgcgactctatcacccgggagtcccaaaatgacgagctctcctcgtcgactcttgagaaactagacgttagcacactgccactgcccgcactccccaaacgtcgcagaacccgctcccgcaccagcccctccaagcacaggcaacaacagcaacagcagcagcaacagcagcagcagcgtcatgaagttatcgaagatgccaatgcggttgatgcatcgaccgcagcagcaggacaacagcaccccaagccacgtcagggagcagcctctccagagtcccaaaagccagaaataagcggtgcaaagaacaacgcagccggcgagcagcaaaagcagccacagtcgcaacagcagcagacacacctctccgccttccagcagtacgtcgccaagcgaagggagagtctggaggcgtccaatcgttgtttcaacgagaagctagaggcgcgcagaatgcattaccacatgggtgggagcgcagcaaatggtaacgcaaccgcctcccatctgacggctggctccaatggagtgcccacttatcttttcggtgaaaatttctatggagtgcccgcaactggacgtaagtccatatctcccaccaccaagaaggaggaaatattcctgaacaagtccggatgggtgcaggtcaacacgacgcgtggggtcaacaaggatgacaatggcgggggctaccgaagcctcagctacgcccaacaaaatggtggcggacgtgttgcggcgatgctgacggatcctgggagacgctcagacctggcacgaaagtcattcatcctgcagcatcagcaacagcatcaatccaatatcagcatgactgagccgaagtttgttggctccaaagtggaagagctgattcaaaggaacgaagcacggctaagcggctgttccatacggtacccttccctgcgtccgggccatcggattatcgatccgcagctggctaacatccttaacgaacggccaggcttcttgccagtgaagggcccgactgatctcgactcccccctcactcccattctctccccacctcccgctttccaggacaacagccgaagtgctcggcgtcaggagaggcgcaaccccggacgccagcagggtcctctgcccctgcccgtgccgtttcggtcggagccccagatggaccctcaaaaccccattaatggctccgccaaaggcatggttttttcccgtagtttcgagtacgacacacgtcgtcacacgcccaccgacaactacgtagagacgttttcccgcagctttgatggaaacttgtcggatcgcctgctcaacctggccgttctggccggccagcgggaacggtcgcccaacttcagcaccctgaccggtaactctccgaactaccttacgaaacgggagagcggcggtggaagcagtggctctcttcgcagccgcgacagctcgcccaagtatctgcatccgcaggccacaactgcttacttaaatgccgctgtcaaagaggcgcctcctgtctacagtgtccccactggcagtcaggccaagtattcgccgcgttcccgtttcgaaaggactactgagcgttccaaaacccacgccctgggacgttcccgtaagtcccagttcagccgcgtgggcagtgccggacctctgatagcgcatccaaacactgcaaatgtgggagtgtctcgtttccgaagctttgacacgtccaagagccagcgtcttaattcgtgcgacagtggtgcgagatcagatctctccaacgatgagctggacaatgaagatggcgggttgaacgactttctatccgccggcagccacaagtttcctaaaattggaacgagtagcgtcagcgtatcgccattcaaaatgcaacgccagagatccctgacaccagatcggaatgactcccatagctcgactagcagcttacggaagcaaagatcaaacacccctgagtccagatccttgactcctgaggaacggcgcaagaaggggtcccagctttcattgggcggtgcccggcaaagctccagctcgaggagcaacacgtttgagggccgccagcggcacgatgacaaaaccccacccaacatatcacgcagctcctccagctccagctacagtggcggcgagtcccacgagccccttaatggcaccggcagcacgactgttacaccctcggccggaagtggctccaccagccatcgacgcgcattgaccgcgaaacaagcggagcaggagcaccgcattcgacgctcgagatcgttgcaactaaccgaacgctctccgaaccgagcgcacaaatccattgttaacgtgggtgccctggtcccgcagcagcggtcggtaggtgttccctatcagcagtcccgtgtaccaggtgggggcgttttcccccccactatccgaacctcgccagcgggggcaaagatccatgtcaattcgcctgctccacccaacagctcggtgagagtgcgacacaacgagacggacaaggcgcgctccttcgactttgactacaacaactttagtcgtggtggaggagcaaagggttcaagtcgcaccgcacacactagtggcagcggaggagatagcggaagcaatcagaatctgcgcgtggagagggagtcccgctccttcgacgacgaaatttgtgaagcggtgctcaacaacaacaacggcagcaacggaagtgtaagtggcctgcgcttcctacagcctgcaaccgattccgggcaggtgtcgatggcatccacgtcgtcttcccgcctgcgcaagtccaactcgcctgtcagcgcgtctggaatggaggcgtcgcggtcgccacagtcatcgggatcctcaaccaacaatctccatcagcaggcgaggcaatcgggcagtccacagagctacgggacgcgactttgcgaccacgagctgacttacgaaatgctacgaaagtcgccgatcatgaacttccggcgtggggacagcggcgactacgaactgccagtgatgctacggaatcgggaaaccatcaattcggggggcaacagtgagctcaactttatgagcaacgagacgcgaatctacgagcatcctacaaccgttctaaagtcacagcgatccctccgccaaagtccggggtctcgggacgacctaaatcttgaggttgcagtgggagtgggaggcgactacatctacaggcagccggccaaccagccgcgtagcagcagtgttaaagcggagttcctcacaacggcaacgacgaaaagttgcaccaaaactttggacacatgcgattattggccacgctgcgccgcctgtcagcataaaagtgtctcgggagaactcaaaaaaggaccgtctgcctccggaaaaccattaaccgttctggataacgtgcagccccatgtcacctcagtgatcgttaatgaagacaacgcagtcccgggcccacagctccgaagcctggaaaaatccaatccgtcatggaccttcctttgtagcggaattgccagcatttgccaacctgtgcagcagacggaaaccgaccatagcactgcccaggaggcggcggaggaggatattgtcatcagccggtccaacaataatatgagtggctacgccggaataaaactggatacggtcaataatggataa

SEQ ID NO: 32985 - protein, 1264 aa, DROSOPHILA
MFPDIEPIDPTSDVPACGTAENPTHLRALTRQDYACIDSSEAQSDDSHLTRDSITRESQNDELSSSTLEKLDVSTLPLPALPKRRRTRSRTSPSKHRQQQQQQQQQQQQRHEVIEDANAVDASTAAAGQQHPKPRQGAASPESQKPEISGAKNNAAGEQQKQPQSQQQQTHLSAFQQYVAKRRESLEASNRCFNEKLEARRMHYHMGGSAANGNATASHLTAGSNGVPTYLFGENFYGVPATGRKSISPTTKKEEIFLNKSGWVQVNTTRGVNKDDNGGGYRSLSYAQQNGGGRVAAMLTDPGRRSDLARKSFILQHQQQHQSNISMTEPKFVGSKVEELIQRNEARLSGCSIRYPSLRPGHRIIDPQLANILNERPGFLPVKGPTDLDSPLTPILSPPPAFQDNSRSARRQERRNPGRQQGPLPLPVPFRSEPQMDPQNPINGSAKGMVFSRSFEYDTRRHTPTDNYVETFSRSFDGNLSDRLLNLAVLAGQRERSPNFSTLTGNSPNYLTKRESGGGSSGSLRSRDSSPKYLHPQATTAYLNAAVKEAPPVYSVPTGSQAKYSPRSRFERTTERSKTHALGRSRKSQFSRVGSAGPLIAHPNTANVGVSRFRSFDTSKSQRLNSCDSGARSDLSNDELDNEDGGLNDFLSAGSHKFPKIGTSSVSVSPFKMQRQRSLTPDRNDSHSSTSSLRKQRSNTPESRSLTPEERRKKGSQLSLGGARQSSSSRSNTFEGRQRHDDKTPPNISRSSSSSSYSGGESHEPLNGTGSTTVTPSAGSGSTSHRRALTAKQAEQEHRIRRSRSLQLTERSPNRAHKSIVNVGALVPQQRSVGVPYQQSRVPGGGVFPPTIRTSPAGAKIHVNSPAPPNSSVRVRHNETDKARSFDFDYNNFSRGGGAKGSSRTAHTSGSGGDSGSNQNLRVERESRSFDDEICEAVLNNNNGSNGSVSGLRFLQPATDSGQVSMASTSSSRLRKSNSPVSASGMEASRSPQSSGSSTNNLHQQARQSGSPQSYGTRLCDHELTYEMLRKSPIMNFRRGDSGDYELPVMLRNRETINSGGNSELNFMSNETRIYEHPTTVLKSQRSLRQSPGSRDDLNLEVAVGVGGDYIYRQPANQPRSSSVKAEFLTTATTKSCTKTLDTCDYWPRCAACQHKSVSGELKKGPSASGKPLTVLDNVQPHVTSVIVNEDNAVPGPQLRSLEKSNPSWTFLCSGIASICQPVQQTETDHSTAQEAAEEDIVISRSNNNMSGYAGIKLDTVNNG

SEQ ID NO: 32986 - DNA, 2285 bp, DROSOPHILA
aatccccttgtcaatttgtaaaagtaccaagtggaattgtcaaattggttgcatacttgtaggcgcaagcatgcgcagaaagttgaccccttcattgcgtaataagaagtcaagtttatggcaagggaatacttaaagaaacaatattaggaaatctaaacaattattagctagttagaacgatttaagttcgtcgttaaacaacatttatatgcacgctttgatttccaatattcgattggcttatattatgaactaggcagacttatttcgattaaagcttcatttgtcatttgttcaccaaaaaagacagttgaaattgtatattaactgaactgatggcagagacttattgctgtcatgcatctaattttaaaagaaccgcgcattgcccactaccagatggaggatcctggtggggatcttggctaacacctggacttggctacatttggtattttttatagcacggtggtatttctaaaacgcgcacgcggccacactaacagcaaatattgaaaaaaacaatagttgagcggacgcgaaaaatgcacttataggtaacggcggtgcgcgcgtctttccgccccctgaacggaactcagctgttgggagcttgtatcgaatccgcaaccagccactgaccacatccccagcaggataacatcgccagtccgcgcccaactcggtctctacacccagtgcccaaatacaccaactgacaaccgtagaatcgtgtgagaaacagacgcccttgccggtcgccgaacagaacgccaagcgtaggctggtggcgcgtgtgtgtatctgtgtatacgtactgctggcattctcgggaacgcttgggcagaagccaaaatgtgtgccagcgcatagggaacgaaagaacgcaaatagcgcatctacattaagaaacaggcaaaatcaataacaccaaaccaaaccgaaccgaaccaaagcaagcaaagattattacgcaaaacgacgggcgcatatgaaaatgtctataacgggcgcagatagtgggcgtgcttcggccaccgagctcgaggagtccgccgtcgcgacgatgcagctcagggaacccaccacacccccgccacccatcagcggcgaggacgttttcgccagccgcgtctcccataccacgtggtacttgccagtggaggactcgtcctcgccgcccgcatcaagcaccaacgaagctcgtggcgcgtcgcctgacgctgagccccgggaaggggatgcagctggcgactcgtcaatgagcaccagtgacgagtaagttggttccggtttccccaagacgggcaccattggaatggcatcctttaatacgccaataattatcccttctatttcctttaaattgtggccattacgcggcccactgaccaattactcttcgaacccctgattcttggccgggtgtctgatgaattttcacttgacttccttcctgcacgcttctatcgacctgttgaggtagatggacacgcgatataggtttcgtttctataaaggatttcccttctgtgcatccctgcctcaactgcccaacgactgactgttttgggtacaagagtttttctggttttcccataaagttattcccctctgatgtcacaacgtttagctgttccctttggtttgtatgatttgtttaatcaagaacttttagagcggaaatactgcgtggctcatgtttgctcatatagactttagttatactatgggtcagaggagccaaccagtcgagcctggcatgcgagatatggatatgcgattcgtcacgagccacaaaaaaaaacatttcacaaggggctttttgcggcagattccgcagactgctcggcgttccaaccatatttcggagtaccgctgtttcaaaatggttcaaggctatcaacaagtttttaatccctcttcgggtttacccaattcgatcattagaaatatttgccaccattgactactgaaaaatttcaaaatgtatgccaaattcataccatgaagtcttaaaaacttggcgagattaaaatacttgcacacgaaaatagcagcgaccattacgcatacttccaaatggaataaatatatttatttctgtatactctccaacacattttgactacgataacattttgtaagtgaccaaacacagaaagattgagtatctagagtggtggtacgctaatttcacttacaactagcggattcgtattcgcagaaatcaatcgaatctcagtactccgcaaataacagcgattcatctgattgaatct

SEQ ID NO: 32987 - DNA, 285 bp, DROSOPHILA
atgtctataacgggcgcagatagtgggcgtgcttcggccaccgagctcgaggagtccgccgtcgcgacgatgcagctcagggaacccaccacacccccgccacccatcagcggcgaggacgttttcgccagccgcgtctcccataccacgtggtacttgccagtggaggactcgtcctcgccgcccgcatcaagcaccaacgaagctcgtggcgcgtcgcctgacgctgagccccgggaaggggatgcagctggcgactcgtcaatgagcaccagtgacgagtaa

SEQ ID NO: 32988 - protein, 94 aa, DROSOPHILA
MSITGADSGRASATELEESAVATMQLREPTTPPPPISGEDVFASRVSHTTWYLPVEDSSSPPASSTNEARGASPDAEPREGDAAGDSSMSTSDE

SEQ ID NO: 32989 - DNA, 2869 bp, DROSOPHILA
caataatagacaaaataataggactggcggcatcggcgggcctaaaatcaagaaagataagtgcgaacaccatatgaattacgaaatcgctcccctattttattccacaatacttacacatcgctttcgctgcttgaactggccacctccaggacaggcagcatcttattctgaatagttttggtgatttcttcaacaaggctgctcggatccgtcggaagcaggggtttgccgacacggaaatcggctccattccggctggccttctgcatgatttctgtgaacttgctgctcagcccgcaattttgtgatagctttaactttgcgttttccggggcgtccgattcgtttgtggattcgcttgttcggtgggggcgcttttttgccttcttctgcttcttgtggacatgcctgtccttctcggtcttgccagtcgaggattttttatgttttttgtgctttttagcctttttgtgcttggcccgacgctcttcggtctcgctgttgttgctggagtcgtagctattcggtacaagaggggagcagcccaggtcaatacacacacgtgcggtcggcttagtaaaattaacctaccttttgtcgtcagccattatttgattgtttaacaatgtaaactgcagatgcgcgcacactgtgcgttcataaggtgtgcggtaattctgcagatggctaatgaaacttgtaattttcctcttattgtattcttcctcttcgtagcttttttagtgtgactgcacgccggacaaaagtaaatacgttttaaaaatacctcctgggatttcggaattatttctagtatatatgcaagtaaaataaaaatatattaaaattaaattttataacccttaaatatcgtctttggcgcaagtctaaattggaaataaaaacgaaggaatttcgaaacaacagttgaatttgtatattatagttcatgacattttatttttttgtttttattgtacatgctagcgcttctaacctaattggcaacagctacatccacgtcgtgctcatctttgtcgatgcttagctcaagcaccgtgtcctcttctacggacatggctttagagtcctcagtagagactgagtgatatttgggctcgccgcgggctccgtcgaactttgtgggagtgctattgttgagatcgtcgtcttcatcgcttacctccatgatcccattgtcgtctaggtccggctcagagcgggcatcgcaatcgctggacgaggaggatgccgaggatgagctgtcctggtccagctgctgttccagctcgtgaatcgtgtacatcagcaaagtgaagtcattgcgtcgtttctgaaacttgcgctccatctttagcttcttttgcaccaagtcgtcaatctccctcctaatggtctcaatatgtcgctgtgtttcactgcggtccggttggtcctggatgagcgaggccagcaggtcgtactccatcttgttcttgcgaatctgcttggcagtgattagctcttttttactggattcgatttccgctttagccaaaacaatactttcttcgtggtgttcaactagttgtgtgtagttgtcacgctcaccggcgatcatctgcagagtttgtacattctttaacgcagtgagcttgcactgggcgaattgggccatcagtcggtcgtacatgatgggactgtaattcggaaaagaggagatatgtacaccatgttttgaatacacacatatccaatttcttacttgctgtccagcgagtcactggcccacttcaagaactgtttcagcaacactactattctccgatcctctccagttccatccccgtcaatcagcaggcgctgctttatgatttcttctggaagatcagtttaaatatctattcccaaatgcgaaaataaacaaaaacaacttaccgtcattcatctccactaatttccgaactagcgtatcggagtgtggccgaagctgacactgctccgacataccacgcagtacggtcctactgtacttgtcctatcattttaatttggagaaagtattgaattatgccttaccctttatatcccgcccatagccaagtgtagtgccgtacactttcggacatcagcgaatcccattaactaagtgcacttcttgcagaatgtcggaaacgtcaagcgtcaacgtggatgcggaccgagattgcagaaggattgagggcctccgacagcgctcacaacgccttgctgcccgcctccagcagatgcagagggaaatggagtctaatgcatccagcaaagacctatcggccaacaatgccgttattccgctgcagccactaatgcgctgggcggaaccacggccacatcccaaccaatcccaaccatctgctcggagcaacagcaggcaggccattccttacggtgtgccagtatccacgccagcgccggtagctatgcaattgccctaccacgtagcattcgcctcctaccaggcgaccatgcagattccctgccttcagccactttcgcatttgcacgtcgtgtctagtcccagccatcggttaatagcgaaaaagaagtcgaagcgggctcttcgaaatgaggtggaagctcttcaggatatggtcaaacatctttcacacctctccccagatgttaacgcgtatgcctgccagctgatacgtaaaaacgagatcctttctcagctcgagtggagtcagaccaggtcagaagcacatccgcaacaggttggttaccaggggcggcatcgccacgattctgaggtctctgctacaaacaatggaagtcatgtacagcagcaaccgaaactaggacgaaggcaacgcaatagcaagaaaaacgatggatccggtagcaatgg

SEQ ID NO: 32990 - DNA, 804 bp, DROSOPHILA
cttccagaagaaatcataaagcagcgcctgctgattgacggggatggaactggagaggatcggagaatagtagtgttgctgaaacagttcttgaagtgggccagtgactcgctggacagcaatcccatcatgtacgaccgactgatggcccaattcgcccagtgcaagctcactgcgttaaagaatgtacaaactctgcagatgatcgccggtgagcgtgacaactacacacaactagttgaacaccacgaagaaagtattgttttggctaaagcggaaatcgaatccagtaaaaaagagctaatcactgccaagcagattcgcaagaacaagatggagtacgacctgctggcctcgctcatccaggaccaaccggaccgcagtgaaacacagcgacatattgagaccattaggagggagattgacgacttggtgcaaaagaagctaaagatggagcgcaagtttcagaaacgacgcaatgacttcactttgctgatgtacacgattcacgagctggaacagcagctggaccaggacagctcatcctcggcatcctcctcgtccagcgattgcgatgcccgctctgagccggacctagacgacaatgggatcatggaggtaagcgatgaagacgacgatctcaacaatagcactcccacaaagttcgacggagcccgcggcgagcccaaatatcactcagtctctactgaggactctaaagccatgtccgtagaagaggacacggtgcttgagctaagcatcgacaaagatgagcacgacgtggatgtagctgttgccaattag

SEQ ID NO: 32991 - protein, 224 aa, DROSOPHILA
MYDRLMAQFAQCKLTALKNVQTLQMIAGERDNYTQLVEHHEESIVLAKAEIESSKKELITAKQIRKNKMEYDLLASLIQDQPDRSETQRHIETIRREIDDLVQKKLKMERKFQKRRNDFTLLMYTIHELEQQLDQDSSSSASSSSSDCDARSEPDLDDNGIMEVSDEDDDLNNSTPTKFDGARGEPKYHSVSTEDSKAMSVEEDTVLELSIDKDEHDVDVAVAN

SEQ ID NO: 32992 - DNA, 5893 bp, DROSOPHILA
tttccattcatgcccggccaccagcgagtacaatccaatctgcggcagtgataacgtgaactactacaatgaaaacaagttcaactgcgccttgaactgcggcctaagtgagtatataggctgcgtgcctccccagattcctttctaaaacgatgtatgtacacatggatgccttcttcattatagacatccggaaggtgcacaagggaatttgtcagacttagtctagatcgcttgaattcagttcacttgtgtatgtaagcatgaacgtattgcaaatactctattcatcgtctgatcgatgacatcagcgaatataaatatgtatatatgtacgtacataaataaaaacttagcgctgttactggtatatggacggtgtatgaccccaaaaaactcagaatctcttgcttccaatcagtcacagtcgggttgcttgtctgttcgcctgtagcgctaaagtctccatcatctattacctatttattgaggctttgtaaaattaaagaaaatggtttacatatgcagtaagtcgaggccatacattaatatatacataagatgtatatgtacatattgcatatatacgtaccttgcgttcatcccactagcagctcttgtggtgttgatctttcccgtcttgttgttgggtgcaccatgggaagggtcgcatcctaagtctcaggtggaatacatcagcaacgacaagagagttgattctggcttcgccaaccccaatatcgtgcccatcacccagccgtcggtcgtaacgcaaacagctcctcctccgccgccaaattccaaaaactttgcatatagtccgatgacgcagagctggaccctcattgcgccaggcgatccgctgcccaataatgacaccctcgtctggaaccagagcaatgacaaatggctcactcgctaagcaatgcaaccatcgatggctttgctttaatcattgtgtattactattgaaataaatataactaattcactgtaggacttagcggtggcgacggatgtggctggaggccacagactgaccctgctgccgcagccggcacaactcgtcggtactgtagttcagcttgcgggttgcgttttctgagaaacgctcgaacttggccactaggtccaccagttgcgtcttgatcgcctgcacctcggcgagcactgcgcttaggacattagcctgattcttcatctgtactgttccctccgcctcctggcggaactgctgcggcacatttgtagcggatcgggggcgcaaaagctcgtgcatgtgaaataaattctgtggagtcttctttgtggtccccgtggcaggttctggcttgaggaaatccgtgtggagcggctgctgctgacgctgtagactgcggctgaaaatgttgtagttgttttcgaactggcgccgtcggaggctctggtttctgtcgcgccgttcagccactagcttatagacatttaacttaatatcctcaggcaactgattgtcccgggggtcgttgggccgtatagtgaactgaagtttgtcccgggacgtgcgcaaaagagcactcctcttacacagctgaatgaggttagtgggcgcacttcgcagtaggcgggagaaaaataggctttccaagcgtgacaccagctccgcttggcgcacgagacgatcgagcgtggcgctcacttgcaatccttgtatgtcgcttacggccaatcccaccatgagattggttaaaattaccgtaacaagaagcacgaaggagagaaatatgatgtgagcggtgacagggaatttgacggcatagtccccatagaatatgtcttcaaactccagttccccagacatcatcgtgatggacttcaaaaaggaccatgtgatgttctcaaaggcaggataatcattgaagagcacggcaaagctgaggccaaaagccaccagcaggcatatgtaggcaagcaagaatttcgcaaagttaacggccactaaatatatacagaagtaatagcattttacagaatatctttccaacctatgatccagcatatttaccctttgtgaacatttgaacatatacgccaaatatggggaatcgtcccaccaacatcattagttccagccagacgagcaatatcactatagctgccacgtgatgttgccacaccggcactgccgttaaatcgtcagttcgcacggtctccggtgttacacataggagcacaccggttccaatggtccattgcagccagttctcccaatattttgcgtagccacgaagtccgtgtgccatttgaaagacctctttccccagcagaatgaggtttagtatgatcaccagatatccaatagttgaaacgtaacctggagccacgcacaactcctccttcttgcagcagcggacatacacccaaattacatagaaagtgaaaaggatcacgaaaagcgtatgatacgcaaggctcataaggaagaatttccgaatgcgacgccacttaagaaagaggaaagtttcgcaaagcgggtgcatgagaatgcgcttctgtcccacttctataagggaaagtagtagctcggtttctccccgatccatcgaggaactgggtaccaaaagccggaagtctagctttatctgacagtcaacgtcgccgatttcctggtcgttcgcctttatcgaagagtccagcttttgcattaatttgggtataatctcaggagtgcgccttactataaatgatagtgccgatacacgcccgtccgtcctggcggtaatatccgccccgtgttctgcgaaaaaaatggccatttagcaatgcagacatcgttgaaaagatgatacatgtccttgcctatgaacgtgtacacacaactgctgaattcattcagtgctgcaatgtgcagtggtgtatatccatagttgtctgcctgtaagtaataatcatacattattctaatcgtaagtaaaaaaaacgttatggctttacttttgtaaaactttacaaagaaggctccatgtttgttaagattttagtttagttttagtttaggtttcactctaagaatgacgtaaagagccactggagccctacacaaatgtatgtatgcaacgtattctcactaaagttactgtattgtattatttgatttacaacatttaatgaatgttataacatggtatgctcgaattgaaccgatcttcccgtatgcattcactttagttgatgagctaggagcttacgtttataaaagtttataaaattatattttatgtaggatataagcgtatggtaagtagccagataaagatcaatataagcctttatataaaattcttgtcgttgtctcacaaactgaatgcctcggctgctattgctcctagttctcagtttggttatagttttattaaaataaaattccgaaataacgtttttgacgattaagtaatttaattaatttcgttgacccttcctcattaagaaaagcgaagcggtttatactaatatcttcattatcatttacaatactttttagtagaaaaagcacattatattaaataatggttttttgtgatcagctctcatagtgatctgccgcctaccttgttaacatccgctcccgcctttagcaaggcattgcagcagtccaaactccgcgactgcttaacgatggcggcgtgcaacgcggttctaccatctcggtaaacggcattcacattggctccgtaagatatcagtaaatccacggtgccgattgactgcgaaaggcaggcgaggtgcaagggcgtttgatggctggcgttacggcagtccacctcagcacggtgttccaggagcaagcgagcacattctacatagtcgttttcggcagctgcaatttgtggatttaccaatctattttgcaaagcacttgtaaaccccttgccactactcacccaagtgcagggccgtaacctttccctcgccaaactgcgatcgcacgtcggcgttgtgactgagaagaagctggacgcatttggcgaatcctgcggcgctggcggtgtgcagtggagtttcagtgtacacctgcggtgtgtttgggtcggctccgtacttcagcaggatctcaacgcaatccacggcattcacatcgatggcatagtgcagagcggaacgcttttcgatcccaatgttgatgctcgcttttcgccgcagcaacagcaggatgcattcaacgctttttgagctaatagggagtcgcttgattaaaactacgtgtctagtgctgtgcacatgtgggaagcgcaatcaaatgaatggccttttacctggccgcacagtgcagcgacgtgacctccttcctggcatcccagcgattggggtcagcgccgaagtcgaggagaaccttagctatgggagcgtttgcccgacagcaggcgaaatgcagtggggtccgaccccgactgtccgccacattcggatccgcgttgtagtgttttagtaggaagagagtattctctacgctcccgaataccgagcagcagatcagcgccagattgcagtcagcagagtcggtcattagttctatgtgggggttagtctgggatatgttaggtaccgtgctgtgaggtactcacccaggaaacagccagattgaaccatgtccacgacatgctttccgcctggagactcggtcagggtttccttaacctcgtcgaggtcccagaggatctggttctgctgttggcgcgcaaatatctcgtgcgcctcgtcgctaaaaactccggcgctgttggcctcactggatatgctccgcttgtccaagagcaagtctacatccgccgtcggatcgctttccgagttccacttcaagtcgttttccttccaaaaagaaacaaagaattgcaggcggctgaaagcgcgaggcatgtaggccaagtcgttttacttacaataattgaaaagcgcacgttctccatcttaacgccgccacttctgtctgcgccgatttgtttacactcccgtggaccaaacaacaataaacttttggatgcggccgagtcgggcgactgttcagctggctccggctgctgttcgggtcggcccacccttcttgttggggtcgactacttacacttattcgcggagataggctgcgatcgctaataagtcatgacacgcaaataattatccccaggccaatatgtgcggacactcaaaatctcttgtgcccctaatttgtgtgatattgctgcatgtgtggcgacgttctcttgtgcgatcggtttacttcgatatttgttggaatatctggatgtctggcggattcttcgcaccgctggcaatggcaatctgtgctaatttttcacgttcgcagctgctccccccactttccaccttcgcagttgccactgatccgccactggatatgttaattgtgtgcacgaccgacggcagctaagttgtacgtcgaactgaaccgatcgttccagatctcggcctccagtgcctccaacacttcgcacttgttcatcgtaggtctacttgcggtacggacgagtgagcggctagcaaggtgcgtaggaatataaaacatactgttaaatagcccgccaaccaatctctagacgccagccctggcattttgccatattcaactcgaaatacactacatgtaagttaggggtagtattttgttgaggatgtcccatacttcgacatatatcgctgccttttcataattatagggattttttgcagtgtactaggtccgttgaaaagtacctacaaggtatacagtttatattaggcagcagatgtggcaacgcccattctaaaaatctatgaagccggccaaaactgcaacacctccacttatgaaaagtgttttggttttattcttctcattattttatttttattttattag

SEQ ID NO: 32993 - DNA, 2715 bp, DROSOPHILA
atgcctcgcgctttcagccgcctgcaattctttgtttctttttggaaggaaaacgacttgaagtggaactcggaaagcgatccgacggcggatgtagacttgctcttggacaagcggagcatatccagtgaggccaacagcgccggagtttttagcgacgaggcgcacgagatatttgcgcgccaacagcagaaccagatcctctgggacctcgacgaggttaaggaaaccctgaccgagtctccaggcggaaagcatgtcgtggacatggttcaatctggctgtttcctggaactaatgaccgactctgctgactgcaatctggcgctgatctgctgctcggtattcgggagcgtagagaatactctcttcctactaaaacactacaacgcggatccgaatgtggcggacagtcggggtcggaccccactgcatttcgcctgctgtcgggcaaacgctcccatagctaaggttctcctcgacttcggcgctgaccccaatcgctgggatgccaggaaggaggtcacgtcgctgcactgtgcggccagctcaaaaagcgttgaatgcatcctgctgttgctgcggcgaaaagcgagcatcaacattgggatcgaaaagcgttccgctctgcactatgccatcgatgtgaatgccgtggattgcgttgagatcctgctgaagtacggagccgacccaaacacaccgcaggtgtacactgaaactccactgcacaccgccagcgccgcaggattcgccaaatgcgtccagcttcttctcagtcacaacgccgacgtgcgatcgcagtttggcgagggaaaggttacggccctgcacttggctgccgaaaacgactatgtagaatgtgctcgcttgctcctggaacaccgtgctgaggtggactgccgtaacgccagccatcaaacgcccttgcacctcgcctgcctttcgcagtcaatcggcaccgtggatttactgatatcttacggagccaatgtgaatgccgtttaccgagatggtagaaccgcgttgcacgccgccatcgttaagcagtcgcggagtttggactgctgcaatgccttgctaaaggcgggagcggatgttaacaagctggactcttcgataaaggcgaacgaccaggaaatcggcgacgttgactgtcagataaagctagacttccggcttttggtacccagttcctcgatggatcggggagaaaccgagctactactttcccttatagaagtgggacagaagcgcattctcatgcacccgctttgcgaaactttcctctttcttaagtggcgtcgcattcggaaattcttccttatgagccttgcgtatcatacgcttttcgtgatccttttcactttctatgtaatttgggtgtatgtccgctgctgcaagaaggaggagttgtgcgtggctccaggttacgtttcaactattggatatctggtgatcatactaaacctcattctgctggggaaagaggtctttcaaatggcacacggacttcgtggctacgcaaaatattgggagaactggctgcaatggaccattggaaccggtgtgctcctatgtgtaacaccggagaccgtgcgaactgacgatttaacggcagtgccggtgtggcaacatcacgtggcagctatagtgatattgctcgtctggctggaactaatgatgttggtgggacgattccccatatttggcgtatatgttcaaatgttcacaaaggtggccgttaactttgcgaaattcttgcttgcctacatatgcctgctggtggcttttggcctcagctttgccgtgctcttcaatgattatcctgcctttgagaacatcacatggtcctttttgaagtccatcacgatgatgtctggggaactggagtttgaagacatattctatggggactatgccgtcaaattccctgtcaccgctcacatcatatttctctccttcgtgcttcttgttacggtaattttaaccaatctcatggtgggattggccgtaagcgacatacaaggattgcaagtgagcgccacgctcgatcgtctcgtgcgccaagcggagctggtgtcacgcttggaaagcctatttttctcccgcctactgcgaagtgcgcccactaacctcattcagctgtgtaagaggagtgctcttttgcgcacgtcccgggacaaacttcagttcactatacggcccaacgacccccgggacaatcagttgcctgaggatattaagttaaatgtctataagctagtggctgaacggcgcgacagaaaccagagcctccgacggcgccagttcgaaaacaactacaacattttcagccgcagtctacagcgtcagcagcagccgctccacacggatttcctcaagccagaacctgccacggggaccacaaagaagactccacagaatttatttcacatgcacgagcttttgcgcccccgatccgctacaaatgtgccgcagcagttccgccaggaggcggagggaacagtacagatgaagaatcaggctaatgtcctaagcgcagtgctcgccgaggtgcaggcgatcaagacgcaactggtggacctagtggccaagttcgagcgtttctcagaaaacgcaacccgcaagctgaactacagtaccgacgagttgtgccggctgcggcagcagggtcagtctgtggcctccagccacatccgtcgccaccgctaa

SEQ ID NO: 32994 - protein, 904 aa, DROSOPHILA
MPRAFSRLQFFVSFWKENDLKWNSESDPTADVDLLLDKRSISSEANSAGVFSDEAHEIFARQQQNQILWDLDEVKETLTESPGGKHVVDMVQSGCFLELMTDSADCNLALICCSVFGSVENTLFLLKHYNADPNVADSRGRTPLHFACCRANAPIAKVLLDFGADPNRWDARKEVTSLHCAASSKSVECILLLLRRKASINIGIEKRSALHYAIDVNAVDCVEILLKYGADPNTPQVYTETPLHTASAAGFAKCVQLLLSHNADVRSQFGEGKVTALHLAAENDYVECARLLLEHRAEVDCRNASHQTPLHLACLSQSIGTVDLLISYGANVNAVYRDGRTALHAAIVKQSRSLDCCNALLKAGADVNKLDSSIKANDQEIGDVDCQIKLDFRLLVPSSSMDRGETELLLSLIEVGQKRILMHPLCETFLFLKWRRIRKFFLMSLAYHTLFVILFTFYVIWVYVRCCKKEELCVAPGYVSTIGYLVIILNLILLGKEVFQMAHGLRGYAKYWENWLQWTIGTGVLLCVTPETVRTDDLTAVPVWQHHVAAIVILLVWLELMMLVGRFPIFGVYVQMFTKVAVNFAKFLLAYICLLVAFGLSFAVLFNDYPAFENITWSFLKSITMMSGELEFEDIFYGDYAVKFPVTAHIIFLSFVLLVTVILTNLMVGLAVSDIQGLQVSATLDRLVRQAELVSRLESLFFSRLLRSAPTNLIQLCKRSALLRTSRDKLQFTIRPNDPRDNQLPEDIKLNVYKLVAERRDRNQSLRRRQFENNYNIFSRSLQRQQQPLHTDFLKPEPATGTTKKTPQNLFHMHELLRPRSATNVPQQFRQEAEGTVQMKNQANVLSAVLAEVQAIKTQLVDLVAKFERFSENATRKLNYSTDELCRLRQQGQSVASSHIRRHR

SEQ ID NO: 32995 - DNA, 5380 bp, DROSOPHILA
gacgcgagcactgatactgccaaattgtgttatttttcgcagcgtgatgaaaaccatttgtcgatgattttccacccagacgagccagcttcaggagctcaaatcgtggtagcactaaaaggctacgcttttttttatgagtaagaaaattggatataagtggataccgagagtatgatggctttttagttatcgttgacttatcctcagttttgacagcttgctcatacaacttggccgcatcattaaggaggtatacacgaccccgaggtgaactagtcgaatagacccgctcgtttccattctcaaatgtctctcgttcgtattttttgacacattcgcgcttaaccggacgtgcagtaataggaaatctgcggttctgtttgttaagtggtatatccttgtctaacgtctgatccaacacatctttagtgccgatgtagctttttttcgatttctggttacgctttcgccgccatccaggtgtcatatcgacatcttcagcgttaccagagtttaagcccgtaacaatggaatcttcggtactctcaatttcaacattactacaaacgtccatactctcaatatagtctattttatcggagtcttgtgtgttcgagtcaggagttgtattgcatccggaactggcattcacctcttgtttaattttcgtgttggttacgcactcctggtcaaccaggatgcattcggtcaataaagaatcgctaaaaggaacggcgtgcgctcgtgcatgttcccaatcttgaagtaaatccaacggcgcttcggattcagctggcttcccctcttcagaatcatccacggccacctgagtggattctcttttaccctccgtcagcttctgctcgagaatagatggctttttaacagcgcccaaaatagcggcaactgtctcttttgagccattaccggcagtatgcgcctttcgtaacaacaaaagaagttcttttttggcccgagctttttgaagacataagggagagtagcaagtattttgggttatttgagagacagcatttgaattggtgttacactcctttgtataacaacgaaaaactttagcaaatcgattaagctgactaaattgtaagcgcacggtttgaatttgtttagccagcgaattaacaagttccaagtttacgtttgcaggacccccctttgcttggacttcagtaaggcgaagtaaacgcttctctagaaacgtttgtttgctgttggctgtattattttgggaagaaacaagaagcggcttcatatcagaaggaattttagaagccatctgctcctcgacctcggccaactttaaacggcgatccaataagtcatctaatctagatttgcgagccacttttgaataataagtacggcctggagcatttagcgctttgctgacgtcgatgtgccctttgattttctccgtaacatcttctataactttcacatttttatattggtccggtaaataatgacacacctgaccatcgacattgcttgactcacattgttgcataaaccgttgggtgcgtgggtcgactaaaataatttcatttacgtcgttttcctctcccatggtgtaatgtacgtagactctattgtgtgttagaggttgggctcgacgtgcacgaacaccacagcgtcgactgcttgagagccaaagccagccccattgcccgtggacccggtattcttctcctttttgcttccagacttgatgtttgagacccagggtatactttatgtagttaaatgctaagcgattacgttcttcctcatcatcccgctcgcgcttctctcgcttttctagtttttttcgctcctctcgttcggcactagttatgcgttgcaaagttgtgtgtccgagttgctcatgccagacgttggcaaaaacaacgctcttaagggacgcttgaaaaagtaacaatactaccgcaaattcagaaggtcgacgggcgttcatcaccgcagcattccaaatttttttgttaactacccagttaatatttaaaaaggaagctgctatattggattcgaagtttatcaatgtttgccttagagttgttatcatattgtcagtagttcccatggttataccgatccatttaaagtcagaagccgtcgttaacgagaacttatgggacagatggcgtcgcttatctcgctcctcgtttcgttgcggcttgttgagtgcaattggatttgttgaatactggttgacatagttcttaaatccttgctccatgccaagtttaaaatgcaaagtaccattagtcagctgattggatttttgacgcgtgaccattttacattcttcttgtttttttgttccctctatagattgactctcagatttagcatcaccatctttttcatcctcgtcaagcacctctttctccaaaagttcatttttagcctcttgttcgatttcgataacactacgcttcgtgtgtttgtgttcattggttaaggtctcagtcagtttcatttggcgctcgatttcgtctctcctttctgtaatctggctatgcagacgagtttccagttcttcggcgtccagtcgactgagcagcaattttaacttacttgtcgtactgtaataccagcatgtaaagttctcctgatcctcgataaaaatgcgacgtgcaataaaccaatatttgcgcccatgacgatcaacaccgaggctatcatgccggattagcacgccttgtttttcttgtggcaacacgcagtccactacgccacttaccttatgcgagcggcaaagcccgcactgccaatcctcagtaggtacgtcattcattggcgggtctacacattccaaatgatagacagcagggcacgtctcgcaacataataaatcaccgagccgatggcacactcggcaatggtcatcataatgaataggtccctcctgcagcattacatctcgtatagaattggaagttaaaaattgatctgacagaaactggagcacttcaagccggttgtcaatgcccgtgtaagggtattcagtgtggcttaaaatgtgaaacacgttgcgatcaaatgtcttatcgctttctacatagcttcgcaaaacttccggccacgttatagagtcaatcaggtaaagacttatattaaccgtatctttttgatccagcgggccaaaatgtgtaccctgcgcgtcctcttctcgaagaatcgctttaagcagcattatgtgtacctccgtcaataatgcactttgctcctcacaagccagcgctgcacacaagtcttcaaatcggaatggtgaaaggcggaccatgtggcgaaatcgtcgcagtacttcatagatacttagcgcgcgcaaaacgtgtgtattagcaatgaaaagatcctccgacgagtccggcaaatcaagcgctgcatactgacgaccttcctgcagccacacaggttctgggctaggaggacgtggcggccgaccaactccattttggttaaagctgcacacggaaaactctgattcgctctcgttggctacttctaggctctcgtcgtcgctgggagtaagcagcatatcatcctcattatcggatttatcttcttcggaatccccaaaatctgacccgtagtgatactccgactcgtaccctgaaaagaggaacagtagctcttagaaccaatatgatttcaccaacacctaagtgcataaaacctgacatactgtcactgctattgtggacccaatttctactgaattgtatttaagtaattgttattaaactcatgccaactagactgaaagattttttgtcgtaagatttcaaaaataatcgttggtattagagcagatagacctatcgaaactgactcgcccggtagtggttgtcacgaaaatattaaatttgatcttttatgaagcggaagctctttaacgcacaggaaaactcgtttgaagtatgagtaccattcaaaacgatcaaagttttctccactgcaatcaatatatggcacattatgttccctattaatcttcgaactagtcagagcgaaactgtaagtcttgactcccaagttagagtttaggtgcccctttaacccacctttccttccagagtagctactggtgttcggttgcacggcggatttgcggcctcgtcccctcttagcggcgctcccgcgactgcgattggtgtggttgttgtggctgctcctgctgccctcgtcgctctgtggagaaatgcccctggatgccgacggagtgctgggctgcgactttccctcgctgagatacttcggcttcttgagaagctggtaattgaagcgtcctgatgcgcgttcgttgggcgtctttggcggacgtccacgtttacggctgccgcgaccgctcatcttgtttgttttcgccttgcgtatttatctggctgtgtgcaggggtgcgtgggggtactctcctcagatattgttccaagttaatgctgcgaggctgcacattagatctgaaacgaaaattaacccattagtacacggtgccacaggaacgcacaccgcatctcactcgcactcagctagctatgtatttacggggcacattcaaacacacatttactcaacagcgtatgtgggggaaaaatcgatcagatcgtcaaaagtttgtcgttgggtgttcactttctttgtattgcgcaaatttggagttgaaaaaaacccgccaaaagagcttgtttagttcagaataacggttccgattaaatacattaagtacatgtattcaaaacacattcttggcttctagtgttggacggcaaacgcactggacagcaccaccaagttcgattgtatgtgtgcgagtgcgatgaaatgaagccaacgcacattgtccgccatttaagcaaccgtgaaaatttttgcgtctgtttaaatgtcactcttctttcacaattaacacatggattaactgcgcaaattacccagcatgttgcggaataattgcacaggatttaacacgatatattctaatatttttaactatcttcagcacactgcgaaagagacttttacctaacattacagttttgaacatagctaaagacggtgtacagtcggccaatcacagcgactcttctattgcgtgaagtcagaagcgtcctcttgcggtcggcttggagaactaattctttatggttgcacaaacgatataggcagggttgcttttggcatttacgctgaaccgcactgacagatgtatttttatttttatcgacgtgttgagcgggcgtttaaagaaaacccgttaacttgtaatcaaaataaacttacctttgctcactatcttaaaaattaaaacggtatttttgatgcggtaaaaaaaatgtatttttttgtaaattta

SEQ ID NO: 32996 - DNA, 2928 bp, DROSOPHILA
atgagcggtcgcggcagccgtaaacgtggacgtccgccaaagacgcccaacgaacgcgcatcaggacgcttcaattaccagcttctcaagaagccgaagtatctcagcgagggaaagtcgcagcccagcactccgtcggcatccaggggcatttctccacagagcgacgagggcagcaggagcagccacaacaaccacaccaatcgcagtcgcgggagcgccgctaagaggggacgaggccgcaaatccgccgtgcaaccgaacaccagtagctactctggaaggaaagggtacgagtcggagtatcactacgggtcagattttggggattccgaagaagataaatccgataatgaggatgatatgctgcttactcccagcgacgacgagagcctagaagtagccaacgagagcgaatcagagttttccgtgtgcagctttaaccaaaatggagttggtcggccgccacgtcctcctagcccagaacctgtgtggctgcaggaaggtcgtcagtatgcagcgcttgatttgccggactcgtcggaggatcttttcattgctaatacacacgttttgcgcgcgctaagtatctatgaagtactgcgacgatttcgccacatggtccgcctttcaccattccgatttgaagacttgtgtgcagcgctggcttgtgaggagcaaagtgcattattgacggaggtacacataatgctgcttaaagcgattcttcgagaagaggacgcgcagggtacacattttggcccgctggatcaaaaagatacggttaatataagtctttacctgattgactctataacgtggccggaagttttgcgaagctatgtagaaagcgataagacatttgatcgcaacgtgtttcacattttaagccacactgaatacccttacacgggcattgacaaccggcttgaagtgctccagtttctgtcagatcaatttttaacttccaattctatacgagatgtaatgctgcaggagggacctattcattatgatgaccattgccgagtgtgccatcggctcggtgatttattatgttgcgagacgtgccctgctgtctatcatttggaatgtgtagacccgccaatgaatgacgtacctactgaggattggcagtgcgggctttgccgctcgcataaggtaagtggcgtagtggactgcgtgttgccacaagaaaaacaaggcgtgctaatccggcatgatagcctcggtgttgatcgtcatgggcgcaaatattggtttattgcacgtcgcatttttatcgaggatcaggagaactttacatgctggtattacagtacgacaagtaagttaaaattgctgctcagtcgactggacgccgaagaactggaaactcgtctgcatagccagattacagaaaggagagacgaaatcgagcgccaaatgaaactgactgagaccttaaccaatgaacacaaacacacgaagcgtagtgttatcgaaatcgaacaagaggctaaaaatgaacttttggagaaagaggtgcttgacgaggatgaaaaagatggtgatgctaaatctgagagtcaatctatagagggaacaaaaaaacaagaagaatgtaaaatggtcacgcgtcaaaaatccaatcagctgactaatggtactttgcattttaaacttggcatggagcaaggatttaagaactatgtcaaccagtattcaacaaatccaattgcactcaacaagccgcaacgaaacgaggagcgagataagcgacgccatctgtcccataagttctcgttaacgacggcttctgactttaaatggatcggtataaccatgggaactactgacaatatgataacaactctaaggcaaacattgataaacttcgaatccaatatagcagcttcctttttaaatattaactgggtagttaacaaaaaaatttggaatgctgcggtgatgaacgcccgtcgaccttctgaatttgcggtagtattgttactttttcaagcgtcccttaagagcgttgtttttgccaacgtctggcatgagcaactcggacacacaactttgcaacgcataactagtgccgaacgagaggagcgaaaaaaactagaaaagcgagagaagcgcgagcgggatgatgaggaagaacgtaatcgcttagcatttaactacataaagtataccctgggtctcaaacatcaagtctggaagcaaaaaggagaagaataccgggtccacgggcaatggggctggctttggctctcaagcagtcgacgctgtggtgttcgtgcacgtcgagcccaacctctaacacacaatagagtctacgtacattacaccatgggagaggaaaacgacgtaaatgaaattattttagtcgacccacgcacccaacggtttatgcaacaatgtgagtcaagcaatgtcgatggtcaggtgtgtcattatttaccggaccaatataaaaatgtgaaagttatagaagatgttacggagaaaatcaaagggcacatcgacgtcagcaaagcgctaaatgctccaggccgtacttattattcaaaagtggctcgcaaatctagattagatgacttattggatcgccgtttaaagttggccgaggtcgaggagcagatggcttctaaaattccttctgatatgaagccgcttcttgtttcttcccaaaataatacagccaacagcaaacaaacgtttctagagaagcgtttacttcgccttactgaagtccaagcaaaggggggtcctgcaaacgtaaacttggaacttgttaattcgctggctaaacaaattcaaaccgtgcgcttacaatttagtcagcttaatcgatttgctaaagtttttcgttgttatacaaaggagtgtaacaccaattcaaatgctgtctctcaaataacccaaaatacttgctactct

SEQ ID NO: 32997 - protein, 976 aa, DROSOPHILA
MSGRGSRKRGRPPKTPNERASGRFNYQLLKKPKYLSEGKSQPSTPSASRGISPQSDEGSRSSHNNHTNRSRGSAAKRGRGRKSAVQPNTSSYSGRKGYESEYHYGSDFGDSEEDKSDNEDDMLLTPSDDESLEVANESESEFSVCSFNQNGVGRPPRPPSPEPVWLQEGRQYAALDLPDSSEDLFIANTHVLRALSIYEVLRRFRHMVRLSPFRFEDLCAALACEEQSALLTEVHIMLLKAILREEDAQGTHFGPLDQKDTVNISLYLIDSITWPEVLRSYVESDKTFDRNVFHILSHTEYPYTGIDNRLEVLQFLSDQFLTSNSIRDVMLQEGPIHYDDHCRVCHRLGDLLCCETCPAVYHLECVDPPMNDVPTEDWQCGLCRSHKVSGVVDCVLPQEKQGVLIRHDSLGVDRHGRKYWFIARRIFIEDQENFTCWYYSTTSKLKLLLSRLDAEELETRLHSQITERRDEIERQMKLTETLTNEHKHTKRSVIEIEQEAKNELLEKEVLDEDEKDGDAKSESQSIEGTKKQEECKMVTRQKSNQLTNGTLHFKLGMEQGFKNYVNQYSTNPIALNKPQRNEERDKRRHLSHKFSLTTASDFKWIGITMGTTDNMITTLRQTLINFESNIAASFLNINWVVNKKIWNAAVMNARRPSEFAVVLLLFQASLKSVVFANVWHEQLGHTTLQRITSAEREERKKLEKREKRERDDEEERNRLAFNYIKYTLGLKHQVWKQKGEEYRVHGQWGWLWLSSSRRCGVRARRAQPLTHNRVYVHYTMGEENDVNEIILVDPRTQRFMQQCESSNVDGQVCHYLPDQYKNVKVIEDVTEKIKGHIDVSKALNAPGRTYYSKVARKSRLDDLLDRRLKLAEVEEQMASKIPSDMKPLLVSSQNNTANSKQTFLEKRLLRLTEVQAKGGPANVNLELVNSLAKQIQTVRLQFSQLNRFAKVFRCYTKECNTNSNAVSQITQNTCYS

SEQ ID NO: 32998 - DNA, 4214 bp, DROSOPHILA
ataattcttatgaaaaatataaaaatgggctgattaaaatgattggtattatggaaattattattgaaaaaatatgaaatttacattttaaaaagtgttattcgcgttattactcagtttgtaaatagcgggcatcaattgtgcatagtttgaaggtaagttgcccaataaatggcgcaaagctcgtaaccgcgaattatatatgtatgtacatatacgataaaaataaagtgtggcctttgcttggataaaaaaatcgtccgagtcgccggatatccatattatcgctttcagaaaattcgatatcatcgataggtgtttccctttcaaaagtcttcgtccgatttggtccgtttgactacttttatctggtgcatacccgatttgactgcttggacggagtgggatgtgtgaatgaacactaaaacgcttgaaacttgagaaattagggaagtagacgggtagcgtcagtttgtttgagaagattaacaagcccacaaactgcacaaaacttgcaaggccattttattatttgtctatccattttcgatcgatatggcaacaacatttaagccatgcccactctaatgcgtcaataaatgcgactaatccaggcgggcccccaagttaacttggccctcctcatcgagtcaagcgcttccttcgaagaatgatttaccgttgatcataccgggaagccttttttggtcttcaggggaggtagagactacatgtggtattaagatgaaaaaactaaatgcgtacatcaaatcaaaagtattcttattaatccaagtgaattataatatttattttggcaccttgtaaatgtgacaagtgattagaaatgtggttcttcttaaagatataaatgtacatcataatatgctagagtactgaggcactattatttatatactctcccgtgtgcgacagactaaatgattcataatgaatatgaataccagagttcacagatgagcaataatctcagttcctgttaaagtgatgtcactgtcggcttgtagggagagtctgtgaaggaaaatatcaatgttaaaagaagataaattaaagcaataagatgaacaccaacctgaagattttagatcgcctttctcatcgaacttgtatacgcgagcattaataatactcagatctgtctgacttgattccctgtaaaaaaaaaaaatgggcaattaaaatattatagcttctattcgaatatttcaacttacacattaatggcccaccaggatttgacgtgcaaattcttgccaaggagcagaataaaaccagctatggccaggcccagaatgcaaattccactccagaagtcaatgatgaagaaatgctctctcactctggccattatatacacgactatttctcggatccagaccgcaaacacgcccactatgtaagcgctaaaggcatagaaactgcaggaatataaaagataaataggtctataataaaaacagcttttaggaaatcttactgcgtcttgacgattttcagttgagtgcccaatatgtactgagtatctggtggcagttcgtagatggaaaagtacgccttgagacagcatacaatgctgaatatcaggaggagtgcaatgggtccgtagtagtagatcaaaataccccaggtgcgaactgaaaatgcatagataattcgaaattagactttgttgtactttcttattcaacctaccatcgaaccagcagtaatcttctcccatgcctggcttgaagtgcttgggcagcttggagtcctgggctaaggagaccaaaaaccgaagaccaatcaccgccagaactgccagagcaagggacaatcgacggacggagctcctgacagccttttgtttaaatttgagcagaaagtcaagactgcaaatggccagaaagacgaaggagagcatgatgcagaagtaggccagaaatccttttgggatgcatagaacaaaataagttatccagttgaagtagacaaaattactcaacctatgtttctgcaagccacatgcgagagcttcatgggattcttcaaggccaagtagaccaacagggagtaaccaacgatcatggacagcaagtagtagatgattaactggccatagtggcttttacgggcatctctcacagatccaagtagggagagtatgaaaatgtttataatgatggctataatactgcctagaagggaacaagagttagaatctcttcgaaagtattcaaacaacacgactcacaaatggcgtaaatccaaacccggtaccccgtttgaaagcgttcgcagttgagcggagtgagctcccactgctccggattgtgctccaacgggctaaagcaatactcatccgttgaccacagacgattgtcccgccgcagagttccattctcgaagaggtcccattgccagaagttatcgtgctttttgtccacgaatttgttccggcaacccagctctgtgcgcaccacaaaacgatcgcgtatgcgtacttgatccacagtcctgttagcgtaggtgagctccacgtgagtggactcgcggacttggtgtggcattgtgcagttccagtgcttggcatcaaagacgaggttctccggacaacagaaactgatgcagggcttcagcagacagacgcagccgcgcagatgtttcttggcccggtactccactccatcgatcaccttgaaggagtactccgccatcagatgcggtgggaccactactccagcgtatgagtaggagccatccttcatccgcagtccatccgtaatgttgaccgtgtgggcgtaggcacagggatggtttatactggcgatctccactgactttgcgcccacggagagccaaataattaaaagaattatcaatggcgagaccatggctaactgatccacgcttgttggatttttggtcgattcgttcgtcggcctgacgtcacacgctgttcagctcgataattaagtaaacaaatatgagaagcgatcgccgttcgctttgagcaatgcacgcacactcgccgagtcagaaatctgcaccaacaacaatggaaacccaaaattgacaacgaatgtgacgcgggtctaaaaacggctgcgattgcgacaacgacaccgacaacaccaaaaagaacaaccataaacataaaagtttggtggagagtctctcctagctagtcgtcttgcctctctctaaacgacaaaccggcaaccgcaacggagctccatgctggccaagaataaaaaacagactaactgattagccgttcccaaaaccagacgcgaccacaagcagctggcaaaaagagcgattgggaagactcacaacccgtcccgcccctcctcctagaaaccggcgtggaatctcaaccagctcggaacttgcacatgcataccttaagttgtaagcatataatccattcgagccatttccagacttatcttgagatagatataaaagttaagaatattagattagattatttccatccattttctataatttattgcctttgcgaccgtaaagaaaatccaatttttaaccgacaatccaaatggcccaaacgaatttaccacagctttagtttttaaatatttaggtgcatttccaggctatacaaagtttgtctacatgtaggtgtgtgacctggcttgatatcgtttacggtcttcaagaatattcgaaaagattcgttgatttttgacaaacagatccgctgaggaaaaaacgacgttcattttatctttggctttattaagcttgaaatacaattataattcttgtattgtgttttacattagttcagagataatgcagatatggagaatggtacatttatgcaaagagggtatacaatcaacaccaatctcgtttttaacaaggcacatctgtatgttacgtatttttgctggatgtttaccttggacttaggctaatggagaattacaaatttgatctctcagctgggttcggagaaccttacaattttgcttgcataaacagtagatatggctctgcataaatttcttatacaactaatcaggttgttcgtggtcacatggcattaaaaaatgaaagagaattgggcggggtggggtgggtaagggttttcgtggtagttctgggggatagggactttctcttatagtagtgtctttcataaagttctatccgtatgtggatgctacttcgcgaattta

SEQ ID NO: 32999 - DNA, 1859 bp, DROSOPHILA
tcgtttagagagaggcaagacgactagctaggagagactctccaccaaacttttatgtttatggttgttctttttggtgttgtcggtgtcgttgtcgcaatcgcagccgtttttagacccgcgtcacattcgttgtcaattttgggtttccattgttgttggtgcagatttctgactcggcgagtgtgcgtgcattgctcaaagcgaacggcgatcgcttctcatatttgtttacttaattatcgagctgaacagcgtgtgacgtcaggccgacgaacgaatcgaccaaaaatccaacaagcgtggatcagttagccatggtctcgccattgataattcttttaattatttggctctccgtgggcgcaaagtcagtggagatcgccagtataaaccatccctgtgcctacgcccacacggtcaacattacggatggactgcggatgaaggatggctcctactcatacgctggagtagtggtcccaccgcatctgatggcggagtactccttcaaggtgatcgatggagtggagtaccgggccaagaaacatctgcgcggctgcgtctgtctgctgaagccctgcatcagtttctgttgtccggagaacctcgtctttgatgccaagcactggaactgcacaatgccacaccaagtccgcgagtccactcacgtggagctcacctacgctaacaggactgtggatcaagtacgcatacgcgatcgttttgtggtgcgcacagagctgggttgccggaacaaattcgtggacaaaaagcacgataacttctggcaatgggacctcttcgagaatggaactctgcggcgggacaatcgtctgtggtcaacggatgagtattgctttagcccgttggagcacaatccggagcagtgggagctcactccgctcaactgcgaacgctttcaaacggggtaccgggtttggatttacgccatttgcagtattatagccatcattataaacattttcatactctccctacttggatctgtgagagatgcccgtaaaagccactatggccagttaatcatctactacttgctgtccatgatcgttggttactccctgttggtctacttggccttgaagaatcccatgaagctctcgcatgtggcttgcagaaacataggatttctggcctacttctgcatcatgctctccttcgtctttctggccatttgcagtcttgactttctgctcaaatttaaacaaaaggctgtcaggagctccgtccgtcgattgtcccttgctctggcagttctggcggtgattggtcttcggtttttggtctccttagcccaggactccaagctgcccaagcacttcaagccaggcatgggagaagattactgctggttcgatgttcgcacctggggtattttgatctactactacggacccattgcactcctcctgatattcagcattgtatgctgtctcaaggcgtacttttccatctacgaactgccaccagatactcagtacatattgggcactcaactgaaaatcgtcaagacgcatttctatgcctttagcgcttacatagtgggcgtgtttgcggtctggatccgagaaatagtcgtgtatataatggccagagtgagagagcatttcttcatcattgacttctggagtggaatttgcattctgggcctggccatagctggttttattctgctccttggcaagaatttgcacgtcaaatcctggtgggccattaatgtggaatcaagtcagacagatctgagtattattaatgctcgcgtatacaagttcgatgagaaaggcgatctaaaatcttcagactctccctacaagccgacagtgacatcactttaa

SEQ ID NO: 33000 - protein, 513 aa, DROSOPHILA
MVSPLIILLIIWLSVGAKSVEIASINHPCAYAHTVNITDGLRMKDGSYSYAGVVVPPHLMAEYSFKVIDGVEYRAKKHLRGCVCLLKPCISFCCPENLVFDAKHWNCTMPHQVRESTHVELTYANRTVDQVRIRDRFVVRTELGCRNKFVDKKHDNFWQWDLFENGTLRRDNRLWSTDEYCFSPLEHNPEQWELTPLNCERFQTGYRVWIYAICSIIAIIINIFILSLLGSVRDARKSHYGQLIIYYLLSMIVGYSLLVYLALKNPMKLSHVACRNIGFLAYFCIMLSFVFLAICSLDFLLKFKQKAVRSSVRRLSLALAVLAVIGLRFLVSLAQDSKLPKHFKPGMGEDYCWFDVRTWGILIYYYGPIALLLIFSIVCCLKAYFSIYELPPDTQYILGTQLKIVKTHFYAFSAYIVGVFAVWIREIVVYIMARVREHFFIIDFWSGICILGLAIAGFILLLGKNLHVKSWWAINVESSQTDLSIINARVYKFDEKGDLKSSDSPYKPTVTSL

SEQ ID NO: 33001 - DNA, 5208 bp, DROSOPHILA
cgagccatttccagacttatcttgagatagatataaaagttaagaatattagattagattatttccatccattttctataatttattgcctttgcgaccgtaaagaaaatccaatttttaaccgacaatccaaatggcccaaacgaatttaccacagctttagtttttaaatatttaggtgcatttccaggctatacaaagtttgtctacatgtaggtgtgtgacctggcttgatatcgtttacggtcttcaagaatattcgaaaagattcgttgatttttgacaaacagatccgctgaggaaaaaacgacgttcattttatctttggctttattaagcttgaaatacaattataattcttgtattgtgttttacattagttcagagataatgcagatatggagaatggtacatttatgcaaagagggtatacaatcaacaccaatctcgtttttaacaaggcacatctgtatgttacgtatttttgctggatgtttaccttggacttaggctaatggagaattacaaatttgatctctcagctgggttcggagaaccttacaattttgcttgcataaacagtagatatggctctgcataaatttcttatacaactaatcaggttgttcgtggtcacatggcattaaaaaatgaaagagaattgggcggggtggggtgggtaagggttttcgtggtagttctgggggatagggactttctcttatagtagtgtctttcataaagttctatccgtatgtggatgctacttcgcgaatttatagatatcgactttaaatgttgattacagaataatctcatgataggaatatgtagtcctaaaatatgaataagtgatctttatctacagaaaggaacgcagtgttcgcaataatgcgaggatccgatcgaaatgaatataaatgcgattagtccttcctgatctgcacgcatcccgaggtattcaatgctctgcctatggcggcaactgcgagtgctgtgatcagcggaagatggtggttttctgaggatccacgctcgagctgatcactagcggcttctccaccgatggcttctcgtgcagcgacagattggccacgctgctcgacgtggtcttggtggagtactggctctgacgttggttgctgccatcgcgaacactcgagcatctgtgtttgtgtgaagtggtggagtggttatgacgtccattgcgtgggcagcgtggaatagacaatggcggtaaatctgattagaattggttcgtttgagtgcttggattttaagttagggaaaagcagacacattaagcgatcctacaggatataaacaggttaccttcaccaagacacaaaagtggatggtcattatgattagttttcgaggggttagaggttatcagggttatctaatggtttcttccaactggggttaactacaatgtcaactacttctccatttccagaggattacctgtgaccattttgattagatggctatcttcggggtcggactcgggtcggtggcattgctaccggccttgtcaacagccttaaggtgcagctttcttggcagcacattcgcgtcagaagtgatggaagtcgaggtagtggtcgagctcaggccattcgagcgccttttctccaggagtcttcaatgaatagcgatcgatgatgatcaaattgatgttgagacacatgcacatatggacacacatggtggatgcaaacataagtttgtgtttagatcagggcaattaggaatggtacttctgtttagtagctacaaagacgcgaccggactgagtcaccgagctaggcggctggagattcagtgctgtgttggctgtcagtgttcggtttagagttagtctgcaggcagtgtctgttggtgttgagcttgcttttaagcaatatcgaaagcagtctgacaacgaaaataagtacaacatataaggtttaaaataatcacagattgcgcgctgtcagaactcgaagtgcatatgtattcccataatcttcaatgggtcttccatcttagtgcaagagatttaaggaacgtggaattagacaggaatcatataacccgaaattttcaatattcttgatttaagcgcgggttagcaaaggccacaacaaacgagcaaccgagctaaaggagaccttcttactgaaatcgacgaaatcgatttagacttcgtgtgaatgaataccactggtggacccattggcaaatgcgttgcggatcaccaccagcttgcggatctggttggaggcgtccataaaccgctgcttcatcgagaacgaagtcggtcccatcgttacgctctcagtctgccgcagactgcgcacacgtatcgttctgagaatagtcggggttacagatatgatggtggacagagtcagagacacgacacacaagagggagtcacgagtcgtgtgaatggacaaacgcccagtgggcgggacaggacataacgtggagttaagaatagagcaacacttacctgtttgtgatcaagtgcttgaccttcttcttcattacaaacaacatgaaaatgagaaagccctgcatcgcattggccagatccgagatataaaagagcttagaccatcccttgtcgctgcccacgaagtacgagataagctccgtgagccaggtgatgcccattatgagaaagaggcgtaagaacaagccgaatctatagttggaccaagcacgataaaaacgtctttaggggaaggtggataagaaatactgaaaggatgacactcacttgtccttctcggttcgtaggttcttggtgctgttctcactcgcaattatccgggccatctcgcgctgcacgccgtgaatcttaatcgccgtcattatgaacatgatggtgttggcaacaacgatcgccagaatgggaccgtagaaatagatcatggctgcccagttgctcatatccagccagcagtatacaccatcaccaatacctggctttaggttcgcgggcaaattggtaagttgctgggcgcaataggtgaaggctaggaaaactagggcaataccccaagagtacagcgaataaaacaggaagcgtttcttctcctggaatcggttaattcctctcgtccctcggaaattgtgccacaagtcaaagctaatgacacttagccacatgtaggcacccataaaaaagaaatatgctgtgtatccaaacactttgcatgtaacaccagtggcatcaacttgatagagttgcacgtagcacagcgaggagtaacccacggagagccctattaaatagcagaccaagctctttccgtgctggttgcggagctcgggaatcaataggtaaacggctatggtaagcatcatgaagggaatggagaacatcatggctagtgcaaggaatttcggtcggattaataaaatgctgtttacaagaagtaaaggtgatcgtttcacttaccatacgaattgataatctttaccgtgctatgatcgtcctgcatgtcacaattggccggatgtatggtgtagaacatgtccgattcgttgacgtatgtcggaaccatgcagaactcgttcttcctgattagcagtttatcgtccacacggagcatggatccgttctcaaagagtagataatcatcccaattgttggtctctggctgcagagaaaacatcttggggcagggtctgaagctttggatagcaaactgcgtaaacatgttgaccaatatcgtagactcgttgcggaaggttatattgagcataggcggatctggccacgttcggttgtccgagtggtctattatgcatccgtcaacttcagagttaaagacctgccgccacgggcagcagatattcaggcaggacttgaacttgcagacgcatcccctaacgtgttcccgaacctctatgcgctccgttagcgagctgtgtatgtagtcgtacgtcccgaccaattctgcgggaactattgtgccgtagtaatcatagcttccgttgggaaagagcctatggcccgtcagattcactgtatcgtagaaattacagggcacatttggatcgtctatggtgtggtagtggtctctctcggccataacgtaagtgccgaagggaatccccggaatcaaccggaacacgaccaagcacaggacgcccagcaatgtaactccgcagtatagggatcctccaggctgatgaattttcttcggcataatgaaggttctgaaattcgtaaatctttattaaatattattacaaatatttgttattattctttaacgtttattcttttaacgtttaaatattcagtggaatatagttattacagttagtcatcagtcgcaacacgcagcaattaagccttagcaagtgaagtcactaattaagacctatttgccgattagttagtcgtttaatgtttatctaagtgagttcactaatttgggcaatagagcaacatctagggacccattagcggggacgagtggtgaatgatctatgcggacaacaggttgtcgaaaagaattaaggaggcgaaacaggatagcgtcacaagcaattagcagccaacgtgtcccatggggaggaaccaggggcggactacccacgacctgagcgccattctccgcgggacatcaatcataaggtcaaccacgcagggagtgcagactgagcaaacatttatggattcgtgttaaattgatagtaactgccattgtctgtcaatagaggtgacagtctccccgaactccactccaaaccaatcccgatctgcccacttttcaagcgctgctaacgagcccgtccataaattcattaccagtgcgaaaagttataccgctcgctatcttatcttgtatcattagcctttggggaccaactaattcattgatccgctgattgtttgcctttgggggagaagcagaagggtaacctgcggcattgtcaggagtgtgggccactaaattagtccgaatttatgggatgcgaacgggtggagaaggacaaacacattaaactccgcacagttggctaatggggaaaatgaatactggcagtgggtggggaagggagagccagagcacttatcttgcggtgggaaattagcataattaatcgctgagcacatgcacttgggaaatttcagcggaccaaattcaatcgtatatatctgcgcactttaaatgtgcgaatgagtgctgcggatgtttg

SEQ ID NO: 33002 - DNA, 1914 bp, DROSOPHILA
atgccgaagaaaattcatcagcctggaggatccctatactgcggagttacattgctgggcgtcctgtgcttggtcgtgttccggttgattccggggattcccttcggcacttacgttatggccgagagagaccactaccacaccatagacgatccaaatgtgccctgtaatttctacgatacagtgaatctgacgggccataggctctttcccaacggaagctatgattactacggcacaatagttcccgcagaattggtcgggacgtacgactacatacacagctcgctaacggagcgcatagaggttcgggaacacgttaggggatgcgtctgcaagttcaagtcctgcctgaatatctgctgcccgtggcggcaggtctttaactctgaagttgacggatgcataatagaccactcggacaaccgaacgtggccagatccgcctatgctcaatataaccttccgcaacgagtctacgatattggtcaacatgtttacgcagtttgctatccaaagcttcagaccctgccccaagatgttttctctgcagccagagaccaacaattgggatgattatctactctttgagaacggatccatgctccgtgtggacgataaactgctaatcaggaagaacgagttctgcatggttccgacatacgtcaacgaatcggacatgttctacaccatacatccggccaattgtgacatgcaggacgatcatagcacggtaaagattatcaattcgtatgccgtttacctattgattcccgagctccgcaaccagcacggaaagagcttggtctgctatttaatagggctctccgtgggttactcctcgctgtgctacgtgcaactctatcaagttgatgccactggtgttacatgcaaagtgtttggatacacagcatatttcttttttatgggtgcctacatgtggctaagtgtcattagctttgacttgtggcacaatttccgagggacgagaggaattaaccgattccaggagaagaaacgcttcctgttttattcgctgtactcttggggtattgccctagttttcctagccttcacctattgcgcccagcaacttaccaatttgcccgcgaacctaaagccaggtattggtgatggtgtatactgctggctggatatgagcaactgggcagccatgatctatttctacggtcccattctggcgatcgttgttgccaacaccatcatgttcataatgacggcgattaagattcacggcgtgcagcgcgagatggcccggataattgcgagtgagaacagcaccaagaacctacgaaccgagaaggacaaattcggcttgttcttacgcctctttctcataatgggcatcacctggctcacggagcttatctcgtacttcgtgggcagcgacaagggatggtctaagctcttttatatctcggatctggccaatgcgatgcagggctttctcattttcatgttgtttgtaatgaagaagaaggtcaagcacttgatcacaaacagaacgatacgtgtgcgcagtctgcggcagactgagagcgtaacgatgggaccgacttcgttctcgatgaagcagcggtttatggacgcctccaaccagatccgcaagctggtggtgatccgcaacgcatttgccaatgggtccaccagtgatttaccgccattgtctattccacgctgcccacgcaatggacgtcataaccactccaccacttcacacaaacacagatgctcgagtgttcgcgatggcagcaaccaacgtcagagccagtactccaccaagaccacgtcgagcagcgtggccaatctgtcgctgcacgagaagccatcggtggagaagccgctagtgatcagctcgagcgtggatcctcagaaaaccaccatcttccgctga

SEQ ID NO: 33003 - protein, 637 aa, DROSOPHILA
MPKKIHQPGGSLYCGVTLLGVLCLVVFRLIPGIPFGTYVMAERDHYHTIDDPNVPCNFYDTVNLTGHRLFPNGSYDYYGTIVPAELVGTYDYIHSSLTERIEVREHVRGCVCKFKSCLNICCPWRQVFNSEVDGCIIDHSDNRTWPDPPMLNITFRNESTILVNMFTQFAIQSFRPCPKMFSLQPETNNWDDYLLFENGSMLRVDDKLLIRKNEFCMVPTYVNESDMFYTIHPANCDMQDDHSTVKIINSYAVYLLIPELRNQHGKSLVCYLIGLSVGYSSLCYVQLYQVDATGVTCKVFGYTAYFFFMGAYMWLSVISFDLWHNFRGTRGINRFQEKKRFLFYSLYSWGIALVFLAFTYCAQQLTNLPANLKPGIGDGVYCWLDMSNWAAMIYFYGPILAIVVANTIMFIMTAIKIHGVQREMARIIASENSTKNLRTEKDKFGLFLRLFLIMGITWLTELISYFVGSDKGWSKLFYISDLANAMQGFLIFMLFVMKKKVKHLITNRTIRVRSLRQTESVTMGPTSFSMKQRFMDASNQIRKLVVIRNAFANGSTSDLPPLSIPRCPRNGRHNHSTTSHKHRCSSVRDGSNQRQSQYSTKTTSSSVANLSLHEKPSVEKPLVISSSVDPQKTTIFR

SEQ ID NO: 33004 - DNA, 2492 bp, DROSOPHILA
cacgcacaaggagagtaaacgctactcctgcccgcactgcgacttccgagccatccagagcaccgcctttcgggttcgatagatttctattaataattagtcaagtttctaatagtcttgctctccgtggacagatacaccttcagacccgccatcctgaacaggagctgtccacaatcatttacaaatgcaaccagtgcaacttcaccagcatcaatcaaggtctgttgcaggttcaccaggccaagcatgacgccggaaatcacaatcaaactttagcgtcatcccagggtgatgttccggtggagaaacaatcacagatcaaggtggagagcaatttggtgctcgctcattccagtacaaaagtggctacggaggtgatcaaggctcaagagaatatcctgcaggcttcctagggacgagttcctcccttctgtacatattttagaagatagattgcgcgagaacaaagtgccgcttagttttaatcgagttttataccaaaactgtaccaatgttattagtgttaagtacgcaggaagtcacagtaagggggaaaactccaattcagatgcttgattcctttggaaggatgataatgttgatggattggatcttttcaactgaagactgtgcaatccaagacttcggaattctccgaagataattcttttgacttttacgtttttctttttctgtatatgtttgccctacaattttaaggacctgttgctttacataagtatgtatataaaggttaattggggaaggctttattaattgaactccagtttcattcctttctatatacacagcatgctcagaacagaaatacatttacacatacatttaatctcaaacctcttatcaaaatgtggaagtgtgtgggtgcctattgtaaatcaatgctcaaaagatgaatctatcttatgtagcataaacgcgtaagttactacaaattgagctataggttgtaaattagtgaaatcggtctgccaacttagaatttccctaacggctgttgggtgttagagatgcttgttattatcccgtcggtcatcaaatggaaaacgacgttccagtggagcatctgttccagggccaaaccaaagatggggcaatagaagcccagggcgtagatcaaagccttttggcgcgtctctgtcgccatgttgaaaatcgcgttgagctgcagcatcacgttcatcagaaaatgaatgcagcacactagcatccagggaagcatagccaggaaaatcttcgctgaattctgcttccgccaacgcggcgacgtcaccaggctgtgcattaacgccatggcggtcagcacgagtgaaacggccgcgtagagcataacttccaaatagcggtcttttgcggtgctttggtattttttgtccacgtccaagtcaagcgtggccaaaggagccaccatgattgtagtcagaagcgacgttccgtagagcagctgcatcacgacgtcgatactcatgttgggcaaggctttacggtaaacttgattggatatttgacttaaggattgggtaaaattcagaggccgatgaaagctagcgaaatttggtaagtgtccatctcgttgggcagatgttttgaaacttttcctttcgcctactttggtatttagcaattttaatttttttttttttaattctgaataaaagacattgcaactaccatttttaatattttaagcctttaatgggagaaactttctttgcgtttatacaaaatttaattacactttttagcttttcttgccttggcattttgttgttgatgtatttttaactagattttattagaaggtttcattaaatatacaatagggaggaaacggaaatagacaaacgttagctgaactcttagaggtaataatcgagtcgattttccgggaatcgaatcgtaatcaatatcctagagcgagtgtcgtttaaaggtaatcctaagcctaaaggaggaagcatttgatatgttgtaaaaatgtttaaatatatattaatgtttacatatcatattgagcttatcttatatatatgcgtttttatgtgttggtaaaattacaattgatttaaataattaataacaattggttgggcgggggtttagattaagccgtgtttccgttttgattcgctctctatttagcgcatttgttcggtttcctattccttggcactctatgcaagtcttactttatcattaactttaattaagattagccttacaatttgttacttttcgttttaattcattgcgtcttgagtatttttcctataatttcattgggtctcagagtgtgtttcataatttacatacttaagaattatttaacaacattgaatgtttcctttaacgctttagtttggcctaagtctagtctaacttttacggattgctgacagggaatgttcattatagggtctggaggaggaaattatcaaaaaatttgatttacccattaggttctcaaa

SEQ ID NO: 33005 - DNA, 492 bp, DROSOPHILA
atgagtatcgacgtcgtgatgcagctgctctacggaacgtcgcttctgactacaatcatggtggctcctttggccacgcttgacttggacgtggacaaaaaataccaaagcaccgcaaaagaccgctatttggaagttatgctctacgcggccgtttcactcgtgctgaccgccatggcgttaatgcacagcctggtgacgtcgccgcgttggcggaagcagaattcagcgaagattttcctggctatgcttccctggatgctagtgtgctgcattcattttctgatgaacgtgatgctgcagctcaacgcgattttcaacatggcgacagagacgcgccaaaaggctttgatctacgccctgggcttctattgccccatctttggtttggccctggaacagatgctccactggaacgtcgttttccatttgatgaccgacgggataataacaagcatctctaacacccaacagccgttagggaaattctaa

SEQ ID NO: 33006 - protein, 163 aa, DROSOPHILA
MSIDVVMQLLYGTSLLTTIMVAPLATLDLDVDKKYQSTAKDRYLEVMLYAAVSLVLTAMALMHSLVTSPRWRKQNSAKIFLAMLPWMLVCCIHFLMNVMLQLNAIFNMATETRQKALIYALGFYCPIFGLALEQMLHWNVVFHLMTDGIITSISNTQQPLGKF

SEQ ID NO: 33007 - DNA, 2216 bp, DROSOPHILA
tctctagccatcccaagtcccaaaaccccagacactggtagtcaaagctgctgtgcccgcatctggaactcctcgagcctcaatcctcaatcttaactacaaactcgactctttcggcggggccaccaatcagagttcatgaattacatcgccattgcaatattgttgtgggaatgtctaaaagaggtctcggcttaagacagagcccggattgccacttctgcttcatggctattgcggcgaaatgttctttgatgccgatttcatttttcgatattgaaaataaccatgcattacggaggaggcttatgtactgggagtgggaaaagtgaaagatggagggagctgcccaacttatctcgtgacaatcgcccgacttcgtgaggcgttcatcgctcgcttttcggtggcctggcgagtgagtgtcgaaagtgttattgtcacgtaaattcaattagtttaattatgagtttcatcgatgttggcacctctgtagtgctctgcctgcacttcataactgaaaaattttaattttcggacatttaatttttttttttggcgaaagctacttttggggggggggcacacttcgtggtgggtatgaggtgacaaggtgtcagacatgctggggtcaaaaatggatatttcaggattgtgagacatattttcacatacgaataaaaactgattaaggaggtgtaccttgtcagttcctttaagtcacaatttttttttacctagaacctcagttatgagcgagcaatcgcctaacttccaccccaaaaaggaagtggaataatttctccctgttagtgggcagttccatcaattgtctcagcatctccgcatctcagcccattggatatcaggtggacacttttccgccattggcaacgcccccaaaatttgcatgcaaactccagcgaaagagaaaccaatagagtgtgcgaatggaagggaaatattggtgcagtgtgaagtggttctggtttcgtttaatttacctgtagtaggggaatccctgcggcacatgcagatccatcggcatccctccggcggttcccaggtgcggatggtggtgcggatgcgagtgcggatgtgggtgtggatgcgagtgcgagtggtggtggtgatgcgagtgtataggatggtgcatcgagtggttctggacatgcgccgcagcagccgcagcggcgaacccggcatcggaggccatcgagtggtgtcccagaacggcggcccatggcgaagccacgaacccactgccgtgatgctccatttctaggagttcctctctatctatatattatgactacacgcaggtttattagggtgagtccggttttcatagacacggaatcgtaggtgtggaaagaaagctttgcattaatatatctatatgatggcagtatggtctggccaataaagtatcgttctaaaaatgtaataagataattggaacaaaattctgttctgttaattcttgtgacttttaatagtttttttttttttttttttttttttaattaaattttaaacaaatcaattggattaaagttatgccgatagaattctttccgcccctgcgattgatctctcattcgtcctactatggaacttgacccaccctgatgcgagactatttattttcggcgatagcttttcagctatttatctttgatttgatgtggtcacacgcactctcacagagacacaaacacttgcggattatatagacatatttgcacattccgtttgggccaagatggcggccattatttaccgttaacgcgcatggccgttttaggggggagttttcgggaggtggctcggctcagcttagctcagcccctcaaaatcatccttgtccctaccaaaaagaaccgacggcagccaaaaaagagctgatgcaaacaaaaaacaagtgaacggtggctgaacgtcgaggaaggacgaccaagtcacaacgtcaaccttgaattaggggtgtcgctagccgttgggtgtacggattcgggttacacggaggcgagatactacgggtacgatagggagccggagctgggctctctcgcatctgggcagtgcttttcctttcgcacgtttttggtccgcgttcacctctgcacggcacgaaaattggcgataaactatcgcctcgcctcgcatcaggaaacatggtcggtcgcctcggtcgtttggtcggttggtcggtt

SEQ ID NO: 33008 - DNA, 216 bp, DROSOPHILA
atggcctccgatgccgggttcgccgctgcggctgctgcggcgcatgtccagaaccactcgatgcaccatcctatacactcgcatcaccaccaccactcgcactcgcatccacacccacatccgcactcgcatccgcaccaccatccgcacctgggaaccgccggagggatgccgatggatctgcatgtgccgcagggattcccctactacaggtaa

SEQ ID NO: 33009 - protein, 71 aa, DROSOPHILA
MASDAGFAAAAAAAHVQNHSMHHPIHSHHHHHSHSHPHPHPHSHPHHHPHLGTAGGMPMDLHVPQGFPYYR

SEQ ID NO: 33010 - DNA, 3098 bp, DROSOPHILA
gcacatacacacaagtgcacgcactgcagtcgattttgttttttttgcataaaactttatttcatgtatgccacttgtacattgtttgtcaccaatttgcgtattttgtacatcaaattttattttacttttcgttgccttccttattattttcctaatcttcacatgcacttttttagcgacgccaacacacacatttgcacacgcacacacatggcgaggatgagagaggagaaagagagcaaaacaccgttttcgttgcttccttttcgcttattcctctttagccgcttcttttcgattctggctctttttggcacttttagccccaagttgctagcaattcacttagcgtacgagcactaacaattaaaacgaataagactcgaaaaatacgatggaaacgcgaacatataaacaaaaatctacattggttttattgcagcgctacgcaggtgtgtttttacgcgctcatcgcgcaattaaattagaacgctgcagatttacttagttcactccagtctgcccaatgcgcgccgcacacctcggagccgcaaattataaacacgactgtcttcgatttaacgggctggcctatcggtcctatcgatgactcgatagtgcgagctggagtgtgaccatttcttggtaaaagcaaaatcgtgaagagtaagtgtgcgatactatcgaactgtcatatactcaaccaaataacatctgaaatctgtttctcactaaaaccgaaatttccatcagggttaggaaaatatagtttacgcacatcaagttgcataggtcaatcctacgtaaaaaaggctcgatataggtaaggtggacctcagcctgaacagggcctaatgcaaatacattcgataaatagatgttatcgataaccatttggtatataccagtaaatgctttgttttggttttcattcagaaaattgacatacatttcttagtctgcctaaagttccttggattgaaaagagcagtgcagaatgtcgcaccgccaccaggacattcccatccgcccacgttacggttatgtggccgaggagagtggcccatcggaaggggcagccaggagttctggatccggagccacgcccgcctcctcctacacggaaattccgttcctggctcagtatccgggagcggtgccagagcacgtgctccaggatctgacgcccacagccactggccatgctgcgattcccggaagcacaaagacaagacccaacggcgagaaataccttaacctggattcgggcgaggatcccgacgaggaagacgatcccttggaggaggaggacaacagcaactcgaatagcaactctaagggcagttccggcgacatcgaaaggcacagactgaaggcagagagcagtgggttctaggttatctacccatagttcctgactaaagcatcttccttctttcagctgtgccctacgagctggacggcgaaaccagtgactccgacgggatgcgccactttgtggcccacgatctagaggccaagttgcgcgagcgcgtggcggcttcggcctactcctcggagcacaccacgcccctgagctccatgggtcccattggagccacttccggcaacggtctgctcacgcggcggttcctgcagtcgcgcaacattcccgaagtggacggcagcgtcttgagcgacatcgaactggaggctcagtacttggccagctcggtggacaatctgatggaaaacctgggcaacctgctgcactcaatctcctccataacggccgacaacgtggaggtccatcgcaacgcggtcaacaagctgacggacactttggacgcgaatatcaagtgccagtaccaattgctggccaaggcggaggaaatcaccaagtcgatgaaacccacagagcagctgggtcagcgcatgtaagtgggtcaattcaagacagatccctttagtgtaatggactttctcttccgcagaaggcagatcaagcggctggtggacatgttggacagcaccatgtaaaatagggctacgctatcctgtgatcaaccaatcaaagagatcttgtctttctagtcattccgtaaatacatataatcagtgttataaaatccatatggaaagatacctttcgcttgtttaaatcgtacttattctagcagttcctccaaaaaatccacctccttggctcacagcttctccaccttggccttgatgatccttaggggatccacggggcgatcgttcttgtcggtttccaccatgccgatccgcttgaccacctccatgcccgtgtagaccctgccgaagatcgtgtgcttgccatccagccactgcgtgggcgccagcgtgatgaagaactgggacccgttggtgtccggtccagagttggccatcgagaggatgcccgcgcccgtgtgcctcaagtcgccgtgcagctcgtccgcgaactccgatccgtagatggaggcgcctccgcggccagtgcccgtgggatcgccgccctggatcatgaagtccctgatgatccggtggaacaccacgttgttgtagtagccccttctcgagagttcggcaaagttgcggcaggtgttgggcgcgtgtttccagtacagctccacggtgatttctcccatgctgcgcggggcacaaatgccacaaataatgtgataaacaaatgctcagtcttcagtttcggcgattatcgagcattcaagctccggactcacctcgtttccagggtcacgaagtgcggctgccacgccttgtcgggaatgccaccagcattgttgggatcgcttagggacagcataactatatttgttgttaaattagcgagacttcagtaaaattgttaaaaccggcagagtcagagtgaccagcttaagcgtagtcacttaggccgcctggcaaccctgaactgctgcggtatacttctggtatatatatagtatagtatatagacgcaccttggtattttttagggtttttgtgagcacacgcaagggtatttttcaattagttccatttcaaaattcgacgaaaaaatcgtggaaaatatttagcggacggaatttttcgtcgggctcgcgagaaaa

SEQ ID NO: 33011 - DNA, 985 bp, DROSOPHILA
atgtcgcaccgccaccaggacattcccatccgcccacgttacggttatgtggccgaggagagtggcccatcggaaggggcagccaggagttctggatccggagccacgcccgcctcctcctacacggaaattccgttcctggctcagtatccgggagcggtgccagagcacgtgctccaggatctgacgcccacagccactggccatgctgcgattcccggaagcacaaagacaagacccaacggcgagaaataccttaacctggattcgggcgaggatcccgacgaggaagacgatcccttggaggaggaggacaacagcaactcgaatagcaactctaagggcagttccggcgacatcgaaaggcacagactgaaggcagagagcactgtgccctacgagctggacggcgaaaccagtgactccgacgggatgcgccactttgtggcccacgatctagaggccaagttgcgcgagcgcgtggcggcttcggcctactcctcggagcacaccacgcccctgagctccatgggtcccattggagccacttccggcaacggtctgctcacgcggcggttcctgcagtcgcgcaacattcccgaagtggacggcagcgtcttgagcgacatcgaactggaggctcagtacttggccagctcggtggacaatctgatggaaaacctgggcaacctgctgcactcaatctcctccataacggccgacaacgtggaggtccatcgcaacgcggtcaacaagctgacggacactttggacgcgaatatcaagtgccagtaccaattgctggccaaggcggaggaaatcaccaagtcgatgaaacccacagagcagctgggtcagcgcataaggcagatcaagcggctggtggacatgttggacagcaccatgtaaaatagggctacgctatcctgtgatcaaccaatcaaagagatcttgtctttctagtcattccgtaaatacatataat

SEQ ID NO: 33012 - protein, 302 aa, DROSOPHILA
MSHRHQDIPIRPRYGYVAEESGPSEGAARSSGSGATPASSYTEIPFLAQYPGAVPEHVLQDLTPTATGHAAIPGSTKTRPNGEKYLNLDSGEDPDEEDDPLEEEDNSNSNSNSKGSSGDIERHRLKAESTVPYELDGETSDSDGMRHFVAHDLEAKLRERVAASAYSSEHTTPLSSMGPIGATSGNGLLTRRFLQSRNIPEVDGSVLSDIELEAQYLASSVDNLMENLGNLLHSISSITADNVEVHRNAVNKLTDTLDANIKCQYQLLAKAEEITKSMKPTEQLGQRIRQIKRLVDMLDSTM

SEQ ID NO: 33013 - DNA, 4438 bp, DROSOPHILA
gatgctagtaagcagcatttaattcttagtttagcacgcttcaaatgcgaccaaagcacagacatttctgatttctggagatacttcgtgcggaaagcgcttaaataatagtagatatcagtgctagcacgtgtatttgtttaccttcggctggttaaatggatgaattagcacatttcaccagcgatgcctttggattcgaattttcctgattactcagaactcttcattttcacatctgctctgttcgccgacaaaaagtaaaagaactataaaagtaaaaatggtggtgcataaaatgtggcttgacttatcgatagtgcgcggccgtcgattttcctatcgataataggcccggttcagactgattataaattaaataattattttactggaaattgttgctgcagaaatcataagtttcctaaaaatcctggtcaagatatatcgaatttatcctttattaaatataccacatttaaatattcggaaattgccatgggccaatcccagttccacataccaaaaactgcctcaaaagctaaacatataatatgcaattttctgtgaaaaaatggaaaatttcaaggatctgtaaaaatatgtactggatcaatcgttttatctttctttaacttaaaaaatttttatcatgggcttaaatgaaaacaaaaccactcaccgaattgtggctaaagggctgggctcaatactatgctattaaggtatgattaaggagaaaactttaaaggtatttaaaaaaaataaatagatcagtccccaactatttttttctgtttattcgatctctacttgagtatatttttacgcggcgttggctcatgttattagactaattagaaaaatcatcaattattacttagtaaactaggtttgttgactatcgatataccaacttcagattcgcgacatctctaatcagtcatggaattgtcagtgttgtaaaacctgaaatgtcattgcatctttgcttcttcaaaacagctgacagctaaaaacaaatatttcgtgatttttgtaaatattgctaacgttttaatatggaggagcaagaggatcgagaaaagctctacgaagaagcccacaagaaagtaaaactgggcgaggagctgaagaaagcgctgaaagacttcgaagatttgcctggtgtcagcaaagtacagcgaaaaattcagcaagagctcaaatttctaaataaggtttgtttgcctatttttcatgataaaaacattgagtaaaagcattttccttcaaggtgattactacaaggtccgtaaaggaacaccacataaccagcagtaactttgtttactacgattttctcattaaaactctgcgtttgcaacaaggagtagtcgacatcaatgccgtattccgcctggagtctagggatagtcccctgagagtcgacatcgtggccaacaatggactcaagtgggtgaaggtgatagccaggaactcgaagtccgtcgaggacgcggccaggggatgtgtcagcatcggagcccgaagtgtcatcgaccaggcggaggattatctggaggccagcgaacttagtttctgcatgttccagaggccgaaggtaatgcctaatagtatgctaccctagacagcattcatcatctgatatactgccttttagatagtattctacttctccaacaaaatcgaggactccctgcatgaagagctaatggaaatgggcgtacaaactgcttccctggactcaccagacaccgacttggatatgtacgccacgacgtcgaacgaactgaatctagatgtgaccacattgctggcctacgttagtgcgctcaccaacggatccgccaattgggtctacaaggaacctctgctcaccgaacaggcggaaagggaaagagcctcgccgctaaaaccgctcctcgagaaaatcctagagggaaaaaccttggtctgctgccagttagcctacgatgccttccagagtattttggatattgtaggcggcgagggcgaacggaagcgagccgaggaactgatgaaacgggtcaccgtttatccggatgtggaaacaatacccgaagaattctcccacatacgtttcactgccaacgtaaacgagcgaagtctgaaaatctttagtttcggcatggccaggcaaattttcactgtgacttcgaataaggcctttgtgagatcagctaagatgcaggtatgcatgaatggaaaatgtgattttgtcctgtctttaatgtctgtgctttacagggtatcaatgtgcctgtttttgtacacgcttcagttgcacttaccgaaggtaagcaggcaacaggaagaccgctttaaaaaccaataagcgttaaggctattcaaataaattttatgtgattttttttcaaaaactgctctacacaaagttgttataattattaaataaagatccttcaaatttgaattcgattggtttttaaaaattcgaaacgatacatacgactcttatcgattgttgtcatgacagagctgccacacctcgcgcataaaacatatgtaaacaaaagtgaaattttggaaactgcgttcttgcaaaaaaatagacgacattttgcttgcataaaacaggcaatattgcaattgggaatataattattaaaatttaggtgcctggcaatttcaacgttacaagagcaatcatataatttcaaatcaggacgggaaaacagtcaaaaacatggactgcgcaccactgaacttggtaagaacccgaagaaaacatcgaatttacatggttttaaatggaattacctacccaaatcaaaggctcatttccacgagcgaaggtcggagcgatttatacgcaatcaccgctatgaggaggccattaaagcgctggaaacatccctaatctacatgcaggatgcccaaaaacgggtggctctgcccaaatccaaggaagttctggacacattgaccctcgattttcagcgcaaactgcgtcaaattgagatgcgaaagacgcagcatggtctgaacaagctgaaggattatgctcccttgaaggaaaccagtcccatgctgcccctgcgaccagaagccggagcaagtggaggcgcaggaggatccgctcagtcggtggccaaggcaatcgacaaaacagtgcaggacttcgatgccaagttcacctcctccttggtggcaaaggcctctagcacactggcccattcggagccccatatggagacgctgaagaagagcgattctgcccaggaggagcaggaacacgatacttgcgatcagcggctggcgggcagtggagacctggacctgccatccttggcgcccttggagttgccctccttcgattacagcctgttcaccagctcctcggctccttcgttggccagctatgccggcatggctgagagcttccagaaataggcctggttaagatccatttgtaaaacttcaactaatttgaaagatctcgtggtaatgcagtgcccgctgagtggtgattaggatttaattttaggcacgttcttcatttcaacgttttgtgcagttccctttgtgaagtgtatttgggaattctctaaataaattaaattaggttaattcacaataataataataataataatactttgtgtattacaatctaagtcgtttatttggccatcagacccttcagcagatcatccatgtcggtttcggtgtcgacattcttgagcagaagcagcacctgtgcctccatctcgcagaggatatctggtttctggtaggtaatgatcagcgtgttgaactggtggtggacagagaggctctcctgcgcgggcttgaccccacagcggtccagttccgggaccgggatgaccttgtagtacttcttgttcgaggtgcgcacgactatggcacgcttctcgggatcggcggttacgctgtatgtgtccagggagtagggcatgttgcggatgcgccactcaatgttcttcttggtgatccgcttggtcagcagtggcgcggtgttgctctcccgcagggtgaaatctccgccggccagggagtccgtttcctcgccagatcctggtggcttgttgcccgaccagtttaactgacgcggctcatcgcccagctcgatttcccactccgactcgcccatgatcttgttgctcttcgatttccaggcccgccgctgcacgattcccgtgtccatgttgtactcctcggccatttgcctgccgtccgggaatttgtagagcaccttgcgggcgcggccacttatcatggagttcttctccgccgcctgcaggtagtttagccagttctggtaggacatctctggggattgatgggattacctaggcacacgtctccgccggagattcgaatataacaactgaacggggcagaaaatttgatcgatggcgcaaagttgaaa

SEQ ID NO: 33014 - DNA, 1876 bp, DROSOPHILA
aacagctgacagctaaaaacaaatatttcgtgatttttgtaaatattgctaacgttttaatatggaggagcaagaggatcgagaaaagctctacgaagaagcccacaagaaagtaaaactgggcgaggagctgaagaaagcgctgaaagacttcgaagatttgcctggtgtcagcaaagtacagcgaaaaattcagcaagagctcaaatttctaaataaggtgattactacaaggtccgtaaaggaacaccacataaccagcagtaactttgtttactacgattttctcattaaaactctgcgtttgcaacaaggagtagtcgacatcaatgccgtattccgcctggagtctagggatagtcccctgagagtcgacatcgtggccaacaatggactcaagtgggtgaaggtgatagccaggaactcgaagtccgtcgaggacgcggccaggggatgtgtcagcatcggagcccgaagtgtcatcgaccaggcggaggattatctggaggccagcgaacttagtttctgcatgttccagaggccgaagatagtattctacttctccaacaaaatcgaggactccctgcatgaagagctaatggaaatgggcgtacaaactgcttccctggactcaccagacaccgacttggatatgtacgccacgacgtcgaacgaactgaatctagatgtgaccacattgctggcctacgttagtgcgctcaccaacggatccgccaattgggtctacaaggaacctctgctcaccgaacaggcggaaagggaaagagcctcgccgctaaaaccgctcctcgagaaaatcctagagggaaaaaccttggtctgctgccagttagcctacgatgccttccagagtattttggatattgtaggcggcgagggcgaacggaagcgagccgaggaactgatgaaacgggtcaccgtttatccggatgtggaaacaatacccgaagaattctcccacatacgtttcactgccaacgtaaacgagcgaagtctgaaaatctttagtttcggcatggccaggcaaattttcactgtgacttcgaataaggcctttgtgagatcagctaagatgcagggtatcaatgtgcctgtttttgtacacgcttcagttgcacttaccgaaggacgggaaaacagtcaaaaacatggactgcgcaccactgaacttggtaagaacccgaagaaaacatcgaatttacatggttttaaatggaattacctacccaaatcaaaggctcatttccacgagcgaaggtcggagcgatttatacgcaatcaccgctatgaggaggccattaaagcgctggaaacatccctaatctacatgcaggatgcccaaaaacgggtggctctgcccaaatccaaggaagttctggacacattgaccctcgattttcagcgcaaactgcgtcaaattgagatgcgaaagacgcagcatggtctgaacaagctgaaggattatgctcccttgaaggaaaccagtcccatgctgcccctgcgaccagaagccggagcaagtggaggcgcaggaggatccgctcagtcggtggccaaggcaatcgacaaaacagtgcaggacttcgatgccaagttcacctcctccttggtggcaaaggcctctagcacactggcccattcggagccccatatggagacgctgaagaagagcgattctgcccaggaggagcaggaacacgatacttgcgatcagcggctggcgggcagtggagacctggacctgccatccttggcgcccttggagttgccctccttcgattacagcctgttcaccagctcctcggctccttcgttggccagctatgccggcatggctgagagcttccagaaatag

SEQ ID NO: 33015 - protein, 604 aa, DROSOPHILA
MEEQEDREKLYEEAHKKVKLGEELKKALKDFEDLPGVSKVQRKIQQELKFLNKVITTRSVKEHHITSSNFVYYDFLIKTLRLQQGVVDINAVFRLESRDSPLRVDIVANNGLKWVKVIARNSKSVEDAARGCVSIGARSVIDQAEDYLEASELSFCMFQRPKIVFYFSNKIEDSLHEELMEMGVQTASLDSPDTDLDMYATTSNELNLDVTTLLAYVSALTNGSANWVYKEPLLTEQAERERASPLKPLLEKILEGKTLVCCQLAYDAFQSILDIVGGEGERKRAEELMKRVTVYPDVETIPEEFSHIRFTANVNERSLKIFSFGMARQIFTVTSNKAFVRSAKMQGINVPVFVHASVALTEGRENSQKHGLRTTELGKNPKKTSNLHGFKWNYLPKSKAHFHERRSERFIRNHRYEEAIKALETSLIYMQDAQKRVALPKSKEVLDTLTLDFQRKLRQIEMRKTQHGLNKLKDYAPLKETSPMLPLRPEAGASGGAGGSAQSVAKAIDKTVQDFDAKFTSSLVAKASSTLAHSEPHMETLKKSDSAQEEQEHDTCDQRLAGSGDLDLPSLAPLELPSFDYSLFTSSSAPSLASYAGMAESFQK

SEQ ID NO: 33016 - DNA, 3557 bp, DROSOPHILA
gaggatatctggtttctggtaggtaatgatcagcgtgttgaactggtggtggacagagaggctctcctgcgcgggcttgaccccacagcggtccagttccgggaccgggatgaccttgtagtacttcttgttcgaggtgcgcacgactatggcacgcttctcgggatcggcggttacgctgtatgtgtccagggagtagggcatgttgcggatgcgccactcaatgttcttcttggtgatccgcttggtcagcagtggcgcggtgttgctctcccgcagggtgaaatctccgccggccagggagtccgtttcctcgccagatcctggtggcttgttgcccgaccagtttaactgacgcggctcatcgcccagctcgatttcccactccgactcgcccatgatcttgttgctcttcgatttccaggcccgccgctgcacgattcccgtgtccatgttgtactcctcggccatttgcctgccgtccgggaatttgtagagcaccttgcgggcgcggccacttatcatggagttcttctccgccgcctgcaggtagtttagccagttctggtaggacatctctggggattgatgggattacctaggcacacgtctccgccggagattcgaatataacaactgaacggggcagaaaatttgatcgatggcgcaaagttgaaaatttgttgagaagcacattgcgatggaaacctggcaacccagctgccagcttgtttacatcgcaagccgggttaccaaggcactttaaagcattacatacaataccttatgatcgatttgtcttgtaatatttggaggtaatggttaattttaatgcaaaatacgtactaattcttgccattttttttacttactaataaaatgattttgaaattcgaatattttccatgaattcagcttttttctggctacccaatttacagttgattccagcgcgcgagttggcagccccgtgcgtacacaaaaaaacagagttgacgtggccggcgcagtgactacataaaatatacgcatatttcatcacggcagcgatttaattattgctatttaaagtaagcagccagtcactccggccgtagtttataaatagccactagaccgtccgtcccgaatccgtagacttagcagctaatttggacgcatttctgcttacaggcggcagtcgaaaaaagcgaaaatccaagaagcgaaaatcgaacgaaaaagggaattaataaaacattaaaaatgagtttggtgtggactttgatcgccggatttctctatgcggaaatcgcactggtccttctgctggtgctgccggtgctcactccttaccgctggaaccggttcttcaagtccaaattcctatcgatgttgggacaacaggcgcacatatatttcctgctgatcatgggaattctggtcattttcctcctggaggccattcgcgagatgcgcaagtactccggcttgcagcagtctaacgaggtccacttgaacgtggagatgcagcacagcatgaagctgttccgtgcccagcggaacttctacatctctggattcgccattttccttgccctggtcatccggcgactggtaaacttgatctgcacccaggccaatctcatggcccagagcgaggcttccttcaagcaggcacagagcgccactgcagccgcacgttccttgctggagaacaagaacaccgagaaggccaaggaagccggcgaggataccactctcatcgaggtgagtccacgtcccaaacccctgcatccgatccccaggaatggcatgtctagagagctaacacctaagactttggagttcaattggctactaccagctgtaaagatatggcaatgcatatagaaggtgtggtcaaaatatggcgagataatgtctttagccgactaaatctataaaatctatacttcattccactttctggtacattttctcaattggttttgaatataagatacgaaaaggctttaaatgtagtctattaacgatatagaactttaaataccagtatatatcatgattaaaatcttaaacgtaaacttaaatcagtttgaagaccgagtgaatttgtcataggcttagtgcttttgttttgaccgcagctaaacgttttgaaaccacacccaaacacatatgttgggccacgataaacagaagccaccactcgaaagtttaaacctcttgttaactctttaaacagctgtcaagactgcggagacgtgtgcaaggactcaccgcccgagtgtcctaagtatccccacctagagcacccaccttatatccattcccaaacacccaaaacgaacaaaaatccaatcgaaactcaaacgaaatccgaattttgcagctcaacaagctgcgcgagcgcgtccaggagctaacctccgacttgaatcgcgaaaagaaggacaaggaggcggttaagtcgcaggcggagagcatcaaccgcgagtacgaccgactcaccgaggagtacagcaagctgcagaagaagataaccatcggcggaggcggaaacaaggatgattaaactcactggagccaagtccaacatttaaataacgataagacttataagcatggcggtggggcagcgaaagcaggcacatttaaaagattataacgatttcaaatcgatagaaagcacacacatcttattgttaatcctcatagatacaactacatataccatttgataatgataatggggtatattgataatggtccctcaactcaatgttcgtttcgtccgaagttttgtatttaattcgtatgtgttaagttttgtttgccacagtaacacacccaaaaagcgtcgtggctattaaaagaacaaccaaaaagtacccatccagttgtgatcgattcgatgattcatctgttggcgcggatagtccacatcatgtctgatagtacacggcaatgacgtcagacgtcgcaacctgtttgcatacttggagcttagaaatcggaggcgttacattatcggtgtgcgaaaagggcatcgaatatgtttccttgataattacccagaaatgctaatcaaattcgcatatttagtgatctatcgtggttttgcagtgcatactttaatcttaacttgaacagagatcatcctacataaatttgctgttcaataaactgcattaaaatgcttactcccaccagaagcttacagagaagctaggagcttcagatctcacatagtgccaccatttgggtggcatgtacaaacagtcaccaggttgcaggagcagctggtagaacttcaccttggctaccaagggatatgtttcaggatccagttgagcagcatctattcgcgctgtattggccaaaaactcactgtcgtggggatacagattgtctgtgtctgcaggagcagctaggatgatcctcttcgaaccgaatacctggcacagcaagttgtgcttgggatcgtagtgcatgggagatacggttccagctggtcccagccaggctttgatgtccacagctcctggggtatcttcgttgctgatggtgcagta

SEQ ID NO: 33017 - DNA, 757 bp, DROSOPHILA
gccggcgcagtgactacataaaatatacgcatatttcatcacggcagcgatttaattattgctatttaaaatgagtttggtgtggactttgatcgccggatttctctatgcggaaatcgcactggtccttctgctggtgctgccggtgctcactccttaccgctggaaccggttcttcaagtccaaattcctatcgatgttgggacaacaggcgcacatatatttcctgctgatcatgggaattctggtcattttcctcctggaggccattcgcgagatgcgcaagtactccggcttgcagcagtctaacgaggtccacttgaacgtggagatgcagcacagcatgaagctgttccgtgcccagcggaacttctacatctctggattcgccattttccttgccctggtcatccggcgactggtaaacttgatctgcacccaggccaatctcatggcccagagcgaggcttccttcaagcaggcacagagcgccactgcagccgcacgttccttgctggagaacaagaacaccgagaaggccaaggaagccggcgaggataccactctcatcgagctcaacaagctgcgcgagcgcgtccaggagctaacctccgacttgaatcgcgaaaagaaggacaaggaggcggttaagtcgcaggcggagagcatcaaccgcgagtacgaccgactcaccgaggagtacagcaagctgcagaagaagataaccatcggcggaggcggaaacaaggatgattaa

SEQ ID NO: 33018 - protein, 228 aa, DROSOPHILA
MSLVWTLIAGFLYAEIALVLLLVLPVLTPYRWNRFFKSKFLSMLGQQAHIYFLLIMGILVIFLLEAIREMRKYSGLQQSNEVHLNVEMQHSMKLFRAQRNFYISGFAIFLALVIRRLVNLICTQANLMAQSEASFKQAQSATAAARSLLENKNTEKAKEAGEDTTLIELNKLRERVQELTSDLNREKKDKEAVKSQAESINREYDRLTEEYSKLQKKITIGGGGNKDD

SEQ ID NO: 33019 - DNA, 3694 bp, DROSOPHILA
tcctgcctcaaagcactttgtctggaactcttctagactgggagcgtccagttggggtatatcacagttggaggttactcgggttaatggctctagagttggaagtggtgcggaattcagtgctactgctccatccttgtcgagataatccattagggcgactttcagttcactccaatcctccatgcaacccaaaagttgagcctcatcgaggatctcactgcacgcatccttctgggcgggactagtgctctccaagagaaggaaaaaaatctaaaatgtatatttgtagtttgtatggcttagttagcatctaaatcccaccttgaagcaacaggctatggcgtatatcttcctcgtgaccaagggaacctggctgaagtgccctgtgtgaatgcgttcccagttcctgtccaccagcgcacctaccagatatccggtttcctccgccccggaatctccgccagacctcaagttcgccaggtgatccgcggctcttttgagtatgtagcgcgcctcgacttcaccacggaccacattttccagatccacccagcggggcagcagctgcgtcagctccaggaactcactatccatagaatgttaaacaactattatttgtttaccttttagcttacattcagcgttgccagagttcatttgtaagcattaaatatttcgattaatcgatgttttaaaatatatttaaaaattgatgagttgttcagtacttcaaacatgtattgcttaaggatgcctttagtaaattataaatagtagctccgtgggtccttccatggtgaagatacattttgcactggcacgaaatggaaaaacgatttccatgggcggagttatgaccgccgttttggacgccgaatggcattgtgtgccccaagtgccactaattacgggttttagactaagctgcagcttgtaaacaacaatcatgagacaagaacccggatagtggaattgctgacggtcagagctgaggagcatgtcgaggacttcggatgacatccggaagcacctgaaagtgcggcgccagaagcagagggccattttggccatgagatggcgctgtgcccagggaggattggagttcgagcagctggacaccttctacggagccatcaggccatgtaagaccacttttccaaaccactttcatatgtgtctaaacatattacaatggacaatagatctgtgtgtggcgcagttcttcggcattatgcctttgtcgaatatccggagtcgcgatccccaggatgtgaagttcaaggtaaggagcattggcctggcagtcaccggtctcttccttttgctcggtggcatgaagaccttggtcggtgccaatattctcttcacagagggtctgaatgccaagaatatcggtgagttttagatggtatggtagtgtgatcccaactgaaagctcaatagtgggtttggttttccttatcgtgggcatggtcaactggctaaacttcgtgggctttgctcgctcctggtcgcacataatgctgccctggagttcggtggacattctgatgctctttccgccctacaaacgtggcaagcgaagccttcggtcaaaggtcaacgtccttgctctgagtgtggtcgtcctggcagtaggtgagatttctgggttatcctttcaatggtttccagaagaactttctttcaggcgaccacatgctgtactacgcctctggctactgcagctatagcatgcacatcctgcagtgccacacaaaccactcgcgtattacctttggactttatttggagaaggagttctccgacatcatgttcatcatgccattcaatatattttccatgtgctatggatttgtaagttaactatatatattttagttagttagtttgaataatgctctcttttttagtggctaaatggagccttcacctttctgtggaacttcatggacatctttattgtgatgaccagtattggactggcgcaaaggtttcaacagtttgccgctcgagttggcgcactggagggtcgtgtaaaataatccaaactatttcaatgtatttctcttttaaatccccatcccatttagcatgttcccgaagccttgtggtacgacattcggagggatcacattcgcctttgcgagctggccagtttggtggaggccagcatgtcgaatatagtgttcgtatcctgcgctaacaatgtgtatgtgatctgcaaccaggcgttggctattttcacgtgagtcatctgtttgtagctaccccctagtctcatttcaaatctttttagcaaactgcggcatcccataaactacgtttacttctggtactcgctgatcttcctgctggccaggacgagtctggttttcatgactgcctccaagatccacgatgcctcgcttctgcccctgaggtccttgtacttggtgcccagcgatggctggacgcaggaggtgcagagatttgccgaccagctgaccagcgagtttgtcggattgtctggatatcgtctcttctgcttgacaagaaagagtctcttcggagtgggtaaacttcacgagtcttcacgattcccatactgatcccagccatcctctccagatgctagccaccctggtgacctacgaacttatgctgctgcaaatagatgctaagagccacaagggactgcggtgcgcgtaactaaatgagtgaactttagtccagtttaacttaactgaatgtataataaaatagtcagataatcagatttgaaaaagggtagattcctgcgaggaaaagtcagttagcagctcatgtgtgagttcagccaacccgactcgggcggttattaaatggccaaaaggcttccaggataattggccattccgagtgtcatttcaatttcaatttttggccagctgtcattcagcgagggcgaatccacaaatgggagggcaaccaaagtcgcttgccattagtttcaattattgctacacatgtaggcaaacgtaattttgaaggcaactcgatgagttttgaaaggagaaaggagttggagtgcactgaaaaatatgttcggaagctaaagttctaaataataataatcttatctttactgcttacttctaaaccctttcaaaagccacttggtgtgctctgaactaaataccatttttttttcgagtgtaagaaaagttaacagaaacacgagaaggcggcggaaaagtcgcttcgaacagaaatggcttttcaatttcaaaactcggcctttgacactttgccaattaacactttcctggttaccgattgccatttttgtttgtggtgggccaccggctgctcccaccgccgatccttgccgctatagccgccgttgaggcaattatcctgtcaggaaactttctacgcagccgaagcagctagcaaaacagaacgccagcaaaaacaaaggtcctgcaggttggtcacttgaaaggagcgcgccggcaccctcgtttccggaaaagcaacccccgaatgggttttcagtcgtagtttgttttgggccaagtgtcatggcaaccggaaaaactggagagctggtgtggaaaatcggggaatatttggacgcagaacgtgagtaaccgccgaggagcgaggccatgagccaccaggatgagcatggacataccagagaccgtatccctgcgcaagttccgcg

SEQ ID NO: 33020 - DNA, 1311 bp, DROSOPHILA
atgtcgaggacttcggatgacatccggaagcacctgaaagtgcggcgccagaagcagagggccattttggccatgagatggcgctgtgcccagggaggattggagttcgagcagctggacaccttctacggagccatcaggccatatctgtgtgtggcgcagttcttcggcattatgcctttgtcgaatatccggagtcgcgatccccaggatgtgaagttcaaggtaaggagcattggcctggcagtcaccggtctcttccttttgctcggtggcatgaagaccttggtcggtgccaatattctcttcacagagggtctgaatgccaagaatatcgtgggtttggttttccttatcgtgggcatggtcaactggctaaacttcgtgggctttgctcgctcctggtcgcacataatgctgccctggagttcggtggacattctgatgctctttccgccctacaaacgtggcaagcgaagccttcggtcaaaggtcaacgtccttgctctgagtgtggtcgtcctggcagtaggcgaccacatgctgtactacgcctctggctactgcagctatagcatgcacatcctgcagtgccacacaaaccactcgcgtattacctttggactttatttggagaaggagttctccgacatcatgttcatcatgccattcaatatattttccatgtgctatggattttggctaaatggagccttcacctttctgtggaacttcatggacatctttattgtgatgaccagtattggactggcgcaaaggtttcaacagtttgccgctcgagttggcgcactggagggtcgtcatgttcccgaagccttgtggtacgacattcggagggatcacattcgcctttgcgagctggccagtttggtggaggccagcatgtcgaatatagtgttcgtatcctgcgctaacaatgtgtatgtgatctgcaaccaggcgttggctattttcaccaaactgcggcatcccataaactacgtttacttctggtactcgctgatcttcctgctggccaggacgagtctggttttcatgactgcctccaagatccacgatgcctcgcttctgcccctgaggtccttgtacttggtgcccagcgatggctggacgcaggaggtgcagagatttgccgaccagctgaccagcgagtttgtcggattgtctggatatcgtctcttctgcttgacaagaaagagtctcttcggaatgctagccaccctggtgacctacgaacttatgctgctgcaaatagatgctaagagccacaagggactgcggtgcgcgtaa

SEQ ID NO: 33021 - protein, 436 aa, DROSOPHILA
MSRTSDDIRKHLKVRRQKQRAILAMRWRCAQGGLEFEQLDTFYGAIRPYLCVAQFFGIMPLSNIRSRDPQDVKFKVRSIGLAVTGLFLLLGGMKTLVGANILFTEGLNAKNIVGLVFLIVGMVNWLNFVGFARSWSHIMLPWSSVDILMLFPPYKRGKRSLRSKVNVLALSVVVLAVGDHMLYYASGYCSYSMHILQCHTNHSRITFGLYLEKEFSDIMFIMPFNIFSMCYGFWLNGAFTFLWNFMDIFIVMTSIGLAQRFQQFAARVGALEGRHVPEALWYDIRRDHIRLCELASLVEASMSNIVFVSCANNVYVICNQALAIFTKLRHPINYVYFWYSLIFLLARTSLVFMTASKIHDASLLPLRSLYLVPSDGWTQEVQRFADQLTSEFVGLSGYRLFCLTRKSLFGMLATLVTYELMLLQIDAKSHKGLRCA

SEQ ID NO: 33022 - DNA, 8651 bp, DROSOPHILA
gctgcaaatagatgctaagagccacaagggactgcggtgcgcgtaactaaatgagtgaactttagtccagtttaacttaactgaatgtataataaaatagtcagataatcagatttgaaaaagggtagattcctgcgaggaaaagtcagttagcagctcatgtgtgagttcagccaacccgactcgggcggttattaaatggccaaaaggcttccaggataattggccattccgagtgtcatttcaatttcaatttttggccagctgtcattcagcgagggcgaatccacaaatgggagggcaaccaaagtcgcttgccattagtttcaattattgctacacatgtaggcaaacgtaattttgaaggcaactcgatgagttttgaaaggagaaaggagttggagtgcactgaaaaatatgttcggaagctaaagttctaaataataataatcttatctttactgcttacttctaaaccctttcaaaagccacttggtgtgctctgaactaaataccatttttttttcgagtgtaagaaaagttaacagaaacacgagaaggcggcggaaaagtcgcttcgaacagaaatggcttttcaatttcaaaactcggcctttgacactttgccaattaacactttcctggttaccgattgccatttttgtttgtggtgggccaccggctgctcccaccgccgatccttgccgctatagccgccgttgaggcaattatcctgtcaggaaactttctacgcagccgaagcagctagcaaaacagaacgccagcaaaaacaaaggtcctgcaggttggtcacttgaaaggagcgcgccggcaccctcgtttccggaaaagcaacccccgaatgggttttcagtcgtagtttgttttgggccaagtgtcatggcaaccggaaaaactggagagctggtgtggaaaatcggggaatatttggacgcagaacgtgagtaaccgccgaggagcgaggccatgagccaccaggatgagcatggacataccagagaccgtatccctgcgcaagttccgcgacttttcggcgcgccagaagcaggagctctacgaaacgctcctcgaactggccgagtccatcgatgagctgcctaagaagtcgctgaggaaaaccctggaactcaccctggccgttttggagtacaagggcgagcaggtacagcagctgcaggaatcagcagccggaggactctcctccgaccgccgcctgcaggatgagaatgagaagctgaagcgaatgctccagaagttggaggacgaacgcgatggcctgaagagcaaagccaaggaggtgagcagtagatcatgtaaagtacccaagctcaaggatacgcttttttctcactagttgggggaggaaatccgtcagttggagctgcgcctgcaggaggcggcgcagcaggcggaaatcagcgacaaggattcatcggatcccctgtccgagctggacaagcaggagcagctgctgcagaacatcgactccaagaacaagcacatcaagcggctgctaaaggaaatcgaggtgagtcatattatgttttgcattcagaatatactatattcattccctttcagacactgcaaaaccaaaacatagctcaatcgaagaccatagtgctccacgagcgggagctgcagaccatcaaggcgaatctcgtgcaattgagccaggacatcaccaaggtggagcaggagcgcaagtccttgaaacaaaaggagcagcagcaggcgctggaaatcactcgcctggaaggaaatctaactttcctggaggtggagcgcgagaagcaggaggtggaaatgcgtcagttcctggacaaatacgaggccaagtcgctgggctggaggcaggcgctcgacgatcgggacaaggaggtggagcgtctcaagaaacaactggagggcaaaagcatcagctctggccaaaccaattcttccaacagtcagagtcagcaggaggaggagcacgccaaactacgacaggtaaggatgaactgccgatatattttatctagatcttgagctcgctaaatgttcatccctcgtagcttttggaatcccgggaacaacgcatcgagaagctggaggagaagatcaagtcaatggcggaggagatggttagctccacgcgtgcgatgaaccagttgtgtcaggagaaggagcgagcccacgatcccgagcagccgcgagcctgctgccagatgatcgaggagcgcctgcgggaagccaccgcccggtgtcagcagctctcggagatgctggaggccgccgagcaggacaacgtgctcaagtcccagcaggccctgcacgccattagtgccctggaggcctacaagcgtgacgaagatggcctcattcccgctctgcgacgctgctcgggattggaacagaaggtggcagcacgcgacaagcagctgagggcctacatccaggagctgaactccctgcacgaggtggtccaggagaacgagctgctgcggcgaaaacttcacatccccgacgatgtggtcatcatggccaagaacgtccattccaagcagcgcaacaaggacaagcagatcgagcgactgaccctcaagctgaggacatccgaggagctgcgtctgcaattgaagttggaaaagagtgaacttaggcggaagctcttggagttgcagcaggacagtccgcagaccttgaacgaatcgctgcaggcgcccagcgaagtgggtgaagtgcctcatagtgtgcatctggagaattcgccgagacgtggccaaggcgacggggcagccagttccgagatgcagaatcgatacgacgaagtcctggccgaaaatgaaacactacgctccggcatgtacgagattctggagaagctgcgggaatatgatggtgagataaccataacatatttcttgaataactatatgtattaaacattatccatgtagccacctcagagcacataaccatcgattccgatctcttgcgccgcctcatcgaagctctgcccggcggaacgaccactccgcagcgactccagggtcagctcctagagctgaaggcccgagaggaggcactgcgtcagctgctcgagcagcagaactacagtgactccgagacgggagaactgtcctctgtgcatagtctgtgcgaggttcccgagattgcagaagagcatcctgtcgaggaggatgctgtgctgaacacagccaccaggccaagctcgcccactgaagccacgatgggattacgcagacccactgtaccagatcccgaggagaaacccacgaacgaggccctggctgagctctccattctgcgcaagcactacgacgaacttcgtcttcatatgtccgccgatggcagtgatctgatgaatcgcaaccaagagctccacgatcaaatgatcgctttggagttgcagttggagcagcaaaggaattcctactcctacatgcgcagggattacgatcaactgctgacggagaccagaaagcaggaacttcgcttcatagatgataaggcgtctctagccaggcagttggagcatagcaagagtgaactatgtgaagctagagaggagttggagcaagtgaatcgaaggaatctctacactgcggaggagcagcaaaagttggagcacaggaatgccatcttgagcatgcaacttggccaggcgatggagcaactgctgggcgagctgaagcccacggaaatatgcgctgagtacggtataatcagggagaactatcagctggattacatcacagcccaggacttcgaggagcagcaacaggagctgctcacttggaggagcaagcaggcggagctgcagagggagaccaagcagctggaaggactgctccatgtggccaatgagcaggttggagattctccttgatacctacccatgggagatctaatgcccatcctctttccagattcactcccagcaaaggctgctcaatgagatcaccgataaccacatcaatctgcgtcacctggtggccgatcttcagagcagctccgacgagaagctaatgctggccaaggtccagagggatctggatagtggtaagcacagacttattcgaggagaagatcagtagccagcatgtctctctttttttttttagtgaaagccgagtgctcccgcttggaaacagagcgagaaaaactgcagctaaaggcggactgcctgcaaacccaactggaggccagcgagttatccctgaaacagacgcaacaggacttccagcaggagcgcaccaatagcgatattaagcacaagtgagaccaagtggtggataatccctagcagatctgactttctaccaaatcccacagattcctccagcattcattgtttatgctcaaagataaatatgccaaattcacgccactggtcttccttaccaactttgtgttcgcctaccaaaagttccagcgtcgcctggaggaggagcaagtgcagcagcgacatagagatcacaccgctctgattgatgaagtgaccgccgtggtccaggccaaaattggtctcaacgaggagagttcccagcagttggtgaagctcataaagtctgaaacacagacgagactcttggaacagcgctgcgagattctgcaggccaaacaggaggagctcgttcgggaattgggtgagttgaggatgagccaggccaccgacaccgagcactggagcaccatccaggccttgttcggtgaaggagagccaagaagtcaactcaaggtggatgcagagacgaataccgatgcagtggctcctaatctggccatgagaagggccgtccagttgatagacagggagtcatcgcccattgggtcgcctctccgaaaacatccgcacctggatacagccactcaaacgctggaggcgcaagttgagttctcggagacggcagtccaaaccaatggcattctcagccagcagaatcaagccgttcagacagcggatgcagtggaggacaataggagagattcccgcgcggagctacaaaaaatgcaagaaacgtaagttcccccaagtaaaaaatgtaaataactatttgcaactataaatggtgatgcccaacagtctgcaggaagccaaccagcgcatcgagatccttggcaagcagttggaggcttccagatcggagagtcgcgagtccgccagtccgcaaggtggtgtggtggagaagaccatactctcgttccacaccctgctcctggagaaggaccagtccatacaaaagtaccaggaccttctgcaaaccgagagggatcagagtcagcaagcacttagcaaacaggtggctgaaaacgaatccctgagggccacggttaacaacctgaacttcaacatcaagacgaaggatgcagagattcagggccttaaggagaagctgagacagaaacccgaggtccccgtggagcgcaacccgtcgacggattcgaggtccagttccagttccgatagctcggtcaacgagctgacggatgagaagatcgaggagctcttcgaaagcagctcagtggagagaccaccccaagaagagttggaagtgccagtggaagcaggtccagagaacatagttaccgaagagcccgaaggtgaggaggagaagcaggacaccgaggagctgaaggaagtgccgacgctgcacaagcaaatcaaggatctcaaggacaagctggagtacagcgaaaggagcctcaagacgagggaagaggaagtggatatactaaaggagaagtaagttgtaaagtaagtagttgtgcatgatcttaatccgttacattcgacaggttgaagctgtgccaggagcgggagaagtcggtcgaaagcaccgtgaatcccgaactggatcagctacgcatctttctggatgagaaggacaagcacatcaaggatctgatggatacactcaagaacttccacgtaatgcccagcaataccatcatattcatctctactattaaaagttttaaacatgcaggacgaccagcagcgctacatcaaagacacctcgaacttctcggaggaccagatagccaagctggctgccgatctcaaccgcaccgaggccaccaacaagatctatcacacccaaatggaggcacttcgccgccagctggccaacgtcacccagcgcgaaaagcaggccagggatctcagccagtcgctgcgccagcagctactcaaacgccctgtggtctccattaaaacggaactgaatgcccgggttaagaacgagaaccagctgaagagaatccagcagctggaattggacttggacgaggcacgtggccagctgcagcgacagcagacgctcctggaggccaagcgcacgaggagtgccaatgaggtgcagctctgggagaagcagaagcggtaccaacagcaggcggagaagaccaaggcccggctggaggagaccgagctggcgctggagaagacccgtgcccttctccaggcagcgcgcaccacaatagcgcgcttggaaaaggacaagcaaatcctggagtccaagctgggcaggaacggtccgccgagcaacagctccggtggcaataacctcaagtgctgccgcactccatcctgtccgaatctccagcacgtgggtgtcagcaagttcgctccatcgccttcggagagtccggagacctacacgggtcccagcagcgagtgcagctctccggcgcatcatcacacccagatctttgaccagagtcagttggaccttattgaggcgctcaagtcgcgcattgagctgcagcagcgcaagatcatcgccatggaactggagggcaggggcagcaatgccctgaccacggagctggaaaaattgcaagagcgctgccaggccatcgaggcgcagaacatccgactggaggccaggaaccttcagctgcagctcgactcggatctcttgaggcagggcgacagcagcgatcggctgcagaagcgaatcaagcacttggaggagtgagtagagagcggcagtttccacgcgtgtgaatcgagacttatgcaccacccccatttttcagctacatcatggccctgaaggaggagatggctcgcaacgaatcccgtcgagagttgggcagtggcctcaaggtgagcacaaatcagggccaatcggcggagcagacgatcctctcgctgcgcaatctcgtggagaagttgcgatcggagaacaagttcctgaaggatggtcgacgatccacggagtcgcgcagctccatggactccacgcctgcagaggcggcacgtctgcagcagcagcatgcagaggcgctggagaaaatcagtgctctgcagcaggagttgcagaagcgaaccaccaagtgcagccaatgcgggggacgcagcaaggtaggtaccgctcgtaataatacaccttcggcaataattgtgtttgaaatttaaaaaaaaaaggacgctgccaacgaggagctcaagttcatcaaggagcagttggtgaaaaagacgcagctgctgcagaaggcaaaagtacttctgacccgtgctgccgccaaggaaaaagtcctgagggaacagctggccttgtggaaacgcaagtgctccgaactgcaaaatgtgcccgtgatcgatgaaatcagcgagtaaccagtattgatcataagatgaatgttgtacaggaaaaaagaggaataaaactaaagtttttttcactgctgctgttttgaatttggcgcccaatgcagagttgccagatcgaggtgggctaaaatcgttggggatgtgaaagttacgggattcccccgaattttgttttacaggatatttaaatttatttaataggatatttaaaccatgaaataatgtatcttttgccagattaagaaaacactaagccatttgccagtcacagtgaacagttcaccaactatcgcttatcaactgtatggcttggaatacccctgatgcccactaatcggatgaattaaacaacaatagctaccggcaatcacagtaaaatgatccactgattggactttgtcgctcattccgcgcacagcactggcagcaagatgacctaccaaggatacaaggaactgcttgtggagcagcagggcaagctgctcgtggccaagttcaacaatccgaagaagaagaactgcatcaacagggtcgcctaccaggagatgacccgtgtgttgaccgaggtcaacgacgatgagggcgtaaccattgtggttttcaccggcgtgggtgacatctttacgtccggcaacgacttgtcccaatcctccaataccgatgacatcgacgccttcttcaagcagtccaatgcgactttcaaggtggcacatctgtatatcccatttcatttttttataatttatccaatccctacttgaaggccatggttctgagcttcgtcaactgcagaaagattgtgcttgccctggtgaacggacctgccattgggattggagccaccattgtgggattgtgcgatgtggcttggtgctccgaaacggtgggtattgcctcaaatttgctatggcagcatgacttgactgataaataccatcgcagacctacttctacacgccattcaccaaactgggattggtgccagagggcggttcctcctatatgc

SEQ ID NO: 33023 - DNA, 5937 bp, DROSOPHILA
atgagcatggacataccagagaccgtatccctgcgcaagttccgcgacttttcggcgcgccagaagcaggagctctacgaaacgctcctcgaactggccgagtccatcgatgagctgcctaagaagtcgctgaggaaaaccctggaactcaccctggccgttttggagtacaagggcgagcaggtacagcagctgcaggaatcagcagccggaggactctcctccgaccgccgcctgcaggatgagaatgagaagctgaagcgaatgctccagaagttggaggacgaacgcgatggcctgaagagcaaagccaaggagttgggggaggaaatccgtcagttggagctgcgcctgcaggaggcggcgcagcaggcggaaatcagcgacaaggattcatcggatcccctgtccgagctggacaagcaggagcagctgctgcagaacatcgactccaagaacaagcacatcaagcggctgctaaaggaaatcgagacactgcaaaaccaaaacatagctcaatcgaagaccatagtgctccacgagcgggagctgcagaccatcaaggcgaatctcgtgcaattgagccaggacatcaccaaggtggagcaggagcgcaagtccttgaaacaaaaggagcagcagcaggcgctggaaatcactcgcctggaaggaaatctaactttcctggaggtggagcgcgagaagcaggaggtggaaatgcgtcagttcctggacaaatacgaggccaagtcgctgggctggaggcaggcgctcgacgatcgggacaaggaggtggagcgtctcaagaaacaactggagggcaaaagcatcagctctggccaaaccaattcttccaacagtcagagtcagcaggaggaggagcacgccaaactacgacagcttttggaatcccgggaacaacgcatcgagaagctggaggagaagatcaagtcaatggcggaggagatggttagctccacgcgtgcgatgaaccagttgtgtcaggagaaggagcgagcccacgatcccgagcagccgcgagcctgctgccagatgatcgaggagcgcctgcgggaagccaccgcccggtgtcagcagctctcggagatgctggaggccgccgagcaggacaacgtgctcaagtcccagcaggccctgcacgccattagtgccctggaggcctacaagcgtgacgaagatggcctcattcccgctctgcgacgctgctcgggattggaacagaaggtggcagcacgcgacaagcagctgagggcctacatccaggagctgaactccctgcacgaggtggtccaggagaacgagctgctgcggcgaaaacttcacatccccgacgatgtggtcatcatggccaagaacgtccattccaagcagcgcaacaaggacaagcagatcgagcgactgaccctcaagctgaggacatccgaggagctgcgtctgcaattgaagttggaaaagagtgaacttaggcggaagctcttggagttgcagcaggacagtccgcagaccttgaacgaatcgctgcaggcgcccagcgaagtgggtgaagtgcctcatagtgtgcatctggagaattcgccgagacgtggccaaggcgacggggcagccagttccgagatgcagaatcgatacgacgaagtcctggccgaaaatgaaacactacgctccggcatgtacgagattctggagaagctgcgggaatatgatgccacctcagagcacataaccatcgattccgatctcttgcgccgcctcatcgaagctctgcccggcggaacgaccactccgcagcgactccagggtcagctcctagagctgaaggcccgagaggaggcactgcgtcagctgctcgagcagcagaactacagtgactccgagacgggagaactgtcctctgtgcatagtctgtgcgaggttcccgagattgcagaagagcatcctgtcgaggaggatgctgtgctgaacacagccaccaggccaagctcgcccactgaagccacgatgggattacgcagacccactgtaccagatcccgaggagaaacccacgaacgaggccctggctgagctctccattctgcgcaagcactacgacgaacttcgtcttcatatgtccgccgatggcagtgatctgatgaatcgcaaccaagagctccacgatcaaatgatcgctttggagttgcagttggagcagcaaaggaattcctactcctacatgcgcagggattacgatcaactgctgacggagaccagaaagcaggaacttcgcttcatagatgataaggcgtctctagccaggcagttggagcatagcaagagtgaactatgtgaagctagagaggagttggagcaagtgaatcgaaggaatctctacactgcggaggagcagcaaaagttggagcacaggaatgccatcttgagcatgcaacttggccaggcgatggagcaactgctgggcgagctgaagcccacggaaatatgcgctgagtacggtataatcagggagaactatcagctggattacatcacagcccaggacttcgaggagcagcaacaggagctgctcacttggaggagcaagcaggcggagctgcagagggagaccaagcagctggaaggactgctccatgtggccaatgagcagattcactcccagcaaaggctgctcaatgagatcaccgataaccacatcaatctgcgtcacctggtggccgatcttcagagcagctccgacgagaagctaatgctggccaaggtccagagggatctggatagtgtgaaagccgagtgctcccgcttggaaacagagcgagaaaaactgcagctaaaggcggactgcctgcaaacccaactggaggccagcgagttatccctgaaacagacgcaacaggacttccagcaggagcgcaccaatagcgatattaagcacaaattcctccagcattcattgtttatgctcaaagataaatatgccaaattcacgccactggtcttccttaccaactttgtgttcgcctaccaaaagttccagcgtcgcctggaggaggagcaagtgcagcagcgacatagagatcacaccgctctgattgatgaagtgaccgccgtggtccaggccaaaattggtctcaacgaggagagttcccagcagttggtgaagctcataaagtctgaaacacagacgagactcttggaacagcgctgcgagattctgcaggccaaacaggaggagctcgttcgggaattgggtgagttgaggatgagccaggccaccgacaccgagcactggagcaccatccaggccttgttcggtgaaggagagccaagaagtcaactcaaggtggatgcagagacgaataccgatgcagtggctcctaatctggccatgagaagggccgtccagttgatagacagggagtcatcgcccattgggtcgcctctccgaaaacatccgcacctggatacagccactcaaacgctggaggcgcaagttgagttctcggagacggcagtccaaaccaatggcattctcagccagcagaatcaagccgttcagacagcggatgcagtggaggacaataggagagattcccgcgcggagctacaaaaaatgcaagaaactctgcaggaagccaaccagcgcatcgagatccttggcaagcagttggaggcttccagatcggagagtcgcgagtccgccagtccgcaaggtggtgtggtggagaagaccatactctcgttccacaccctgctcctggagaaggaccagtccatacaaaagtaccaggaccttctgcaaaccgagagggatcagagtcagcaagcacttagcaaacaggtggctgaaaacgaatccctgagggccacggttaacaacctgaacttcaacatcaagacgaaggatgcagagattcagggccttaaggagaagctgagacagaaacccgaggtccccgtggagcgcaacccgtcgacggattcgaggtccagttccagttccgatagctcggtcaacgagctgacggatgagaagatcgaggagctcttcgaaagcagctcagtggagagaccaccccaagaagagttggaagtgccagtggaagcaggtccagagaacatagttaccgaagagcccgaaggtgaggaggagaagcaggacaccgaggagctgaaggaagtgccgacgctgcacaagcaaatcaaggatctcaaggacaagctggagtacagcgaaaggagcctcaagacgagggaagaggaagtggatatactaaaggagaagttgaagctgtgccaggagcgggagaagtcggtcgaaagcaccgtgaatcccgaactggatcagctacgcatctttctggatgagaaggacaagcacatcaaggatctgatggatacactcaagaacttccacgacgaccagcagcgctacatcaaagacacctcgaacttctcggaggaccagatagccaagctggctgccgatctcaaccgcaccgaggccaccaacaagatctatcacacccaaatggaggcacttcgccgccagctggccaacgtcacccagcgcgaaaagcaggccagggatctcagccagtcgctgcgccagcagctactcaaacgccctgtggtctccattaaaacggaactgaatgcccgggttaagaacgagaaccagctgaagagaatccagcagctggaattggacttggacgaggcacgtggccagctgcagcgacagcagacgctcctggaggccaagcgcacgaggagtgccaatgaggtgcagctctgggagaagcagaagcggtaccaacagcaggcggagaagaccaaggcccggctggaggagaccgagctggcgctggagaagacccgtgcccttctccaggcagcgcgcaccacaatagcgcgcttggaaaaggacaagcaaatcctggagtccaagctgggcaggaacggtccgccgagcaacagctccggtggcaataacctcaagtgctgccgcactccatcctgtccgaatctccagcacgtgggtgtcagcaagttcgctccatcgccttcggagagtccggagacctacacgggtcccagcagcgagtgcagctctccggcgcatcatcacacccagatctttgaccagagtcagttggaccttattgaggcgctcaagtcgcgcattgagctgcagcagcgcaagatcatcgccatggaactggagggcaggggcagcaatgccctgaccacggagctggaaaaattgcaagagcgctgccaggccatcgaggcgcagaacatccgactggaggccaggaaccttcagctgcagctcgactcggatctcttgaggcagggcgacagcagcgatcggctgcagaagcgaatcaagcacttggaggactacatcatggccctgaaggaggagatggctcgcaacgaatcccgtcgagagttgggcagtggcctcaaggtgagcacaaatcagggccaatcggcggagcagacgatcctctcgctgcgcaatctcgtggagaagttgcgatcggagaacaagttcctgaaggatggtcgacgatccacggagtcgcgcagctccatggactccacgcctgcagaggcggcacgtctgcagcagcagcatgcagaggcgctggagaaaatcagtgctctgcagcaggagttgcagaagcgaaccaccaagtgcagccaatgcgggggacgcagcaaggacgctgccaacgaggagctcaagttcatcaaggagcagttggtgaaaaagacgcagctgctgcagaaggcaaaagtacttctgacccgtgctgccgccaaggaaaaagtcctgagggaacagctggccttgtggaaacgcaagtgctccgaactgcaaaatgtgcccgtgatcgatgaaatcagcgagtaa

SEQ ID NO: 33024 - protein, 1978 aa, DROSOPHILA
MSMDIPETVSLRKFRDFSARQKQELYETLLELAESIDELPKKSLRKTLELTLAVLEYKGEQVQQLQESAAGGLSSDRRLQDENEKLKRMLQKLEDERDGLKSKAKELGEEIRQLELRLQEAAQQAEISDKDSSDPLSELDKQEQLLQNIDSKNKHIKRLLKEIETLQNQNIAQSKTIVLHERELQTIKANLVQLSQDITKVEQERKSLKQKEQQQALEITRLEGNLTFLEVEREKQEVEMRQFLDKYEAKSLGWRQALDDRDKEVERLKKQLEGKSISSGQTNSSNSQSQQEEEHAKLRQLLESREQRIEKLEEKIKSMAEEMVSSTRAMNQLCQEKERAHDPEQPRACCQMIEERLREATARCQQLSEMLEAAEQDNVLKSQQALHAISALEAYKRDEDGLIPALRRCSGLEQKVAARDKQLRAYIQELNSLHEVVQENELLRRKLHIPDDVVIMAKNVHSKQRNKDKQIERLTLKLRTSEELRLQLKLEKSELRRKLLELQQDSPQTLNESLQAPSEVGEVPHSVHLENSPRRGQGDGAASSEMQNRYDEVLAENETLRSGMYEILEKLREYDATSEHITIDSDLLRRLIEALPGGTTTPQRLQGQLLELKAREEALRQLLEQQNYSDSETGELSSVHSLCEVPEIAEEHPVEEDAVLNTATRPSSPTEATMGLRRPTVPDPEEKPTNEALAELSILRKHYDELRLHMSADGSDLMNRNQELHDQMIALELQLEQQRNSYSYMRRDYDQLLTETRKQELRFIDDKASLARQLEHSKSELCEAREELEQVNRRNLYTAEEQQKLEHRNAILSMQLGQAMEQLLGELKPTEICAEYGIIRENYQLDYITAQDFEEQQQELLTWRSKQAELQRETKQLEGLLHVANEQIHSQQRLLNEITDNHINLRHLVADLQSSSDEKLMLAKVQRDLDSVKAECSRLETEREKLQLKADCLQTQLEASELSLKQTQQDFQQERTNSDIKHKFLQHSLFMLKDKYAKFTPLVFLTNFVFAYQKFQRRLEEEQVQQRHRDHTALIDEVTAVVQAKIGLNEESSQQLVKLIKSETQTRLLEQRCEILQAKQEELVRELGELRMSQATDTEHWSTIQALFGEGEPRSQLKVDAETNTDAVAPNLAMRRAVQLIDRESSPIGSPLRKHPHLDTATQTLEAQVEFSETAVQTNGILSQQNQAVQTADAVEDNRRDSRAELQKMQETLQEANQRIEILGKQLEASRSESRESASPQGGVVEKTILSFHTLLLEKDQSIQKYQDLLQTERDQSQQALSKQVAENESLRATVNNLNFNIKTKDAEIQGLKEKLRQKPEVPVERNPSTDSRSSSSSDSSVNELTDEKIEELFESSSVERPPQEELEVPVEAGPENIVTEEPEGEEEKQDTEELKEVPTLHKQIKDLKDKLEYSERSLKTREEEVDILKEKLKLCQEREKSVESTVNPELDQLRIFLDEKDKHIKDLMDTLKNFHDDQQRYIKDTSNFSEDQIAKLAADLNRTEATNKIYHTQMEALRRQLANVTQREKQARDLSQSLRQQLLKRPVVSIKTELNARVKNENQLKRIQQLELDLDEARGQLQRQQTLLEAKRTRSANEVQLWEKQKRYQQQAEKTKARLEETELALEKTRALLQAARTTIARLEKDKQILESKLGRNGPPSNSSGGNNLKCCRTPSCPNLQHVGVSKFAPSPSESPETYTGPSSECSSPAHHHTQIFDQSQLDLIEALKSRIELQQRKIIAMELEGRGSNALTTELEKLQERCQAIEAQNIRLEARNLQLQLDSDLLRQGDSSDRLQKRIKHLEDYIMALKEEMARNESRRELGSGLKVSTNQGQSAEQTILSLRNLVEKLRSENKFLKDGRRSTESRSSMDSTPAEAARLQQQHAEALEKISALQQELQKRTTKCSQCGGRSKDAANEELKFIKEQLVKKTQLLQKAKVLLTRAAAKEKVLREQLALWKRKCSELQNVPVIDEISE

SEQ ID NO: 33025 - DNA, 2920 bp, DROSOPHILA
ttcagctacatcatggccctgaaggaggagatggctcgcaacgaatcccgtcgagagttgggcagtggcctcaaggtgagcacaaatcagggccaatcggcggagcagacgatcctctcgctgcgcaatctcgtggagaagttgcgatcggagaacaagttcctgaaggatggtcgacgatccacggagtcgcgcagctccatggactccacgcctgcagaggcggcacgtctgcagcagcagcatgcagaggcgctggagaaaatcagtgctctgcagcaggagttgcagaagcgaaccaccaagtgcagccaatgcgggggacgcagcaaggtaggtaccgctcgtaataatacaccttcggcaataattgtgtttgaaatttaaaaaaaaaaggacgctgccaacgaggagctcaagttcatcaaggagcagttggtgaaaaagacgcagctgctgcagaaggcaaaagtacttctgacccgtgctgccgccaaggaaaaagtcctgagggaacagctggccttgtggaaacgcaagtgctccgaactgcaaaatgtgcccgtgatcgatgaaatcagcgagtaaccagtattgatcataagatgaatgttgtacaggaaaaaagaggaataaaactaaagtttttttcactgctgctgttttgaatttggcgcccaatgcagagttgccagatcgaggtgggctaaaatcgttggggatgtgaaagttacgggattcccccgaattttgttttacaggatatttaaatttatttaataggatatttaaaccatgaaataatgtatcttttgccagattaagaaaacactaagccatttgccagtcacagtgaacagttcaccaactatcgcttatcaactgtatggcttggaatacccctgatgcccactaatcggatgaattaaacaacaatagctaccggcaatcacagtaaaatgatccactgattggactttgtcgctcattccgcgcacagcactggcagcaagatgacctaccaaggatacaaggaactgcttgtggagcagcagggcaagctgctcgtggccaagttcaacaatccgaagaagaagaactgcatcaacagggtcgcctaccaggagatgacccgtgtgttgaccgaggtcaacgacgatgagggcgtaaccattgtggttttcaccggcgtgggtgacatctttacgtccggcaacgacttgtcccaatcctccaataccgatgacatcgacgccttcttcaagcagtccaatgcgactttcaaggtggcacatctgtatatcccatttcatttttttataatttatccaatccctacttgaaggccatggttctgagcttcgtcaactgcagaaagattgtgcttgccctggtgaacggacctgccattgggattggagccaccattgtgggattgtgcgatgtggcttggtgctccgaaacggtgggtattgcctcaaatttgctatggcagcatgacttgactgataaataccatcgcagacctacttctacacgccattcaccaaactgggattggtgccagagggcggttcctcctatatgctgcccctcatcttggggcgctcaaaggcgtcggaaatcctgctgctaagcgaaccgctgagcgcccaggaggcatatcagttcaactttgtttcgaggatcttcaaggccagcgaattggagtcggtgatttggcccaaattgcgtcagtattccgagctgccgacgaactcccttctgcaggggaaacgcctcgtcaaggatggcttcctggagaatctcatcaaggccaacgaggcggagtgcaagcagctgctccaacagttccagcatcccgagtttgcccaggccatcatagactttgccagccgtaaaaacaaggcgaaattataaatacggcttaagtttattaccgtctcagtgattttgtccgcctattttaaaacccaagagatatgaatgctaattcttgtggcacaaacatcaaagcaaatagacttcttagcgattagattagggacataatgtgtgccttttgcaccataaccataggttaatctcttgcactatctgtgtatgtacatatgtaccaatatattgccaaagtgctgattaaaaacaattgaagaacgccacctacctgtttgtgaatgaatcgcacagctgtggtcaagataatagaatgtgtaatatatgaataaatatataaatatattttaaattccatcgatgttcccgcccttctgcgaaattcaaattggattcatgtatagttcactttattattgcgtacatacgagtattcgtttattaacatatcctttgatgcttctgccgcgagtgtgtatgtatataatatgtatatgaccgtattgcactttatactagttcaacattgagtgagtagttcccccaggagctctgagatccttgccgcacaagccgtgattatgaactggtggtgacttagattacactacgctttacattcctgtatcaactagatctatatagatctagatctaggccagaccatgaactctgactgtgagacactctgctagggaaattcgttggcctctctccggatttcaaatacactcgagcttagtccttaatcctagcttaatcctacgcgtgcctgctcatgtacaaattgatgatagacgtagaaacatatctataatagccagttaaacttaggctgcgttttaagttatttccaataactgcccctccaaattcaaaaactttacaattaatcaacaaaaagagctacgggagaacgatgttctctcaatttacctagtcctagttaagctaccttagctaaactccccccttagactatttagcacaaggagtgccattgcatgcagcatcaccatattcc

SEQ ID NO: 33026 - DNA, 802 bp, DROSOPHILA
cactggcagcaagatgacctaccaaggatacaaggaactgcttgtggagcagcagggcaagctgctcgtggccaagttcaacaatccgaagaagaagaactgcatcaacagggtcgcctaccaggagatgacccgtgtgttgaccgaggtcaacgacgatgagggcgtaaccattgtggttttcaccggcgtgggtgacatctttacgtccggcaacgacttgtcccaatcctccaataccgatgacatcgacgccttcttcaagcagtccaatgcgactttcaaggccatggttctgagcttcgtcaactgcagaaagattgtgcttgccctggtgaacggacctgccattgggattggagccaccattgtgggattgtgcgatgtggcttggtgctccgaaacgacctacttctacacgccattcaccaaactgggattggtgccagagggcggttcctcctatatgctgcccctcatcttggggcgctcaaaggcgtcggaaatcctgctgctaagcgaaccgctgagcgcccaggaggcatatcagttcaactttgtttcgaggatcttcaaggccagcgaattggagtcggtgatttggcccaaattgcgtcagtattccgagctgccgacgaactcccttctgcaggggaaacgcctcgtcaaggatggcttcctggagaatctcatcaaggccaacgaggcggagtgcaagcagctgctccaacagttccagcatcccgagtttgcccaggccatcatagactttgccagccgtaaaaacaaggcgaaattataa

SEQ ID NO: 33027 - protein, 262 aa, DROSOPHILA
MTYQGYKELLVEQQGKLLVAKFNNPKKKNCINRVAYQEMTRVLTEVNDDEGVTIVVFTGVGDIFTSGNDLSQSSNTDDIDAFFKQSNATFKAMVLSFVNCRKIVLALVNGPAIGIGATIVGLCDVAWCSETTYFYTPFTKLGLVPEGGSSYMLPLILGRSKASEILLLSEPLSAQEAYQFNFVSRIFKASELESVIWPKLRQYSELPTNSLLQGKRLVKDGFLENLIKANEAECKQLLQQFQHPEFAQAIIDFASRKNKAKL

SEQ ID NO: 33028 - DNA, 2557 bp, DROSOPHILA
cgaggagcgtgcaaggatgtcgaggacccaaccacacccattttgctggctggtaagtaagcatattataataattgttgagccctcttgtgcttttcattctggtggtggtgacttttcgtacaatatgggaaggattaaccacctggaggcgttaacaaaattatgtttttattgttcgggcacttgacacgcttcgagtttcatttgaagccagttgaggatcgtccggacaaactcactttgacttaagttaaatttatctccataaataatttatagatagtttacaaccatcgtctcgaacataaatatcgcacagataaacagagcttaaaatctaaccttttaatttaatttattacattatctactcggtctagacttcattaactacctcgtaaatttattgattacttctttttacggcgttcttaaaggtttaacagtggttcgtgtctatgctatgcacttaacagtagactgagatagctataaaactgaatgcacagaaaagggatgcatagatatggctgcttgtgtgttagacagagaaatccacgtctcatggaagaggggaagtttgaatttatgtacttaactcaattttcattggttgttggctttacataagcaaaactttctgaaggaagccctgctttgggtttcacctttgtcgccgtgcggcatatatgtaggtggtgttccctcgttcaggtcagctttgcagtgcgtttcatttggcgcagatccatcaacgtcaacggacgtcccacaaattgaggatgttcgatggaaggcaaacaggatatcgagcttagacaagagtaggcaagaaactggtttaaagaaacctggctacgggtctgagatacgccctttaaacgctgtaatgatttggcattacgtttctgttaaaatggtcagatttacattttctttattgctcacaagtgctaaacgattaggatggtataaaaagaatcaccggatttcatgattacggcgacatgggctcgggtgatggatcggattccaccttagccgtggggttctcttctctaataggctccttcagtttggacgacgttatgcttatttcactgggcgaccaggcttgaatggaggccatcactgtgtttgacacaaaaatcggttggtagatgtagagcagaatgtctccgctaacccgaatgcggtctggctccattgatccgacctcctggcactcgatctccacgggcttggcctgctgcgagaagcggtgccggtagaagctggactcgcgtctctcggccggaatcatcgactgtgtccgcgaccttgtgtcccctatcggctgttgggaatcaaccgcctgcatgcttatcgtgggcgaaaagatattgctcttgcgcttctcgcgcaccagctcccgccagtccagagccacctgcttcacataggcgtagttgctttcgtccaccagagccgccatgacgaagctgtttattttaggtagtgttaggtcccttcagcggcctccaggtggtcccgataatgcccctattcgtcgccgttgccctccggtttctagatcattattatatacacacttgattttgtagcaagttccctagaccattttaggcagataattttggggagaatgaagtaaattaactgcaaactaagttacatatatcaagtccaggttgctatgtctataaaagatctttagcacccggaggcacttataagcgctttgaccatacatctttagtgagctcaaaagcttccagcctattttcagcctacatttatcctagaagcaagctacgaaatgttgaattaaagccagaaatcgattttttctttttaatactttttctttaatgtttttttgtgtataaatgatattttctgttttgtatttttaatgccaagtgaaagttttgaaaacgcacaaagtatagtataaaccttataagtatattacaatgatcatctgccaggagtgagtaaaccataaactaagtctaggaattccaaacacgaacctaagagatattttcgttttttttttttttgttgaatttttgttttcttgcaaaataagtgtaaggtttatcctattaatataatagacataaaacgtatgatgtgtgttggctgaagattcgttgtctccgcactgattgtgtatagttgcgttgcgtataaaaatataaactctgattcttcatcgctgttctggtgagctccattgctagctccttagtgctgttggctttttagcttctgtttgcttcggtgccttggattcatactctcgtttggactcctcgacggatcctttgtcatctgctggtagctcctcgttcacagttcgcatttgtaggcactttagtgtttttcaaacaaaaaagtatacaaaaacgccactcaattgatcattgtgtttgtatcatatttactgggtaagaatctgggggacgatccgcccctttgttcctttatgcggcagtttacacgtggctgggcatcgtctgctcctcgcctaagtacatattcagcg

SEQ ID NO: 33029 - DNA, 557 bp, DROSOPHILA
ggcgacgaataggggcattatcgggaccacctggaggccgctgaagggacctaacactacctaaaataaacagcttcgtcatggcggctctggtggacgaaagcaactacgcctatgtgaagcaggtggctctggactggcgggagctggtgcgcgagaagcgcaagagcaatatcttttcgcccacgataagcatgcaggcggttgattcccaacagccgataggggacacaaggtcgcggacacagtcgatgattccggccgagagacgcgagtccagcttctaccggcaccgcttctcgcagcaggccaagcccgtggagatcgagtgccaggaggtcggatcaatggagccagaccgcattcgggttagcggagacattctgctctacatctaccaaccgatttttgtgtcaaacacagtgatggcctccattcaagcctggtcgcccagtgaaataagcataacgtcgtccaaactgaaggagcctattagagaagagaaccccacggctaaggtggaatccgatccatcacccgagcccatgtcgccgtaa

SEQ ID NO: 33030 - protein, 158 aa, DROSOPHILA
MAALVDESNYAYVKQVALDWRELVREKRKSNIFSPTISMQAVDSQQPIGDTRSRTQSMIPAERRESSFYRHRFSQQAKPVEIECQEVGSMEPDRIRVSGDILLYIYQPIFVSNTVMASIQAWSPSEISITSSKLKEPIREENPTAKVESDPSPEPMSP

SEQ ID NO: 33031 - DNA, 2623 bp, DROSOPHILA
cccacagccactggccatgctgcgattcccggaagcacaaagacaagacccaacggcgagaaataccttaacctggattcgggcgaggatcccgacgaggaagacgatcccttggaggaggaggacaacagcaactcgaatagcaactctaagggcagttccggcgacatcgaaaggcacagactgaaggcagagagcagtgggttctaggttatctacccatagttcctgactaaagcatcttccttctttcagctgtgccctacgagctggacggcgaaaccagtgactccgacgggatgcgccactttgtggcccacgatctagaggccaagttgcgcgagcgcgtggcggcttcggcctactcctcggagcacaccacgcccctgagctccatgggtcccattggagccacttccggcaacggtctgctcacgcggcggttcctgcagtcgcgcaacattcccgaagtggacggcagcgtcttgagcgacatcgaactggaggctcagtacttggccagctcggtggacaatctgatggaaaacctgggcaacctgctgcactcaatctcctccataacggccgacaacgtggaggtccatcgcaacgcggtcaacaagctgacggacactttggacgcgaatatcaagtgccagtaccaattgctggccaaggcggaggaaatcaccaagtcgatgaaacccacagagcagctgggtcagcgcatgtaagtgggtcaattcaagacagatccctttagtgtaatggactttctcttccgcagaaggcagatcaagcggctggtggacatgttggacagcaccatgtaaaatagggctacgctatcctgtgatcaaccaatcaaagagatcttgtctttctagtcattccgtaaatacatataatcagtgttataaaatccatatggaaagatacctttcgcttgtttaaatcgtacttattctagcagttcctccaaaaaatccacctccttggctcacagcttctccaccttggccttgatgatccttaggggatccacggggcgatcgttcttgtcggtttccaccatgccgatccgcttgaccacctccatgcccgtgtagaccctgccgaagatcgtgtgcttgccatccagccactgcgtgggcgccagcgtgatgaagaactgggacccgttggtgtccggtccagagttggccatcgagaggatgcccgcgcccgtgtgcctcaagtcgccgtgcagctcgtccgcgaactccgatccgtagatggaggcgcctccgcggccagtgcccgtgggatcgccgccctggatcatgaagtccctgatgatccggtggaacaccacgttgttgtagtagccccttctcgagagttcggcaaagttgcggcaggtgttgggcgcgtgtttccagtacagctccacggtgatttctcccatgctgcgcggggcacaaatgccacaaataatgtgataaacaaatgctcagtcttcagtttcggcgattatcgagcattcaagctccggactcacctcgtttccagggtcacgaagtgcggctgccacgccttgtcgggaatgccaccagcattgttgggatcgcttagggacagcataactatatttgttgttaaattagcgagacttcagtaaaattgttaaaaccggcagagtcagagtgaccagcttaagcgtagtcacttaggccgcctggcaaccctgaactgctgcggtatacttctggtatatatatagtatagtatatagacgcaccttggtattttttagggtttttgtgagcacacgcaagggtatttttcaattagttccatttcaaaattcgacgaaaaaatcgtggaaaatatttagcggacggaatttttcgtcgggctcgcgagaaaagagacagataataagagtgagtgcgtgagcgtgagtgagacaacgcgaaaagttagagaggatcggaatcatggcgagtgtttttttataatcaaatttccacagcactttccacgtatagttgttaatgaagcaaaaagtaagcgaaatatgaaaagaaaagccttttcccttagctgcaagtgtgtgtgtgtgtgtggtagcgtgtttttttttgttgctgtgttgtgtttgctgagcgcaaagaagaggaagcagagctaagagagaagagaaactctcgaaaatgaattgaaaacgatgaactcaaagtagcccactagtatggtgctcgtgtgcgtgtgtgtgctgttgtgtgtgggagagagagggagcgaacacaaagagcgtatcaacattcaattgcatttttaacttgttttcgctctggaatttttgattttctcgcgtttttcgattgctttttgttagcaacaattaatttacagggttcgtatttttctctttctctcctggggggcggtttccacaagggaaaactcgatgtttccattgtttttctcgaatgcgggtgctgttatcgtcctctctctcgctcgttaattaaggatttttgtgtttgaattccctagcttaggcgactgaattcacaatggcaaacaataaacccgcgatcggtttggttttatttaatcagcagttgcggtcaaaccc

SEQ ID NO: 33032 - DNA, 531 bp, DROSOPHILA
atgctgtccctaagcgatcccaacaatgctggtggcattcccgacaaggcgtggcagccgcacttcgtgaccctggaaacgagcatgggagaaatcaccgtggagctgtactggaaacacgcgcccaacacctgccgcaactttgccgaactctcgagaaggggctactacaacaacgtggtgttccaccggatcatcagggacttcatgatccagggcggcgatcccacgggcactggccgcggaggcgcctccatctacggatcggagttcgcggacgagctgcacggcgacttgaggcacacgggcgcgggcatcctctcgatggccaactctggaccggacaccaacgggtcccagttcttcatcacgctggcgcccacgcagtggctggatggcaagcacacgatcttcggcagggtctacacgggcatggaggtggtcaagcggatcggcatggtggaaaccgacaagaacgatcgccccgtggatcccctaaggatcatcaaggccaaggtggagaagctgtga

SEQ ID NO: 33033 - protein, 176 aa, DROSOPHILA
MLSLSDPNNAGGIPDKAWQPHFVTLETSMGEITVELYWKHAPNTCRNFAELSRRGYYNNVVFHRIIRDFMIQGGDPTGTGRGGASIYGSEFADELHGDLRHTGAGILSMANSGPDTNGSQFFITLAPTQWLDGKHTIFGRVYTGMEVVKRIGMVETDKNDRPVDPLRIIKAKVEKL

SEQ ID NO: 33034 - DNA, 7263 bp, DROSOPHILA
tatctttggtgcgattagctgtagagctgtagatcgaatcggagtgaatcgagtcgaatcgaaatgcagtgagtatctgtctatcgatcgatactagatggtaaggccacaatgagaaggccgattgctccgaatcgtgctagtagaagtatacagattgcaatatggttaagtgccaggcgctaattagccatacatatatgtcaattattgcaccacatgcggccataaagtgcttaaagtaacgccacgcacaaaaggggatgggatcgggaatgctcccgatctcgccaaatgtgcgctttatttaaatataaagactagaaattctctcgttttggaacgacttccgtgccggaagcaggaagccgatcaatgccttaatgcgaagtgattaatggggttagtaagtggggtggatatctttggatattcctatgcttcttgtaaaatcataaagctagatgactatgtgtaaagtttgtagcttggctgcggagttcgatcgtctggggctgggatgctatatctttcgctctccgatcgatcggtaatcgtatgtgctataaaaaaatactggttacattggttttttgtcgctgttcttggcaagtctctaagaagtctcttattacaactaagtgaagatcaaacgatcaatcgggaatcgatccaaccttgtctctctatatctactgtgtatgacctcgccttccttggagttttccgagaagagggaactcttctgttcgacgagctgtgcgtgctcctctttgctctggaatcatctactctctaatggtactttagctcttttgcattattatcacatattcgttgactacagtaagaaaatgtcctggattggtggtggctggtgggctgtgaaaggacttggattaagtggcatttcagtaacggtctcctcgaatggccttggggtagtgctctgctttgctctctccggtgtcttttgcgtggtatcctggctggtaagatcctatgccaccatggcgtaattcccggtcagctcgaagggactcgtcttggccgagtgcgtgaagttgttcttgggcgaaaagtcaacgggctgctcctgcacggaggtgggatccgattggcccgtggacgtggcctggccctgaaagtgatacggcatcgccaaaggcagggccagtggcacgtggcgattggggagcaggtcctggtacaggctgggtaccctatgcggcatcactttcggctgaatcacgttgatccgcttgaacttctcatattcctcctgggccgaagttgcgtggctgtaagccgtcacttctggcccagccggaaagccctggaaggccatggccgcctgcctgcgatccttttccttctgcaacagcttgttggccagcgtagacttggctgaatcggaggcagcacactgaaatcaccaccgtaaatcagaaggttattcaagtgaagagatgtcatatcgatttaaggaactcaccactgccgcggcaggtgatccaggagccaatgccgagatggtgccgcttgttacctccgcctgttgcctttttggcgacgagggaggtcggttgccggatgctgctcccgatcccggaacgcctcctcgattcttcatgcacgatgactcctcgtgcttgtacaggtaggacttgagagcgaaggccttgccgcatcgcgcacatgtgtgtggcttggtgttcgagtgggtctggatgtgggcgcgcaggttgctcttgtcggcgaacgccttctcgcagacgccgcacttgaagggcttttcgcctgtgtgggtgcggatgtggccctggaggagccagggccttgagaagcgcttgccgcagaactgacactcgcatccctgattgtgggtgcgcacatgcatcgagtaggcgggcatcgaaacgtacaccttctcgcaataaggacagtgacgcgctttcttatccatgattgatctttaaagaacatagacttagcaatacttcaccagaaaaatgtacaaaactttagctcacctgtgcgtttgtctatgacgtgctaggttggaggatgtggagtatttctttccgcactcgggacagatgtgctcgtcctccagcaacgaagtgctgttgaggatttcgccctgctccccatgatggtggtgcaccgatgagtgcccctggagtcccaggtggtcctccgaggattgacggctggaggtggaactggaactgctgctggcgcaggaattcgagtcggagattgtgcaacgacgcagtttcctgcgatcgaagaccttgtggctgtagtagttggagtcgtcgtccgaggaggcgtacagtggcagtggcttcacctcgtccgtgaccagaggaccaacggacagagtaacctcggccagctgggtgagattgtacaactcctcgggaatgggtgtcgcctgctggtccttcgtcatcgtgttgaagagctggtgaaatgcctgcaaagcatcgggtattttctatgatgaaaacagcatgactatacccgaaatatttcctgctaaatgcgcacgtgatgcgtcattacctagctaacacatatcagccactacattagccactactagtcagtgctgagttgaaaatcttcaccttttccggacgatggtgtaaaagacttatatcaacgatatgctcattaattaaactcacattctcctaattagtggttcattatagcttgagaaagtgcactaaaaatagaccaataatcgaattattcggcataagaaacccccagcggatcgcacatccatggtgcgatcgccgccatctatcatcccacctatcatagatctttccctccttgtgcttacgccataattcgtgtttgtttatttgaaaatgcatcaatttataattaaggacagagtcgagaggccacacactcgtagtctgagatgtgagccaaagtcgtctgcatcatcatcattgccgaataggaattatcgcacatggttgagggttagcagagcccacggggcgtatgattaacgtcattgcataccgcataccgcatgttgcatattgcatattgcatattgcattctgattctgattctggcacttgttggctgttttgcggctcggtggtgccgattttgtgccggtgttcgccatcttcgcctctttgcgtggtcaaataaatttatgtcgaaatgagtgcgcttaatttgtacatgttcttttggcattgattaatctcgctcgtaattggcgcatccgaaagtcaggtgggcttgggtctattatatgttggagttcactgtaccatgcccaccgggatgctcacaaagaagccagtcttgaaatataaatgccttcattttgtaatgttcttcaaaatattattgtatttctttcaaagcggcgccatttatgtatatatgtatatacctctctcccactcaatcgtttgtttatcatgtgaaagttttcgccttaatttttctgcccccaaaagattttctgaataatcgaacccattgagaaatttggaagaatcgatgaaacagtggcgttcttccactcttgaggaggtcatgtgcaatactctgcggtgttttggttttgaaattgctcttgctttcggttttgtttgtttctctaacactctctgtgtttcgcctgaggccagccgcgtgatgtgtgtttctttttcggtatcgaggaaaatgtgggtgaaaattccccctgaatcaacctagctaaacagctgccatccgcccccgccaacgaattcggcaacctgttgcgcccgcttagctgccaattcccatcggcttctcctcggggagcagtacatcaaaatgtttctgcggcaattaagcggaatgatcgctgccaaggtggccggaggtgtgcgaaagtggttttccatggaaggaaataccttcgcgcctcttcccctttttgagtgggtgtgagcgaaagccgccagacgtccataatttgtgtcttggcaatttgcggcccatttatttatgtgccccaccacctgaggccctgttcccaggtggttgccgtatacatttaaatatatgtagctagcacccgaatgtatgccattttccaactaatcgcgtcattttcaatacccgatttccatcgaacacgaaatgctcgagtctctgaagaacaatatgcgtctgagaattcgccggggaaagcagctgacaagtgatcggcggagctcctctatggatcccatagagccacagaaccccactccccctacaccaccaaatgaaatatgtctgtgccatatttccgatgtcagagtcgcttggggcatacgaaatgtcgcatgtttctctgacaggtcgttaattaattattcctcggccccgtgcgattgcagatcggtcggtaatcgcagatgacaggaagaaggtgggtagggatcgacgatgtacatttgcatcggactcgaatggaaaacgcaaggaacttcttaaacgaggagtcagtcgatccgatcgaaggagcagaacagaaatagttgaaatatatatttggagttttccatgactactgtttttggtgtgagtaactcatatatgttataatttacatattttttgagcaacagttttcccacagtgtacttaagcagcttagagtccccccagttggatgactcatttctgctcccccatccgcaacttggtcgttccatgtgcaccgaacaatggaccacggaccgggtgaattattttactctccgcctgccattttccttttcatgccgccgcagatctgcgcaaattgcgtggtctccgccctccggtctcccatctcccatctccgatctccggccgtacagttcgcccgagtagaccgtgtccgtattgctggaccggggaagagttcaaagtcctgttaatgtacacagaggccaagagaatggcgatggccaacagaggtggcttcggtggccttaacatgcgtcttcccctcgctgccaggcgtctataaatacctgatgcctgatcccaagcggcaggggcagggggaaggggcagtgatcccagcatagtttacattttagttcaggctaaatacgagtgcacaataaacaaaaatccagagcgccagcctcaacctctggctgcttcccagtccagagtcaatgccatgcaccatggatagacagcgtgtatgccatacagtaggcacaccacccccacccactgcgcctcagtggatatgtcggatttgggcatcagtttttgtttaccccagatcgcaggccctcatcaatcgttgcctcaactgcagttcccgttgccggcggtttgtttacggacccgcggcataaacatttggacgggaaaggacacaaaggagcgggcttcacctgtaaatcacggcggttaattatccccgaaccgccgcattaatcaggttcatatgtatgcactgtatgatctgttgtttatccgctttatgcgcccaaattggacggaggatctacgcatctaccaccgcgagacaatggccatacccataccaatgcatatagtcatgcggaaagataccaactatactatactcgtacgtcccggtcactatttcccgttcgcagaagctcattgccaatgcaaacattgctcacgtaaatgtcaaaatatcaaaagaaataataatattaatttaacaagtgcggcccgttctgtccgttggttgggtggagtgaaggggggggttttggggggtgtgcaatggggatcggaaaacgccgctcatttgcagtcacgcgaatctgttggcccaatttgccaagcagattttcgatcttgtttcggttcctgggcagatagttatgcacgagcgaggtgtgtgttctattgtgtaatcgaaaggcggtaaaggtgcaaatttgaagagcgaagttcactttccaccaccttccgttcacatttcgccaactcaccccacgcagttcgaatagttgacggaaaacaatccactgccgtcgtcgctccgcctcgaatatagacggatgattcagttgccgatgggaagtcaatgctttatcacacacggagcgcaaattccacgaatctcatcacccgccaagagtccgcgatggcaacgggtgatgggtgatgggtgattggtgatgctgattttggggatcgcactgaatctcgataagtgtcaaacggatttattagtcgcacggacggattgcgcatccgtgaaggcgagcgaacgcagcgagatcccaggaagaactgagcgttcttcgccagaccacttacagtttttacatcttgcgaccgctgccgccgcggcgattcttctgcctccggcggcgtccacctcgcggtctcggtctcccatcctctcctacattttcgtacactgagaaaaatagccttacacttctgtattatgcaccccaactgtattagtattgcagtttctgttatttccatttagctatttccattcggatttatttctggcatgggaccccccgtttcgctccgtgtacatccgcatccacgtcgaggaggtgacgaagctgacgcagagccagcagctgttggtcgctcttgccgaggatcggaacggtacggatcgacatcggcatcggcatcggatcgaacatgacttcgagaacgaaccacgacgcaacagcgacggaacaagtgtgcgcggtttaaaaataacaataatgttttcattgcgctaccctttctctgcgcagccctctctgccatggctttccattgcattttccgaaagggaaaactgtgcccgaggtgacgaggcgctcctgctggcaggaccactgcgcagaattcttctaacgatccgcagtcagtgtcaaaaaccttacacactcgctgaagaacagacagggttgttgtaataggtcttttttttttgtatttgtggtatttgttgtaaactgatgaaattaattacttgagctatataaggatgtagtctcacatgttaagataaatgttttatatattagttgcctacttccccttgtagaatcaatatatagtctgttttaattttgtatgtcgagaagattatcaattcgatagactgatagctgtacctctagtctagctagtgatatttcggtgacctcgactgtgggaatttgccccatgtgtcagtgtgttttcgcctgccccatgctgatttgcctagaaagagagaggcactactctcgcttcgtggttgggcagtt

SEQ ID NO: 33035 - DNA, 1637 bp, DROSOPHILA
cgttcgctcgccttcacggatgcgcaatccgtccgtgcgactaataaatccgtttgacacttatcgagattcagtgcgatccccaaaatcagcatcaccaatcacccatcacccatcacccgttgccatcgcggactcttggcgggtgatgagattcgtggaatttgcgctccgtgtgtgataaagcattgacttcccatcggcaactgaatcatccgtctatattcgaggcggagcgacgacggcagtggattgttttccgtcaactattcgaactgcgtggggcatttcaccagctcttcaacacgatgacgaaggaccagcaggcgacacccattcccgaggagttgtacaatctcacccagctggccgaggttactctgtccgttggtcctctggtcacggacgaggtgaagccactgccactgtacgcctcctcggacgacgactccaactactacagccacaaggtcttcgatcgcaggaaactgcgtcgttgcacaatctccgactcgaattcctgcgccagcagcagttccagttccacctccagccgtcaatcctcggaggaccacctgggactccaggggcactcatcggtgcaccaccatcatggggagcagggcgaaatcctcaacagcacttcgttgctggaggacgagcacatctgtcccgagtgcggaaagaaatactccacatcctccaacctagcacgtcatagacaaacgcacagatcaatcatggataagaaagcgcgtcactgtccttattgcgagaaggtgtacgtttcgatgcccgcctactcgatgcatgtgcgcacccacaatcagggatgcgagtgtcagttctgcggcaagcgcttctcaaggccctggctcctccagggccacatccgcacccacacaggcgaaaagcccttcaagtgcggcgtctgcgagaaggcgttcgccgacaagagcaacctgcgcgcccacatccagacccactcgaacaccaagccacacacatgtgcgcgatgcggcaaggccttcgctctcaagtcctacctgtacaagcacgaggagtcatcgtgcatgaagaatcgaggaggcgttccgggatcgggagcagcatccggcaaccgacctccctcgtcgccaaaaaggcaacaggcggaggtaacaagcggcaccatctcggcattggctcctggatcacctgccgcggcagtgtgtgctgcctccgattcagccaagtctacgctggccaacaagctgttgcagaaggaaaaggatcgcaggcaggcggccatggccttccagggctttccggctgggccagaagtgacggcttacagccacgcaacttcggcccaggaggaatatgagaagttcaagcggatcaacgtgattcagccgaaagtgatgccgcatagggtacccagcctgtaccaggacctgctccccaatcgccacgtgccactggccctgcctttggcgatgccgtatcactttcagggccaggccacgtccacgggccaatcggatcccacctccgtgcaggagcagcccgttgacttttcgcccaagaacaacttcacgcactcggccaagacgagtcccttcgagctgaccgggaattacgccatggtggcatag

SEQ ID NO: 33036 - protein, 442 aa, DROSOPHILA
MTKDQQATPIPEELYNLTQLAEVTLSVGPLVTDEVKPLPLYASSDDDSNYYSHKVFDRRKLRRCTISDSNSCASSSSSSTSSRQSSEDHLGLQGHSSVHHHHGEQGEILNSTSLLEDEHICPECGKKYSTSSNLARHRQTHRSIMDKKARHCPYCEKVYVSMPAYSMHVRTHNQGCECQFCGKRFSRPWLLQGHIRTHTGEKPFKCGVCEKAFADKSNLRAHIQTHSNTKPHTCARCGKAFALKSYLYKHEESSCMKNRGGVPGSGAASGNRPPSSPKRQQAEVTSGTISALAPGSPAAAVCAASDSAKSTLANKLLQKEKDRRQAAMAFQGFPAGPEVTAYSHATSAQEEYEKFKRINVIQPKVMPHRVPSLYQDLLPNRHVPLALPLAMPYHFQGQATSTGQSDPTSVQEQPVDFSPKNNFTHSAKTSPFELTGNYAMVA

SEQ ID NO: 33037 - DNA, 3417 bp, DROSOPHILA
gcagcagctgccgcagcaagtgggaccgcagggcccagtgggtcccggcggctacccgcagatgggccccaatcccggtggcccgcagtgatgaaggcgcaagcgccgcgcctcctcgcagcagccgtgagctgaaggactgtgagctggcaacccggaacggcgaccgattatttataaacgagtttattggataagagtacacagaacaccctctactctggggtgagtcgatttggaatctcaaaaatcgtagcaaaaaaaagtaaaccatgatcagttttgaagtttgccaaaactgctcatagttcgctttctgtccctataattttgtagattgttctaataccaagaaatcgatccactccacgatacactatttagttaatgtttgtatttgtatttgtattcggcaaatccagaagtaactggaattgccaaataatattttaagctttctgggtaccatggaaagtctgctttggtagtccttaagattccatttcaccaatattgaggtgttcctgttgaccaaggaccaaacatatttcgcatgcgtaagacagcagccatctgacccaagaaaagaaaagaaaagcacatctcatttggggatcagatgctatatacattttattgcgctgtactccctgaaatattgggcatgaaaacaaattacacatccaagattataaattgttaactaaacagtgcggctagtgcggctatgtaataaaaagattatcgattatctataaatgtaggtgtgagtcatacttctgtgttccttttgctaatttgtttctatcacatagttcgattgcagatgcgccagagatgctgccatgcggactccgaaggagcagatggcagcggagatctggcaaaatgctttgtgactattgcaccgaggttagtttgtgttgtcgtctacctaataatctatctactcccgtcggtttttggcttggttgctggtcgcgcggtgaatagctcccgttcactgctgattcgcaatctgagtgttgtccatctgggtggtcagctcggatatgccctcctcctcctcagagatgaggtccacccagtagcggagcttcttgctgcgcaggtagctggcggagttgtcgaaaaccaccgtgtctaaggatgattttcacatgtcattaatcgaggtaacaaaaacgaagcttattttactcacaagtggtgttcggtcgtgtagagatgtaaccaatctcgtccatctcgttggagtacacggttcccaggggcacctcgctgcgcttctcgcccgtcttgtcgtccacgctgtagatgccgaatttgatgtcgtagtcaaaggtgcggaactcccaggagaggatcttctgctcctcaacgttgaccttaaagtgcagcttcaacttgtcgcccttgggaacctgggcctccacaaagtctcgatcgctctgctggctactctgatcaatgtaaagctcctccggcagcttgcctccccagaccatcagtgccttgcactggggatctccgttcctgtccaccatctcgccgccccaggccttcggaaatgcctttcggttcacatgggagaagagttgctcctgccagcggtccactccggatttgtagatcacgatcttgctggtggtgttctcgtccaggaatttcttaacaatgttgaacgccaccgagaagagcttgggtgcgttgatgatgtagcacatcttgaggagctccgggaagttggcctcgtattgcttcaccgtagagatcacacattcggcagccggtcgccaggcgtactgcttcaggttcacatcctgcatgtcgaaaaatacaaccagctggcgggctcgccatccgtgcttttgactctgatcgtaggcgatcttcatgaagcgctcgagcagcaggaccaggtacttttggaactcaaaccgcgtgacgcagtgcatcatgccccacatgtcgaagttggcaaaggggcagaccagcactgaaaggagaattggagttgtttagtttggtggctttgtttgtgcagagcagtcgcaaccaacccggtgatccttcgttgtcgtagcccatgaggccgtatggcagatactcctgcaatgccttcggtggatcccacttctcgatgttgtccacattccacatggcgcgtgttttcaaactctgcaaggtgataataaagtctaatctgttatagccattcatagtaatgttcttttacttacagctctcagcattttctccgctgcctccagattccattttcgagctgttttagagcagaaggaaataaagttaatgcagcctgtcttctgcttaattatattgagtagtaactcacctcttagccagcgcaccaagaagtaatcgtcgtgggttccaaccaacgcatcatccatttgcttgcgaaactgtaagtacaataaatgtgttattatcaattgcagataatattttacaattttgtatatgaatcattatacttgagcacaatattcatgattcatatatttgattaattttttaagcttcaaatatatcgtaaagaagctttcacttaaaaaaaattgattttgccctctatcatgtgcagagatgtagcgatctggttcaattcaatttaaaaatctgttattttcaatctgatatgtaatccaatttgtttaaatgatttatttactgaaggccgaggacagcttgacagcatttttgaagagcagagcgggtaaatttcctatctccaaacgataacgtttattgggttcggtagactgcatattggcctttgttgttgccttaattgctgttaatttgtattggccttgtcccgactgccaaattcgggtgttgttaacgaaagctgattcgcacagaggctgatagcaagagttcatttaatcggttgcagttgctttatcagccaacaacacccttgatgccttttactaacttatttgtcgggcaaacatcacgtacttcaatttgcattcgcattcgatcaagtgcatatttagcaccatttcaatcatttaattgactcgcgtctaggttgtttgccaactgctgagtcactcggctagggccaaaaccacttggaattcaataacgaggccgtctctccgctaaccgcttcttttatttagttttttccgttttcgcttttcgcagctcggctgcaagcttggccaaagaccaagctgtggctaatacccgactttggatgtcattagcgccgagttctgttggcttttggctgtgttacttcctcgtttcaacggccgtaaaactgggtttttggccacttgctttgttcttccacttcttggcctgactttgaatgcgtttttgaggcagacaaaaaggttaatacccattgagccactcgaaattgagtctata

SEQ ID NO: 33038 - DNA, 1158 bp, DROSOPHILA
atggatgatgcgttggttggaacccacgacgattacttcttggtgcgctggctaagagctcgaaaatggaatctggaggcagcggagaaaatgctgagagctagtttgaaaacacgcgccatgtggaatgtggacaacatcgagaagtgggatccaccgaaggcattgcaggagtatctgccatacggcctcatgggctacgacaacgaaggatcaccggtgctggtctgcccctttgccaacttcgacatgtggggcatgatgcactgcgtcacgcggtttgagttccaaaagtacctggtcctgctgctcgagcgcttcatgaagatcgcctacgatcagagtcaaaagcacggatggcgagcccgccagctggttgtatttttcgacatgcaggatgtgaacctgaagcagtacgcctggcgaccggctgccgaatgtgtgatctctacggtgaagcaatacgaggccaacttcccggagctcctcaagatgtgctacatcatcaacgcacccaagctcttctcggtggcgttcaacattgttaagaaattcctggacgagaacaccaccagcaagatcgtgatctacaaatccggagtggaccgctggcaggagcaactcttctcccatgtgaaccgaaaggcatttccgaaggcctggggcggcgagatggtggacaggaacggagatccccagtgcaaggcactgatggtctggggaggcaagctgccggaggagctttacattgatcagagtagccagcagagcgatcgagactttgtggaggcccaggttcccaagggcgacaagttgaagctgcactttaaggtcaacgttgaggagcagaagatcctctcctgggagttccgcacctttgactacgacatcaaattcggcatctacagcgtggacgacaagacgggcgagaagcgcagcgaggtgcccctgggaaccgtgtactccaacgagatggacgagattggttacatctctacacgaccgaacaccacttacacggtggttttcgacaactccgccagctacctgcgcagcaagaagctccgctactgggtggacctcatctctgaggaggaggagggcatatccgagctgaccacccagatggacaacactcagattgcgaatcagcagtga

SEQ ID NO: 33039 - protein, 385 aa, DROSOPHILA
MDDALVGTHDDYFLVRWLRARKWNLEAAEKMLRASLKTRAMWNVDNIEKWDPPKALQEYLPYGLMGYDNEGSPVLVCPFANFDMWGMMHCVTRFEFQKYLVLLLERFMKIAYDQSQKHGWRARQLVVFFDMQDVNLKQYAWRPAAECVISTVKQYEANFPELLKMCYIINAPKLFSVAFNIVKKFLDENTTSKIVIYKSGVDRWQEQLFSHVNRKAFPKAWGGEMVDRNGDPQCKALMVWGGKLPEELYIDQSSQQSDRDFVEAQVPKGDKLKLHFKVNVEEQKILSWEFRTFDYDIKFGIYSVDDKTGEKRSEVPLGTVYSNEMDEIGYISTRPNTTYTVVFDNSASYLRSKKLRYWVDLISEEEEGISELTTQMDNTQIANQQ

SEQ ID NO: 33040 - DNA, 3017 bp, DROSOPHILA
ctgtagtctgtggagaccctgctccgagcaccacttatgtggaggtcacgcccttgcgggccaccagcatgttgagtatcgggtttttccggatgtagctcacggcctttttgtgggtgaccatggtgaagtcgtagccgttgcactgcaggatcttgtcgtggatccgcagacctgctcgggcggcgggactgccctcgtgcacctcggtcacatagatgccctattttcaaaggggaaaacgtaacattgtaacattgaaactgctcttaagataccgaactaaaactaaattccccgactttcaaggagagctataattattagctttaagattgaagctctcttttatgcccggaattaggttctagtgtttcccaagtttctcacataatccgtgtatccctgagggcttttcttgtagtcctggtcgattccgccgccgatcttgaagccgcacttgaggatctcgcgcccctcctggtcgtagtccttctccttgtgcagcgtgatgggaatctgggaattgtgagtcacatttcatcaatcactcgaatttgaaagtggcttgtcttttttgctccagcgacccaatttcacctatacacacacaggcgactgtgcgtgtgagccaggtttagttcgttcgcaacttacgctcaagcactccatcgccgtgccggcctggtgctggaatgccattttcgccatgtctaccgatgctttgactaactttaatttgctagattagctaagattccgctggtaaattcgtcttaagattgtcgcccacaacaaactctgcttcttcctcgcaatcatttatcgatggcgaaaaatcgataggttgcagcaataatgcgattgttgccagcgactgccgctgactttaaatatatacttttcatataaaataaaaacatgaaggtctttacgattgctgtttggcaatgtttcttagttttatttatactatattatacatctagagtccctatgcctatgagcgccgcatggccagcatggtgttgatctcccagatgatgatgcgtgtccgatcgatgatctcgcgtagctgcctgttcttcagcttgacggtctctatgagttcatggttctcctgcaggactttccggtactcatcgcacagcgagggctcgattctcggttccggctcatcgcggtagggaatcagactctcggcgctcatgtaatccattccggcgtcgttgcacttctcgtagatgatgcgcaccctcttgaagagcagccggatggtgcggaagtactcctgcaccttcttctcggagctgttttccctgtgcgaggtgggctggatgcccttgagggaggcgaagacctcctggaagcgcgaggcgatatcctgcaccgtttcctgaccgagacgggacagctgcacaatgttaatctccttgtgaggattttgctgcgagatagccagcatattgttgctgcccccggctccaccgggtggaattcctgcgaccggattgagttgctgttgctgttggggaatgttctgctggggcatgttttgttggggctgctgttgctgctgctgtggaaccactccccctccgcccattcccacaccaccgcccattcccactccgacgcccactccttgttggggcaccatcatttgctgctgcatcatctgctgctgctgctgttgctgcatctggtgctgcggagacatgccgggcatcaggccgccaggacctccaggtccttggggattcatctgcatgctacccgggccgcccatcatgcccatttgttgttgctgctgttgatgttgaggcgacatgtgcatttgctgcatattgccgtgctgcatgccaaatccacccatcggcatcatgttggggcccccgcctcctccgccgccgctcgatggtccctgattaccctggttttgaccgtatttccacattttgcaacgttcttataaaataaacaaaatatcacgcagaacgataaactttggcaaatgacactgttgtcgataacataaaacaaaacggatagtgttagataacgctgaaactgtatgctcgcaaacagctgtgaagtcgcgggttttaaattaccaatcctaaatgatagatctagatctagatctagattatcttcactagataaatttgagtgtttttactaagtttttatttggtgattactaaaatttaaattcttagtcaaatccaaaatggtaataatagccccctgcaaaactcgttaggaatgcgtccatgcgaaaagagagttgccacatgcgcgcaaaaataatgaacataggtgtgtcagctgagcggtattggtggaattcaattttggctttttcatgcttttaaacgattaaaaatgacccgcgatgaggataatggttttagtgaatgggtaagatgtagataaaatgctaaaaacattgtacataaaccaaacctgctcttttcagggcggctacttcgaagccaagaaatctaaacttgaggagcagttcgctgccgccagcgatccatttcgcaagtcggacctcttccaaggaatttctatatttgtgaacggccggactgacccttcggcggatgaactgaagcgtattatgatggtgcacggcgggacctttcaccactacgaaaggagccacacgacgtacataatagcctccgttctgcccgatgtgaaggtcaggaacatgaatctcagcaagttcatcagcgccaagtgggtggtggattgtctggagaaaaagaagatagtagactacaaaccctatctgctgtacacgaaccagaagacatcgcagcccatgctcatctttgggaaacccaaagacaacggcgcaaatgagagcaaatcggatgtggagccgccgaaagataaagcggaagtggaagtagactctacaaaagatgaaacgcaaatggagttgggtggcattctcaagaatttgcagcaggctgtggccacttcgccggaaaaggaggcca

SEQ ID NO: 33041 - DNA, 1017 bp, DROSOPHILA
catttgccaaagtttatcgttctgcgtgatattttgtttattttataagaacgttgcaaaatgtggaaatacggtcaaaaccagggtaatcagggaccatcgagcggcggcggaggaggcgggggccccaacatgatgccgatgggtggatttggcatgcagcacggcaatatgcagcaaatgcacatgtcgcctcaacatcaacagcagcaacaacaaatgggcatgatgggcggcccgggtagcatgcagatgaatccccaaggacctggaggtcctggcggcctgatgcccggcatgtctccgcagcaccagatgcagcaacagcagcagcagcagatgatgcagcagcaaatgatggtgccccaacaaggagtgggcgtcggagtgggaatgggcggtggtgtgggaatgggcggagggggagtggttccacagcagcagcaacagcagccccaacaaaacatgccccagcagaacattccccaacagcaacagcaactcaatccggtcgcaggaattccacccggtggagccgggggcagcaacaatatgctggctatctcgcagcaaaatcctcacaaggagattaacattgtgcagctgtcccgtctcggtcaggaaacggtgcaggatatcgcctcgcgcttccaggaggtcttcgcctccctcaagggcatccagcccacctcgcacagggaaaacagctccgagaagaaggtgcaggagtacttccgcaccatccggctgctcttcaagagggtgcgcatcatctacgagaagtgcaacgacgccggaatggattacatgagcgccgagagtctgattccctaccgcgatgagccggaaccgagaatcgagccctcgctgtgcgatgagtaccggaaagtcctgcaggagaaccatgaactcatagagaccgtcaagctgaagaacaggcagctacgcgagatcatcgatcggacacgcatcatcatctgggagatcaacaccatgctggccatgcggcgctcatag

SEQ ID NO: 33042 - protein, 318 aa, DROSOPHILA
MWKYGQNQGNQGPSSGGGGGGGPNMMPMGGFGMQHGNMQQMHMSPQHQQQQQQMGMMGGPGSMQMNPQGPGGPGGLMPGMSPQHQMQQQQQQQMMQQQMMVPQQGVGVGVGMGGGVGMGGGGVVPQQQQQQPQQNMPQQNIPQQQQQLNPVAGIPPGGAGGSNNMLAISQQNPHKEINIVQLSRLGQETVQDIASRFQEVFASLKGIQPTSHRENSSEKKVQEYFRTIRLLFKRVRIIYEKCNDAGMDYMSAESLIPYRDEPEPRIEPSLCDEYRKVLQENHELIETVKLKNRQLREIIDRTRIIIWEINTMLAMRRS

SEQ ID NO: 33043 - DNA, 3587 bp, DROSOPHILA
cactctgtacccttcggttaacctgttgcccgtccgttcaatcctttccgagttgtccaagaggcgttggcgttgatctgtacttatggacacatcctcatagctgtcacccaagtccagagtggtgaatgtgttggcttgggagcgctgtttgtccttggtcaacctgtactccgcctgcagccgtttcagttctgcctgggccacctgcagctttccgttgaagctgctccgcagtccaggatttagctccctcacctccagacccatctgctccagcaattcctgagcctcgggcaaactggagtcgatcttgctgcacaaatcatggcgctcgcctggagtaaatggacaaatggtaatcaccataatgtacaatccatggacaatcatcccactcactgttgttgttttgctgctgcagccgtccaatatgggccgttatttctgctattaacgtggcgtattgctgttcgtattgctccagaagcgacatttgtgcggtttttattctaccttattcagttgtttatggtatttgttctgttttagttcgcgaaaattacagatttatcgaagaaaagaagtaaacattgtccaagtgtggccgagtcatgaggtgaacagtaatacagcaatctataaatacttttaagtcgtggtcactctgatttcgagtcagcgttgccatactcatgtaaaaaacactgccaacttcaaggactacaatattctcgtaagaactcagataaaaccaacttccgttttaaatacgtaaataaaacacaaacatatctattattttataaattccattttattgtacttagagtaattaataaattaattaattaggttcagctttatgcgagtggagattctttgttaacctaagcaactgttttggcggtagtacgatttaataatactacatgatacatatgtacactgttcatcacatttatgttttgtgctgtcctggtccgcgattagaaaactcttaaccctcgaccagtgtggccttgtccccttttcggagcaccagttccaattgggacagcaagccaatagcccgaaagttctccttgaagagcacgaagtcctccagcggttttaggtactccaaggcctggtggtagctttccaactccttcagcatgcataaagccttcttatcctcggggtctggggatgtgtgtccattggtttggctgccggaggagctggatccattggggatcttttttggcgaggcgggagcagaggcgggtttggtggacgcagctcgagctggtgcaggtgagtcctttcccttggaagaaagggcaggcgtggatttgccacttgttccgcctcccttgggggcgttctccttgctgctggcactgtctcttcccccgctattattgttgttctgctcgttgggactggaacttcgactgtgcttgctggttaaggttgattctgctagcggatatggtggtgagttcaccgctgagttaatctcttgcacttcgtcatcatcgggtgactccattttgggtctcttggccaactgaacgggctggaagggactggcccgctgcggtggaacatttggcggcaattggggctgaaagggttccctttgaggtggcatagtgggtggaaactgttgcatctgctgctgctgctggagttgctgttgcatttgctgttgatgccgctcgaaataaaagtcgttgaagctggcgaacccggggtgtggagtaggatgtccgggatgtcctggaaacggtggccatgggtggcccatttgatgctgctgctgttgcatatgttgctgctggagggcaaagtgctgctgttgctgctgctgttgctcttgatagctctgctcctttacatccatactgtcatcatcttcttcgtattctccgtactgttgcatgtaggtcatgtactgctcgggcatctcctccagtttggccactctttcagcgctcgcgggcggaaagagatgggctaggtcctgtacgatgtccgggatccacagggaggatcctagtggcttcaactggttgctggctagtttttgggcaaagccttgaagatgagtctctcggaaacggtttaaccagcgattgtctgctataaaggatgtgctccctatgacttgtctggcattctccgccttgtccttgatcattccgtgggtaatgctacctcgcagctggggattgatattggcccttactagccattcgtataccactgcattgatgtaggcgcactttcggctcctctcgatctcctccaccatggcctgctgctcaacggcctccaggttggagggaacttccagacgcagggtgggcagcgcattcgactgcagtcgcctgccacccaagacactggggtcaaagtgcagggcacataccactggctttttgaagggcacaattcgtcttagggaggcgtggcacgcctccttccacagcttgtggaaggggttctccggccggggaaacgcaaagaactgcatactcgggtgctgacgcgaattggacaagcatccgatgatgcagcaccgccggatggtcggcatctcgacctgcggatgaggatgaaattgctgttggccccgaatcttaaatgctggagtgctggcgttgctcacgcttcgccaggtcacgaaatgtaaatgaaattaaaacaaatccactggaatctgcaagagagtgtttgcacacattattaagctggctatttaacttcaatttaagtatctgcgatgttctgtgttccttcatggtcgcgttctcaatttaccgccaaagttcaggaggtctggcaagttctgggctaggacatggagtctggcatcctttaacccttttccttggcgcactttgcaacaagtgtctgcatttgaactatcttagtgcaattgagcccacgatttccatattgcaatgcaatcggagttttatatttacatatttcagtttcaaacgtatacgagtttggcaaataacaataaattaatgtgctgatctccatgattaaaacgagtaaattacccgattgagatcgtgttttcccagaacacagatatttacaacaaaccaatgagttagcaactctagaaggacaactttacaaatgaaaaatgaattcgacgaacaagctagtgtctatctcttgggacttacagcagatgacatgagtcatcgaaataatggcaagccaatacatatttttataaaagtatatcacagtatataggaacaacctcgaaacctctaaagagcatatgccaatagcacgaccactctagccattttacagatacagagacaaaaccaaaagatacatgcgtacgccttcggaaatcaatatagcccccggaaaaaaaaacagaaccaaagccataccgtcagaaaaccatatcggagcaaacacacacccacttatgacttgtattttgtatcgctcagatacacaccgctggagattcacagagatgcctgcctaattcgaacgactttggtcgcgccccttttcgtacgcccaaagagttgcgaggtagatatagactggtgctg

SEQ ID NO: 33044 - DNA, 1587 bp, DROSOPHILA
atgccgaccatccggcggtgctgcatcatcggatgcttgtccaattcgcgtcagcacccgagtatgcagttctttgcgtttccccggccggagaaccccttccacaagctgtggaaggaggcgtgccacgcctccctaagacgaattgtgcccttcaaaaagccagtggtatgtgccctgcactttgaccccagtgtcttgggtggcaggcgactgcagtcgaatgcgctgcccaccctgcgtctggaagttccctccaacctggaggccgttgagcagcaggccatggtggaggagatcgagaggagccgaaagtgcgcctacatcaatgcagtggtatacgaatggctagtaagggccaatatcaatccccagctgcgaggtagcattacccacggaatgatcaaggacaaggcggagaatgccagacaagtcatagggagcacatcctttatagcagacaatcgctggttaaaccgtttccgagagactcatcttcaaggctttgcccaaaaactagccagcaaccagttgaagccactaggatcctccctgtggatcccggacatcgtacaggacctagcccatctctttccgcccgcgagcgctgaaagagtggccaaactggaggagatgcccgagcagtacatgacctacatgcaacagtacggagaatacgaagaagatgatgacagtatggatgtaaaggagcagagctatcaagagcaacagcagcagcaacagcagcactttgccctccagcagcaacatatgcaacagcagcagcatcaaatgggccacccatggccaccgtttccaggacatcccggacatcctactccacaccccgggttcgccagcttcaacgacttttatttcgagcggcatcaacagcaaatgcaacagcaactccagcagcagcagcagatgcaacagtttccacccactatgccacctcaaagggaaccctttcagccccaattgccgccaaatgttccaccgcagcgggccagtcccttccagcccgttcagttggccaagagacccaaaatggagtcacccgatgatgacgaagtgcaagagattaactcagcggtgaactcaccaccatatccgctagcagaatcaaccttaaccagcaagcacagtcgaagttccagtcccaacgagcagaacaacaataatagcgggggaagagacagtgccagcagcaaggagaacgcccccaagggaggcggaacaagtggcaaatccacgcctgccctttcttccaagggaaaggactcacctgcaccagctcgagctgcgtccaccaaacccgcctctgctcccgcctcgccaaaaaagatccccaatggatccagctcctccggcagccaaaccaatggacacacatccccagaccccgaggataagaaggctttatgcatgctgaaggagttggaaagctaccaccaggccttggagtacctaaaaccgctggaggacttcgtgctcttcaaggagaactttcgggctattggcttgctgtcccaattggaactggtgctccgaaaaggggacaaggccacactggtcgagggttaa

SEQ ID NO: 33045 - protein, 528 aa, DROSOPHILA
MPTIRRCCIIGCLSNSRQHPSMQFFAFPRPENPFHKLWKEACHASLRRIVPFKKPVVCALHFDPSVLGGRRLQSNALPTLRLEVPSNLEAVEQQAMVEEIERSRKCAYINAVVYEWLVRANINPQLRGSITHGMIKDKAENARQVIGSTSFIADNRWLNRFRETHLQGFAQKLASNQLKPLGSSLWIPDIVQDLAHLFPPASAERVAKLEEMPEQYMTYMQQYGEYEEDDDSMDVKEQSYQEQQQQQQQHFALQQQHMQQQQHQMGHPWPPFPGHPGHPTPHPGFASFNDFYFERHQQQMQQQLQQQQQMQQFPPTMPPQREPFQPQLPPNVPPQRASPFQPVQLAKRPKMESPDDDEVQEINSAVNSPPYPLAESTLTSKHSRSSSPNEQNNNNSGGRDSASSKENAPKGGGTSGKSTPALSSKGKDSPAPARAASTKPASAPASPKKIPNGSSSSGSQTNGHTSPDPEDKKALCMLKELESYHQALEYLKPLEDFVLFKENFRAIGLLSQLELVLRKGDKATLVEG

SEQ ID NO: 33046 - DNA, 3767 bp, DROSOPHILA
tatggcgaaactttgccgcaaccggaacggatggcgatgtagcaatggcgatgtggcgtatccaacgctccatagacccggttgtgtaatcgtagcgccctcaatcgacactgcgacaaaagtttaatacactttctacatatttccgatatgtcttgacttagcaacttcataacttataatgtagctaacaggtatatatatttatcttaaatactatataacaaaaccaacaagcgattacgtttctttcagtgcacttacatatatgctctgcaatctgtaggtgcgagtgtgattgtgagtgtccaccttctggcaccgcaaggtccctcaccgggatgctgcgctgctggcatcctcttcccccatatatcctcagcccttcggacttcgccctccgcagcccacctccgggctgtactcccatctagaattgatgtagcacctacggtgcgccctctccatctgcccacttccggagcttctgttccacgcacgttcaacttcaacttcgttgcaggtcattcggactcgttcagtctcatcccacatcccaccatcgcgtaaagttttagaggacgaacgtaaagttttagcgctgattgttagtctcgctggggcgagtggaaagttgccttatagcttggaaacctggtcaaagacccagatagccgtgccatgagaacagatatatgggtgcatcaccttgacaatgtcaatctttgttactattcaagtgaacggtgggtaaacgtattcgttttgaaacatgttattcaagaacaattacataatatttatattcattttatatgcgtgtttgaagcttgtatttgatttacaaatagttagtttacgcttgcttgtttgttttaaattaaatacacattttcagtgaaataacgcagttttcataaagcctatcttataccctgcagagggtactcaaagatctaaacatacttataacctaaggcacatgtttttggtttggtacttattctaaggatttgtccatttcctcactctttttcgcagcggactcaaagatcttctccagctgcgtgagcaggccaatggctcgatagttctcctccattaggacgaattcctccaggggcttcagtagacgcagtgcgtccttgtagctttctacgcagcgcggcagatgtgcctcatcgctggtctctgaataatgaccgggactattggctggaagtagttccgtatcctcaggcaatgactcattgagcgattgaatcttctgaatcttcaagccacatggtattgggccgccgttctcgtctgattttcgtttagtagccctttctggcaaatcctcattatcattatgctcatcgtcattatcctcatcatcctttatttctatgagctcaggtggcacttcaatggccacgcaatcatcgtcttcttcgtgctcaaattcttcgggttttggttccacctgtgggcattggtccacctctggcttgtcgctctggctcagttcttcctgcgacttcttgtggtccagcgtgatcttatgttcattccggccgcaataactaactatatctcttaggtccagggaaagcggcaagcggcggttcgtcacctgaactcccaccgtgaaattaaagttatagcgactcttaaagtgcttcaaccacactttgtcgggaaagaaggagtcgattttgaggatgtcccttaaactaatggccacaaagcgcaaattgtctaggtcaagacgaccctggcgaaccaactgtgatcgctggatgtactcataaacgcatttctccaggaacgctaactttcgctttctacgcaggtgcacttcatccgaggtggcttgattttggctagaggtggtgaccaatgtctttgtacgataaagaggtcgatcactgctagtgagcgcaggttccggcgatctaggcgctaagctacaagacatcgaggtgtgtcgtccacagtacgacataatgtccctcaagtccatagatcgtggtggtcggcggactatcgtgatctgacgattcgacagtgttatattataggcggccttgaagtgattgatccacggtttgttcggcacaaaaccatcgagttgcatgagatcccggaactcgatcgcacggttgcggatcatctcctcgttcacatcgctgtggaggtaaaactgggccctctggatgtactcgtacaggcagtggcccagaaagttcagcttgcgccggcgcagctcggcatccttattggccggctggctgagccgattggtggccttgtggaactccaggatggcttcccgattggagactatgctcttgatttgctcccagctgcaattaaagttcctcgcaatcttactgtacatgggcacaatgtcgtactgtcggatggcagccacacgctcctccaaagtcagcacgttccgtatgcgatgcgatccattcgagtttttgtgggtgtcatcattctgaaattgaatcatggtttatttctttataaaatccgatttctaggcttagttacatgtatgttattgatacagaactcaaattatctgtatgcgtgtatatcatgaatgccttatacatatttatgtatgtatatttacaaaacatgccctcttcttattcgcaaatgggtctcgcatattttagctcagagataacaaatttcaaaagattttactaaaacgaagcattgcactctcacttactcactacgaaagtatacttacgtcagagtacatttccactcccgctctcacactttcaggttctccactctctcttagcgtgctcgcactcccagtctggccccccctcctcacgtgaccaatataattctgttcctttaacaatgaaattaaaacgaaatagttattatacagagaagagctagaaatcttgtttacatacctcagtcggaaagcttagagcataaagtacactttgttgaaaatatacagcagttttttaggcacattaaacagaaaatatgtgcggtcgcacgtgtttaaagttgccagagcgagtgcaactcaatgactgagcatgcggtccgaacattgcagagatctggactctcctccgtttggcggagcggcaaaaaccgtatctttgcgagagacattccgctctttctctcgcgatctaaaccgacttcccacgttccgattccgatcgtggtggtattcgttcgcggtatgggatttattttcggatcgagagtaaatattctctcgctaaagcagctataactggtttaacatgccgaaaaacacaaatcgcattaccacctaatctgagctgaaactggtttgatatgtacacatacatatatataaagctatttttgctcaaattatatctagtgcttaatttaacgtttaccacatttaagtgggaccctgttggttattccactctataaactcttttcgcatattacaattatttacacattttgggtcttgactctcaaaggcaggacacacgaacattttaattgtagattacatataaaaactaaactttatttttgtggcgtcaataagatcatagatcgaaatcctcgttctgaggcggatttaaaactgatttttcaacttcagtaagtagtccaatggcccgatagttatcatttaacatggcgtactcctgtaagaccttcacgtaggccaaggccatatttttacagtcgatggatttcagtgaattttgtaaggaagcgactactttggggtccac

SEQ ID NO: 33047 - DNA, 1500 bp, DROSOPHILA
atgtactctgacaatgatgacacccacaaaaactcgaatggatcgcatcgcatacggaacgtgctgactttggaggagcgtgtggctgccatccgacagtacgacattgtgcccatgtacagtaagattgcgaggaactttaattgcagctgggagcaaatcaagagcatagtctccaatcgggaagccatcctggagttccacaaggccaccaatcggctcagccagccggccaataaggatgccgagctgcgccggcgcaagctgaactttctgggccactgcctgtacgagtacatccagagggcccagttttacctccacagcgatgtgaacgaggagatgatccgcaaccgtgcgatcgagttccgggatctcatgcaactcgatggttttgtgccgaacaaaccgtggatcaatcacttcaaggccgcctataatataacactgtcgaatcgtcagatcacgatagtccgccgaccaccacgatctatggacttgagggacattatgtcgtactgtggacgacacacctcgatgtcttgtagcttagcgcctagatcgccggaacctgcgctcactagcagtgatcgacctctttatcgtacaaagacattggtcaccacctctagccaaaatcaagccacctcggatgaagtgcacctgcgtagaaagcgaaagttagcgttcctggagaaatgcgtttatgagtacatccagcgatcacagttggttcgccagggtcgtcttgacctagacaatttgcgctttgtggccattagtttaagggacatcctcaaaatcgactccttctttcccgacaaagtgtggttgaagcactttaagagtcgctataactttaatttcacggtgggagttcaggtgacgaaccgccgcttgccgctttccctggacctaagagatatagttagttattgcggccggaatgaacataagatcacgctggaccacaagaagtcgcaggaagaactgagccagagcgacaagccagaggtggaccaatgcccacaggtggaaccaaaacccgaagaatttgagcacgaagaagacgatgattgcgtggccattgaagtgccacctgagctcatagaaataaaggatgatgaggataatgacgatgagcataatgataatgaggatttgccagaaagggctactaaacgaaaatcagacgagaacggcggcccaataccatgtggcttgaagattcagaagattcaatcgctcaatgagtcattgcctgaggatacggaactacttccagccaatagtcccggtcattattcagagaccagcgatgaggcacatctgccgcgctgcgtagaaagctacaaggacgcactgcgtctactgaagcccctggaggaattcgtcctaatggaggagaactatcgagccattggcctgctcacgcagctggagaagatctttgagtccgctgcgaaaaagagtgaggaaatggacaaatccttagaataa

SEQ ID NO: 33048 - protein, 499 aa, DROSOPHILA
MYSDNDDTHKNSNGSHRIRNVLTLEERVAAIRQYDIVPMYSKIARNFNCSWEQIKSIVSNREAILEFHKATNRLSQPANKDAELRRRKLNFLGHCLYEYIQRAQFYLHSDVNEEMIRNRAIEFRDLMQLDGFVPNKPWINHFKAAYNITLSNRQITIVRRPPRSMDLRDIMSYCGRHTSMSCSLAPRSPEPALTSSDRPLYRTKTLVTTSSQNQATSDEVHLRRKRKLAFLEKCVYEYIQRSQLVRQGRLDLDNLRFVAISLRDILKIDSFFPDKVWLKHFKSRYNFNFTVGVQVTNRRLPLSLDLRDIVSYCGRNEHKITLDHKKSQEELSQSDKPEVDQCPQVEPKPEEFEHEEDDDCVAIEVPPELIEIKDDEDNDDEHNDNEDLPERATKRKSDENGGPIPCGLKIQKIQSLNESLPEDTELLPANSPGHYSETSDEAHLPRCVESYKDALRLLKPLEEFVLMEENYRAIGLLTQLEKIFESAAKKSEEMDKSLE

SEQ ID NO: 33049 - DNA, 2633 bp, DROSOPHILA
ctctatgtattgtttgaccttgatgatttcggcatcctgcaggccaatcagaatgtccctgtacttcccaataagtcctttgaaacgtatcacttgcatggcaagcatcatggactgcgccttgtaggacgtacgcttcgagttattcttctccttctggatgacagtgcgcagctgatcgagctcgccataggtatcattaaggtagcggatggcattacgaagatttgactccgctgtggcaaaggcggtagcatccggtggacgaaatcctggcggggcaggacccagtgcaaataaccgggactgcaagttgtccgataaattggattccttttccataaatttaacaaaacttagacttccacaatatgcttttttgtagacttcagattggtattgcccatccgatgcatttagggttgcaatttcgaagttatcgataaagtttgcttcatttgatcaatattgcataatactataactttttattaactgtattacatgttttcacgatactagttaattcttttcaattatgtttgaattttctattttgtgcaaccgaaggtcttttcttgaacctttagtgtcatattggtgctgccagatttttcggtttttgtcaatttccaagacgaacttgcttacagatcggcgttgatctcggcaggattcactttgttactcttcaaaatactaataagatttcagaaatgttggtttttcttgtgaaattcctttagattgttgtaactataggttttagaaaacggtattgccacagcgcaatattttagccaatacccaagccagatttgtttagaaccagattcatttttcagtggtgttagcaagtgcatgaaccatatttaaataaagtaaattaaagtatatatattataaaatattaaaatcttaaatatagaggtataaattaggtatgtgccttatcttatctttgcttttccagtagattacgtgcttgtttataaggacactacgtttgatccacctcgaagtccttgatctgggctggatattgaatggcgtgctccacctgtattagcagtcctatggccctgaaattatcatggatcatggcgtactcctggagcgctcttaggtgtctcaatgcctcttcgtcgttgctgatggagatctcggccgcagactctgacaaatcattagtattgggttcggcggcattaaagactgtaaactgttccccatcccgctgccgatccgtttgcacttcgtagtccttctggatcttgatatcgacatcatccaatggctgctttcgtttgcgatacgtacgcatttggcggggaataactgtgctgacagtggtgcccatagacagcatcctgcctttctggataccggtctccaaactgaccaccgcttcatcgaaatcattgatggaaagttcctgcggcggtgggacagggtcatcctttagaatttcggacatctcgtcgtagaactgccagtttggatggaaatgcggtaccttcgccaggagcttgctccttatgctatagtaggtcttcttcaggttcctaaattttcgatccagctgaactgcatcgatatctgtcattccctggctttcaagggcaacgaccatttccccccaaatgtccttgatcttttttttcggatcccgaaaatcagcttggcgttcattgtaaagggacaataaaagtcgggtgttggatgtacaccacttcctttcgtaagctggcttattgtgagtatatatatagttttcttcttgaatttatgttttttactcacactttgtatccattgtttacaatagctattcagttgatgacgaataagttttgtttcccaggctgccagttctttcggacggcgtaagagaaaggtatcatgatccaaacatatgtgtttcgatttttctctatcgataactatcgaaaaggttgcacgaaacaaagatgggaataggctttcgttttttgaaaatggattttttgcctaatctatatcaatactcgctaccgaagagaacatttattttatataaatactcatcttagcctcatttaattgccattatgtagtttttgaatttaaaaatctcgcagtaaggatttagtgagtacttgccgcaggttgagacctcccgcaacttaattatagaaagttaatattgaaatggacctacatacattacaaataagcacataactattactgtgctgccatctaccggcaatgcgactttcatttacagacgctagatgtcgcccaaacagttcgtcgataggggcgcagtagtataaatgtaaaataaccgggtaccgtatactcgagtatacacagtaaaaaaaagtttaataaaccaatattgatttttgtagtaataaatttgttaagcaaattatataagattatcagtgatttctattataatcttttataaactaatctgtaagttttaggtaagaaaaaagttagtcaaaaaggctaagtcctatcgtggactatctatgcccaattttccgtatcaacccaatcgagcgtctcctaaatttaatttccgccacaaataaaaagggaatttacatatgcacaattggcactttttttctagaaac

SEQ ID NO: 33050 - DNA, 633 bp, DROSOPHILA
atggtcgttgcccttgaaagccagggaatgacagatatcgatgcagttcagctggatcgaaaatttaggaacctgaagaagacctactatagcataaggagcaagctcctggcgaaggtaccgcatttccatccaaactggcagttctacgacgagatgtccgaaattctaaaggatgaccctgtcccaccgccgcaggaactttccatcaatgatttcgatgaagcggtggtcagtttggagaccggtatccagaaaggcaggatgctgtctatgggcaccactgtcagcacagttattccccgccaaatgcgtacgtatcgcaaacgaaagcagccattggatgatgtcgatatcaagatccagaaggactacgaagtgcaaacggatcggcagcgggatggggaacagtttacagtctttaatgccgccgaacccaatactaatgatttgtcagagtctgcggccgagatctccatcagcaacgacgaagaggcattgagacacctaagagcgctccaggagtacgccatgatccatgataatttcagggccataggactgctaatacaggtggagcacgccattcaatatccagcccagatcaaggacttcgaggtggatcaaacgtag

SEQ ID NO: 33051 - protein, 210 aa, DROSOPHILA
MVVALESQGMTDIDAVQLDRKFRNLKKTYYSIRSKLLAKVPHFHPNWQFYDEMSEILKDDPVPPPQELSINDFDEAVVSLETGIQKGRMLSMGTTVSTVIPRQMRTYRKRKQPLDDVDIKIQKDYEVQTDRQRDGEQFTVFNAAEPNTNDLSESAAEISISNDEEALRHLRALQEYAMIHDNFRAIGLLIQVEHAIQYPAQIKDFEVDQT

SEQ ID NO: 33052 - DNA, 3257 bp, DROSOPHILA
gccgtagaatccactcggacgcccacacgattgtcactatcatcttgggcttactctgctgaagctgggagcggggcagagcagaatgcagtgcattgaacgcgcaggcagagggcccaataatcgtactaaaatagtgtgccatgcatcgcatggcattccggatggatactgggcgacacccaattgaaacttcaagagcagttatcgtatgtgaataccatcacatcgctgtatttaataatttacaacatctttataagaacgtcgataggcagctgactcatcaatttattattcaccgcttctagcatctgaagaatctctttcaacttctgcatcttggcctcctcatcctggattgtcatggcgctcataaccggatttattaccatttgctttataaacccggatggataattctggtcgatgtttagtttggatgacgctgacaaaatcttcttggccattttttgataatgtttgccttggattggaaagcacacaaaactgaattagctgtacttattttggtagctccacgccaacttcgaatgtattcttacttaatcgtcaagattattggtcgctttgacttcatttaacaaatgtcgttccaatagtgtggcattaaaaaaacagccaacttagaagaaaaataacaaagagttttcagccctggtaatcaataaaggattagatttaaatttagcctttttagcttctaagttaaattccggcagccctggtaatagtttgcagtttgttaaacatgtttaagtttgctaaacatcaagcaaataagaccctcaatttgaagacttaaaattatatatagcttttattatgtgcaatgataaaattcaaaagtaatctcagccaaatcgaaccactgtgcactgaacctgcgcacagtggtgctcgcgctcttgtccagttcgcacacttaacattaaggggggcattgtatatcttattttgctcggctgcaatcctcgattcagttccaattcgtggagcttgtgctcacttgcgcctgatccaaggccatttgctgttggttcaacaacatttgcgagggctgctgctgctgctgtcgttgctcaggttgctgttgcagttgcagttgcagttgctgctgttgctgcggttgctgctgcaccggcggctgttgcattgtctgcagcagtagctcccccatcttggccctgaagaagacattctggaagggcgtcatttgcttcatcagcggcagaaagctgatcaggtagttgtagtcggagtcgcccacatggaggacactcttgcacctggccagatcctggctggtggactgcatcagctgctgctcctcgcgttccagactctccaggaagttgacctgttcgtccaccctcttcgcgcaatggcaactgctggctgctgcggcagcaatggcacttccctgattcaaattcggactcaattggtcggcagtggaaggcacctgctcctccgccgccgcactggccagggagatgttctcggagagccttcgcaacgcctggggagtggacacgttctggaattcgcgcatcagcgcatcgttgtccgcctccatttcatccgcagctgagacttgctcgctcttaaaggtcgacaacatgggcatatgctcggcttcaatcttgagtgcactctccatctcctcctccccgttgttgctgttatcacattcctccctttggccgtccaggaagctcatggcctccgcatatgaccactggtgacccggcgagggcgactgctgatgcttcaagatcccactacgccggttacttcggcgataactacaacgcagatttttccatttggttcggcaaagctcaactgaaatgtcagagcgtggtatacgcgattaagaaaagagaatgtaaacaaagcactcattacaaagtacaccgaaaaaagtttaatactaatgtaataattaatttgaaaaaaccataaaatactaaaaaataatactagtacttcgcattaacaattttctaattaatctaaaattatcataattttaattagttccaattggatttttgtgttgacccgaatattgatcccgatttcgctcagtgcactcaccatccattccggtggcctccgcgacggcgttccagaggcgctgggtctccggtcggttggcgtggtccggatgcctcgcgtcccagagagcccggcgctgctgcacctcgaagatcagcctgtgcatgtccatgttgcagcgtctttattggcgaactgagcaaaatgcggtgctaaacttccctggcgcagagagcagagagcgctttctctcaaaatagccccataagttttggtttcgctctcgactggaagtctctcagagaacgcggagaaaggtgctgtgtgctcaacgccgtgcttaccgtctgtttgctgcacgtgttttccgttcgagattttaaaatttccacacaatttccaatataggtaaaagttggataataaaaatatagttccttatttaccattcaatttctatttattttttatcacttgattgtaggaaagggactcgttacccgatttttgctatttaaagagcatttggaaagtgcatacacccatcaattataaaatctctctggaacgtttttcactcgccttttgcaatatacacacatattatttgcgttttattctcgcgtgttgttatggctgatgttgctgttgttgttgccgctgctgcttggccagatattcaacttgcgctcgcacagtgggccgaaatgcgtgaaaacccttgctatatggcgcacatgtgctggccatgatgataggcccgccaagtatcttcccaccgggggaagttccaaatatttgcacagccggacgctcgacggttggacggttgcaacatgttgccatcgccgtagcccaaaaaggcagccggccaaaagccgagagcaacacatgttgctgcagctaagtcggcgacaacaagtggacgtggaaaatatgcgacagcaattatctccgtctatatccatatagcatatatagcacatggagcagcatatccatatgctgtcccctggtcggatttgcgcacgactttcgcttgccattccaggccattgttgctgctgctgctatgctgttatgtttgtctcatgttgctgttgtcatcagttgcagctgctgtcaatctgttggccgctcgctttcaaaaggcaaaacatcgaaaatttcca

SEQ ID NO: 33053 - DNA, 1002 bp, DROSOPHILA
atggacatgcacaggctgatcttcgaggtgcagcagcgccgggctctctgggacgcgaggcatccggaccacgccaaccgaccggagacccagcgcctctggaacgccgtcgcggaggccaccggaatggatgttgagctttgccgaaccaaatggaaaaatctgcgttgtagttatcgccgaagtaaccggcgtagtgggatcttgaagcatcagcagtcgccctcgccgggtcaccagtggtcatatgcggaggccatgagcttcctggacggccaaagggaggaatgtgataacagcaacaacggggaggaggagatggagagtgcactcaagattgaagccgagcatatgcccatgttgtcgacctttaagagcgagcaagtctcagctgcggatgaaatggaggcggacaacgatgcgctgatgcgcgaattccagaacgtgtccactccccaggcgttgcgaaggctctccgagaacatctccctggccagtgcggcggcggaggagcaggtgccttccactgccgaccaattgagtccgaatttgaatcagggaagtgccattgctgccgcagcagccagcagttgccattgcgcgaagagggtggacgaacaggtcaacttcctggagagtctggaacgcgaggagcagcagctgatgcagtccaccagccaggatctggccaggtgcaagagtgtcctccatgtgggcgactccgactacaactacctgatcagctttctgccgctgatgaagcaaatgacgcccttccagaatgtcttcttcagggccaagatgggggagctactgctgcagacaatgcaacagccgccggtgcagcagcaaccgcagcaacagcagcaactgcaactgcaactgcaacagcaacctgagcaacgacagcagcagcagcagccctcgcaaatgttgttgaaccaacagcaaatggccttggatcaggcgcaagtgagcacaagctccacgaattggaactga

SEQ ID NO: 33054 - protein, 333 aa, DROSOPHILA
MDMHRLIFEVQQRRALWDARHPDHANRPETQRLWNAVAEATGMDVELCRTKWKNLRCSYRRSNRRSGILKHQQSPSPGHQWSYAEAMSFLDGQREECDNSNNGEEEMESALKIEAEHMPMLSTFKSEQVSAADEMEADNDALMREFQNVSTPQALRRLSENISLASAAAEEQVPSTADQLSPNLNQGSAIAAAAASSCHCAKRVDEQVNFLESLEREEQQLMQSTSQDLARCKSVLHVGDSDYNYLISFLPLMKQMTPFQNVFFRAKMGELLLQTMQQPPVQQQPQQQQQLQLQLQQQPEQRQQQQQPSQMLLNQQQMALDQAQVSTSSTNWN

SEQ ID NO: 33055 - DNA, 2456 bp, DROSOPHILA
attttcggtgcgtacccacatcgacgtcccattcccattcccaatcccaagcacgagcacaagcacaagcctaagccaaacaccaacccaaagccatgtagcccagtccagtccacgtcaaaatctgcagtctcagtcccaatttgaactccatttcggacaaagtcgtgcagtcccccgcggctttgcacgtgttctctccgcctcgaattctccctgccatatttgtatttggataaggacatgcgtacgagcaacgtccgcgtttccatcgacattcagagcggcgtcagacccgcctgtagcgtccacagtacagtgaacactagtgcacgtctgccccaaaaatcagcattagtattcacttctttaaggaagcgccaaagatatttgcatttctgtggcaaataaactgcgaacgtaaaaaatcgcgaaaagtttaagaaatcgatttaccactgtacccttactcacactccgattgccattacaatttcatgcggttgctcagctcgctgtatcgcaatattggatttcatgtttgccactttgtgcaacgcactgcgtcgggcgcggcttttggcaacattttatgctgattacacgtctaatcctcagcgtgtgccgccgtcctattgggttaatggcatggcaggaggcggttttccatgcagggggactttccaaaatgcgtgaggggcagactagagccaagacaacgtcattcaatttcagtttgcgccattggcgtttaacgctgatatccaagaaaagaagacctttaattgaatacagggtgccacggtgtcaccaacaatggaaggaagccccttagtttccaaaacttgggacactaataggtcttctgcataacctcgaggatgggtggagaaaatccacaatagttgtgggaagccgactaacatgattttattaaatgtacaaataccaaccaagtcagcacacatatatatgtatgtaggcttgcggatatgattatttaggatctataggctgtacaaaaatcacggaagttaataacgccatcgccatcaacatcagcctgacgaaacacttcattgaactcttcgtcggatattttttcgccaagattgatgaaaacgtgacgtagctcgccatatgttaccaaaccgtccttatcaaaatcgaaggcattatatgctgccttcaaatagtcactgctgcccatcgcgctgtagattttggtcatcaaatcgatgaaatcagtgagttgtatgtacccgttgacgtctccctcgagtccctcggaatatctgtagatttccgactcggtgtgattctggccgagagtgcgcatcacttctcccaaatcgtctgctctgattcttccagtcttctcaggatcacagagctcgaaggcttcgcaaatgtcttgaagatcgtcattcgccaatatgtagtcttgtgattccattttgatctatgtagtgtatcgaagatgtgtacgttatttgatgttttcagcttcaatatgggagttaaactgatgaaacagaaatgtggctctgactgccagctcaatcaaatggaagtttatttcaaaagcttctttactctaaacatgttgaataggaaaaatgtccctttcaaatgaataacaatttataaaccttttaaaagttccaagcaagccaatcaccctgtttccctctgaagccgtaggaattaaacgttctccatgggacttcgaagcccagacggcgatccacggccatccaagggaactggcgtttaattggaatcttgggcaaatatagaaacaaataaaggcacgccgagaatccaataaatgtcctgcgctgcacgtgcaagcagctagacgccgtcgccgtgggatcggagaaaaaactcggggatgggaagctgaatcgcaatgggaatggtatgggttatccgagactgggcaggcagcgttaattgaacgctcatgaaactggataaattgcccaaagagaaaagggaatggatatgcgaatgtgagtgcacagtacacacaagccgtgtcacaacaatcgattgtccttttttgtgcccgcatttgctgacatcatcacaaaaaacgtggaatctccgaatcaccacccctgcgaatgcacttccgaccgccagcaatgtacagtgggttcttactaaagaagtctctacaaaatggtttatagatatttctactattgtaaaaccagtatcatatttaatagatacaaatgttttatttaaattatgccctattaagtttatcaaaaatgatcaaaaacctaagccattaatgttgttcctcagtttggttcagaccaaccactgtacttcgtgcccaattggaagttccggtccgcagattgatcacaagacacgtgttccgccgtagacttaccccggaatctgccgttatgcggtgcacgtgttgggattcgtct

SEQ ID NO: 33056 - DNA, 456 bp, DROSOPHILA
atggaatcacaagactacatattggcgaatgacgatcttcaagacatttgcgaagccttcgagctctgtgatcctgagaagactggaagaatcagagcagacgatttgggagaagtgatgcgcactctcggccagaatcacaccgagtcggaaatctacagatattccgagggactcgagggagacgtcaacgggtacatacaactcactgatttcatcgatttgatgaccaaaatctacagcgcgatgggcagcagtgactatttgaaggcagcatataatgccttcgattttgataaggacggtttggtaacatatggcgagctacgtcacgttttcatcaatcttggcgaaaaaatatccgacgaagagttcaatgaagtgtttcgtcaggctgatgttgatggcgatggcgttattaacttccgtgatttttgtacagcctatagatcctaa

SEQ ID NO: 33057 - protein, 151 aa, DROSOPHILA
MESQDYILANDDLQDICEAFELCDPEKTGRIRADDLGEVMRTLGQNHTESEIYRYSEGLEGDVNGYIQLTDFIDLMTKIYSAMGSSDYLKAAYNAFDFDKDGLVTYGELRHVFINLGEKISDEEFNEVFRQADVDGDGVINFRDFCTAYRS

SEQ ID NO: 33058 - DNA, 2171 bp, DROSOPHILA
attgaagttcggaaagatccctcagcaactgtgtgaaaaattcgtttaagtagatttcatttggtttcattttaggagtttccaaagaatttcccttttgatacttcatatgacttttggctactagctgattcccatttctccgagtgtgtctaaaatcaacgtcagcagcgatgctaagtgaattaaaataatgctgccgctgctgcatttcactgacgacgacgatgacgaccatgatgatgatgatgatgttgttggcgatgctgatgaggccggctctcccaggaactcccccttcgggaggtagccactctgatgattctatttattacacggcaggcaatttgcaattttccgctgcgttttaattatttgccatgcccgttagttttaataaagttgctaactgtgaaaagacgtgactagcgaatggccatttaattcgcactcgcacacagcgaaagtgtcggtctagctctatccaacatccactgtccactgtccacgattccatccagactccgggtccagactggcagacttctgattaaaatctcggcgtgtccggcagaatttcgcagaaaattcttacacgcaagcggcggacagctgaaaagttgcttcgttaacacccattgcctccaaagtccgccgatgatcgtggggcatttcgtgcgaaattttatcacgcaaggcattcaatagttgataagcatctgcgaagcgggaaccctgcgaatgtgaactcggaatccgaatccgcgatctggccaacagattgcgatcccaagctctgatatcccgacaacaaaggatcagtgatgatccttacttctaactagctacatcttcaacttgaaatactcaatctgtatctatcaatatcactttaaaaatatttattaaattcttacttcttattgcagaatgtatttaagattaggttattaaatagagtgtgtaaagtgagtttagttttggctaaaactctacttagtcagcctgccaacactctgaagttcgcctttgtcttatctccagctgggcatctgctcatctcctcgacgccgtatctgcccatctcccccagaagaaatggcaactgcttcaaggcgccgcagaaggggcgtggcaggtgtttgcagggctggctgttctccccatccattccccacctccacccctttgtccaagggtgccaagtgtttgcgccaagcgctgattgtccttatcgaaggcacagatcgcggagctgaacaggaaaggcggcgcgaatcgcatgcgtagatgctgcctagagattggagattgcagactgcacttgcgtgccagtcgggcaaaaaagaggctagccgagaaaaaccagtgccaagtgacgaatgtccgtgttatgcgatctaatgatctagaaatgaagttaataaatcgtttagccagatggcacagctcttttccagatcgcaaacaaggctgcttctgtggattttcaggaacgagacagtatggaatgtcagagatgtccgattttatggatactatagatactatatattttggatgcacaaattgatttactgaaaccaatttacaaggtattatacctttaaattctacactcttactttgattttcattatatttcttttgactttctaaactgggtgatccagaccaataatgctgctccgccttgagcgttggctagtaaaagtccaagttgccatttctggccccactcgcctcgtttgggagcagcaagtgatcgaccaccgggccgacagacaatttgcataactaccgtgcttatgccgcaaacataacaaattacaacgattttgcgtatgtacataccgggcggatggatggaaagcgaggcgtttagcaaatatctgcctatctgtcccataacgggactctccgtgccgggaaaatgaagagcagtgcaaacaaggccgagatgtaatggccaagacacatggtaatggccataatcaggccgcaacaagacaggcgaacttcaaatggaattatgcaaagcgtgtcgtcgtctccgccagaaccacacaacaaaatcacctcgcattcttggctttgttttcagttacttttatttaagttaaaaattgcttatgattaggggtttatatttaggttgtgcaatttgtcga

SEQ ID NO: 33059 - DNA, 171 bp, DROSOPHILA
atggatggggagaacagccagccctgcaaacacctgccacgccccttctgcggcgccttgaagcagttgccatttcttctgggggagatgggcagatacggcgtcgaggagatgagcagatgcccagctggagataagacaaaggcgaacttcagagtgttggcaggctga

SEQ ID NO: 33060 - protein, 56 aa, DROSOPHILA
MDGENSQPCKHLPRPFCGALKQLPFLLGEMGRYGVEEMSRCPAGDKTKANFRVLAG

SEQ ID NO: 33061 - DNA, 7389 bp, DROSOPHILA
ccacaacataccccaacgtaagaagatctgcaagtgaagaaaggaaattagttatgatttaaccacgattaaaatgctaaacacagtgaaatatagctataagctcagttactaaattacaatcaaatcatttcattagtctaacatatgtaaaataacatcatagagcttatttaaattgaagtggtttaaatatatattacgtaccttgaaagtgttcctaatgtaatggtctaatggtcattggaattttccgattaaactgcaaagaaagcatcaatttactaatcgatccagtaattatcataaataagtattgaaatttttaattttaaaaacattctcagttactaatttacaatcaaatcatttcattagtctaacatatgtaaaataacatcattgtttaactcaacgaaaatgtggcttaatcgttacaatttcttacctttaaaacgttttaggtgcagcgtttgttggttttgcccacgaaaactgcaatagaaagagaaatacaaaattaataacatttctttgcttttcaatcaataaacgcttgaatttgttatcagaaaaacataactttacactaatcaaggcatttcataggtgtcccaaggtaaaactcgaaaatcatcattgaaaacaactataaatagaaaccaacttacctagttaaaaaagaaaagtttccatgatattgaagtgttcctttgctggcatctgcaaaatataaacaattgttagctttctgttcaataatcataaaagactaaattcagcaaagtatttatcagatattgacgtttacgctaatcaaggcatttcataggtgtcccaaggtaaaatagctatgtcatcacaaaaacctatgtcccataggcatatcgattccaactcaccttagaaggcgtatcgcgtgcgaatatcctccagtttcttgcagatctgattgggagtgcggaacatgtcgccagctatgctcttctgcttggctgcctcaatggacagatactgctcgcagagatcgccgtcgagtacgtttttgaccggataatacgagctcctgtagctgagatggtcgcgtccacagagtggaggattctcattgcgcatgtgcatctccagatgttggaagaagtcgtagtcctcgcgactggtgaacggaacaaatgctccaacagtgccacttagcgtggcgtatataagggcttccgatcctccaggaattagcgttgccttctgcagcgacatgattatctcgcccacatggaaggagcaaatgttctccgacttctgtgaagcacctgacagcaggccacgatcccacagagacttggtgcccgttggatcctcgtccacatcgtccgttacggagtggggcaatcgctgaatgctcaggttgccaaacttatcggctatggctatggtatcatagtccagcaaggtggtggccgtcacccatcgaggatgcgtgtcatcggcaaatataatcagctggttctccgcgcgacgatagcgtatgaaaaatactgattcctgaacatccgacacgtaaacacgatgacccatggcttggatattgacaatctgatagggaatgtgcttgttctcgcatttgcgcagcattttcttcttgccgaaatcgtagattcgcaacattcgaccgcagccagctagtagacgaccctggaagccacacagggctccaggaatctcgtcaatgtccgtgcggtgcatgaattccagactggagcaagtgggatctattttgtagatatctatgcagccgccttgcgaaatcctgggattcagctgcagatccttggcgattcccacggccaggtagtaccggccatcagccgctatggagaacttcagcatggccatcgacataatggcctcgttttgggtgagcggcacactaaacatcgtctgaccatgcattgcgtccaggcaacggatttgcgaggcccaaagacccagtcctgctttgggcgacgaaaacacgtcctcgggaaggacttcgttgatgaaagcattggccatttcgcgggccaactccctttcctcatcgccagctgcactgcgcatctcctccgccatttgctcctttcgggcactcttcgtatcctctgtgtaggcgttgtgatcggtttcggcaattagcatgcgtcccgtatccggatggattacaaaggtacgtggagtgtactgcaaggggaacgctacttgattgaagacggctcccagtttctccagggccaagatcctcaaggtgttggtggatatagccacgataccttcgctgcactgctcgctcgagaagccagaagcatactcaagggtttcataagacagaggcgtcaaatggaatcgattttggtggtagtacgacagccaggttcgactggacatggccagcaccgcttcggatccctgcatcttgatccggaagagctttacgggtcgggaacccaaatatctcgttcgggtgtctgccaaatctccggaaacaggatcgagcacagttctcagcaggacaccgttgctcaagccaatgtttaggtaaatggttcccttattgttgccactgcgctgagcgggagcatcgtcatccaaacctccctgagtcgtgctctccgtgtgacccatttcgaccaggcaaagggattcggctggcgaaggcagggcctgcatggagcagggagtgagacagttgttgggatccagcgataagatgcgcactgtattatccgccaggccgacggccaagaaccaggatctctgctcgccctccggaacagttcccaaggccatgcacataatctcagcaggcatctcggaacgttccgtgtactcgttcagctccccagtctgcaagcataaaatgtattcattagttgtgaagttaagtaaacgaggataaggcttttggttgattttgaagctcagcactgcaggacacatagtgtctcaacatgattgttcttttcgtgtttttgtcatcagagcaagaagtcaacagttgagtgtaatatagtagtagaattgcttaccggatccatttcgaagtagaccaactccctgcccgacaaggtgatgaccacctggcgctgattcacggcgcacttggtaatggacttcttgcccggagccttccactcgttcacacgcttgtcggatcggatatgtcgaatgccatcggggtaaacctgaaccagcgcatcatcgcccagggcggcacaacagagcgtgggcgtggtgcccaggaaaccgctgtccgtgacttcctcgacggtttcgccaatgctcaaaaccagggtggcattcacgaaggacacgatgatataggcatcaaactcgtctaaaaaataggggagcaaaacaatacttggaacgtgagtacttcagtttgaatcgagcaagcgaaaaagatctgcgtatcacacaagacattgaataatcagtttatcaagttgtaatcaatggataattcagctgaaacacggttgataaatatcgcatcatgttcaatgtccgactggcttaaatatagttagcttttgttctgttttcattggtatagtagcagtggtagttgtagtatctgtttgacttatgagctgcagtaaatgttgccttacctatcgcttcacaaaagacaatttaaaattacacaaacgagagaaattctctttaatcgcttgtctttttcgatagttcacacatattgccgtctgtgtttaagcgcctgaaataagagagaactggtggttgataacttgtgggacttgtttggaatcgtgcgtaaagctaggtgtaatctatatctcgatctgtatcaatgcaccagttgagttattagccacgtttcagtcttagtctaatcttagcttaggaatcatgattaatgcccgcagacacactcaccatcagctcgtttcttcacagtccaaaccgcattgggattaccaggcagttcggaaacggccatctcggacacctcgaggccgtggcgcagcacccgcagagtggaacgcggtcctcgtccgcaaagaacgtacagttgcggtgtgtcctcgttggccagatcagccacctgggaggtgatgatcggtgcgaaagagggcagttcatccacaagcaccaggttctttagggcacgtggcgcaaagaagaaggtttcaccctcctccaaaggcatggccgaactgaactccggctcgtcatcgtcgtcacccagatgagcgatttgatatagatagctgagggttacacaaatacctcaattagtacccattcatattattctcaaatgaatgatttgtagatactcactggttgccaaactcgctggccacgaacaggaaacccgtctttagcacgcacatggcagttgccggcggcactgtatcgaagtactttagcttgatctcggagaccacatcatcgtccgtttccagggtgatcttaaagatgtctccctgctcggtctgcagcaggaagaagtacatgctcttggtgcgatgtgtggccgagcagatgaagatcataccacgttcgggatcatccagatcgtttctcctgcgcggaatgggacagcggatatcgtgctgatcgccgagattcttgtacgttaggtagttctccgagcagatcagcacgcccgaaggaccatcgttgcccccaggcacggataccaagaaattggcgtgctcttccaagggctccgagtatttgcgaaccacgtggtttaagccgagatccaactcgtagaaagtcagcgtttgctgagtgcgctgggcggcgtcacctggaacaaatagatgcgacactgattagttacaggactatagcattgtactatcaaaatgttatcaattgagattaggaagtgtgggtcacaaatcagtgaagtgtggctaggcaattacagcaacaccaatggttcagtgatcacgatttatctggcactaagtacagtcagtgttcgtggtgtggatccactaaacctgtgaattaaagcgccttctagggtctacacgccacctagttgatgcttacccgatggatccatgtcggcctcttcgtagtcgatctctaggcaggcgaacatgggattatcgaagcccacatccacgccgaccatgtggtatgtcagtgtattcgatttgtgggcctccaggggcgatgagatcgtgaggcgagcctgcgtgtcccggttcatgatgtaggccagcttttgcttctccacggcgccaatcatcacggctcttcctttaggatcgatggcaaagtattgcccaggcacaatcctgcgacatcccgactttccgaacgtctcctggtgcactttttcaagagcattcttggagggattgtactcgaggatcacgatgcgtcccgagtccgagcccacaactatgtaatctgcaaagcaaggtaacgatattcgagattagggtcatacatttaacactttctaatgactataatgatattttattgactttgtaactcgaagtttcaattcgccactccgttgagttggtttatggcaaatgcgacgtcaagtctttcggtttctctcgcacttagacgcgttcaaaggtcttactggggtcaactagccgtctgttgcctcaatagggatttgtgcgacttacatagattatataggagcaatacattactcccaattgatggtacaaaactaaattacaattgaaagactcacctttagtgccgcccgtcagtcgaaaggccatcagggcgcgaacgcatccgaatatctccgtggagagcagggtgtgcaccttgccggtgttggagtccggacgcagtagctccagcgacttgccacgcgacaggaggacctcctgctgcttgccgccggagaagttgccgtggaccgcgtgggtcacgccggtggccttctgcagggtcaggttgtacagatacatggtggagcactacactctttcacttttgtccacgactgcaagagaagcaatgttgaggttaggtacagttgcagacaagggaaaaagtcacgtgaatggcggtgtatttttttttttgtgaatttgtactactttgaaaaccatggccacagtatggaaagtcgtgtcgcctaacgatgctagtaagcagcatttaattcttagtttagcacgcttcaaatgcgaccaaagcacagacatttctgatttctggagatacttcgtgcggaaagcgcttaaataatagtagatatcagtgctagcacgtgtatttgtttaccttcggctggttaaatggatgaattagcacatttcaccagcgatgcctttggattcgaattttcctgattactcagaactcttcattttcacatctgctctgttcgccgacaaaaagtaaaagaactataaaagtaaaaatggtggtgcataaaatgtggcttgacttatcgatagtgcgcggccgtcgattttcctatcgataataggcccggttcagactgattataaattaaataattattttactggaaattgttgctgcagaaatcataagtttcctaaaaatcctggtcaagatatatcgaatttatcctttattaaatataccacatttaaatattcggaaattgccatgggccaatcccagttccacataccaaaaactgcctcaaaagctaaacatataatatgcaattttctgtgaaaaaatggaaaatttcaaggatctgtaaaaatatgtactggatcaatcgttttatctttctttaacttaaaaaatttttatcatgggcttaaatgaaaacaaaaccactcaccgaattgtggctaaagggctgggctcaatactatgctattaaggtatgattaaggagaaaactttaaaggtatttaaaaaaaataaatagatcagtccccaactatttttttctgtttattcgatctctacttgagtatatttttacgcggcgttggctcatgttattagactaattagaaaaatcatcaattattacttagtaaactaggtttgttgactatcgatataccaacttcagattcgcgacatctctaatcagtcatggaattgtcagtgttgtaaaacctgaaatgtcattgcatctttgcttcttcaaaacagctgacagctaaaaacaaatatttcgtgatttttgtaaatattgctaacgttttaatatggaggagcaagaggatcgagaaaagctctacgaagaagcccacaagaaagtaaaactgggcgaggagctgaagaaagcgctgaaagacttcgaagatttgcctggtgtcagcaaagtacagcgaaaaattcagcaagagctcaaatttctaaataaggtttgtttgcctatttttcatgataaaa

SEQ ID NO: 33062 - DNA, 3649 bp, DROSOPHILA
aacagagcagatgtgaaaatgaagagttctgagtaatcaggaaaattcgaatccaaaggcatcgctggtgaaatgtgctaattcatccatttaaccagccgaagtcgtggacaaaagtgaaagagtgtagtgctccaccatgtatctgtacaacctgaccctgcagaaggccaccggcgtgacccacgcggtccacggcaacttctccggcggcaagcagcaggaggtcctcctgtcgcgtggcaagtcgctggagctactgcgtccggactccaacaccggcaaggtgcacaccctgctctccacggagatattcggatgcgttcgcgccctgatggcctttcgactgacgggcggcactaaagattacatagttgtgggctcggactcgggacgcatcgtgatcctcgagtacaatccctccaagaatgctcttgaaaaagtgcaccaggagacgttcggaaagtcgggatgtcgcaggattgtgcctgggcaatactttgccatcgatcctaaaggaagagccgtgatgattggcgccgtggagaagcaaaagctggcctacatcatgaaccgggacacgcaggctcgcctcacgatctcatcgcccctggaggcccacaaatcgaatacactgacataccacatggtcggcgtggatgtgggcttcgataatcccatgttcgcctgcctagagatcgactacgaagaggccgacatggatccatcgggtgacgccgcccagcgcactcagcaaacgctgactttctacgagttggatctcggcttaaaccacgtggttcgcaaatactcggagcccttggaagagcacgccaatttcttggtatccgtgcctgggggcaacgatggtccttcgggcgtgctgatctgctcggagaactacctaacgtacaagaatctcggcgatcagcacgatatccgctgtcccattccgcgcaggagaaacgatctggatgatcccgaacgtggtatgatcttcatctgctcggccacacatcgcaccaagagcatgtacttcttcctgctgcagaccgagcagggagacatctttaagatcaccctggaaacggacgatgatgtggtctccgagatcaagctaaagtacttcgatacagtgccgccggcaactgccatgtgcgtgctaaagacgggtttcctgttcgtggccagcgagtttggcaaccactatctatatcaaatcgctcatctgggtgacgacgatgacgagccggagttcagttcggccatgcctttggaggagggtgaaaccttcttctttgcgccacgtgccctaaagaacctggtgcttgtggatgaactgccctctttcgcaccgatcatcacctcccaggtggctgatctggccaacgaggacacaccgcaactgtacgttctttgcggacgaggaccgcgttccactctgcgggtgctgcgccacggcctcgaggtgtccgagatggccgtttccgaactgcctggtaatcccaatgcggtttggactgtgaagaaacgagctgatgacgagtttgatgcctatatcatcgtgtccttcgtgaatgccaccctggttttgagcattggcgaaaccgtcgaggaagtcacggacagcggtttcctgggcaccacgcccacgctctgttgtgccgccctgggcgatgatgcgctggttcaggtttaccccgatggcattcgacatatccgatccgacaagcgtgtgaacgagtggaaggctccgggcaagaagtccattaccaagtgcgccgtgaatcagcgccaggtggtcatcaccttgtcgggcagggagttggtctacttcgaaatggatccgactggggagctgaacgagtacacggaacgttccgagatgcctgctgagattatgtgcatggccttgggaactgttccggagggcgagcagagatcctggttcttggccgtcggcctggcggataatacagtgcgcatcttatcgctggatcccaacaactgtctcactccctgctccatgcaggccctgccttcgccagccgaatccctttgcctggtcgaaatgggtcacacggagagcacgactcagggaggtttggatgacgatgctcccgctcagcgcagtggcaacaataagggaaccatttacctaaacattggcttgagcaacggtgtcctgctgagaactgtgctcgatcctgtttccggagatttggcagacacccgaacgagatatttgggttcccgacccgtaaagctcttccggatcaagatgcagggatccgaagcggtgctggccatgtccagtcgaacctggctgtcgtactaccaccaaaatcgattccatttgacgcctctgtcttatgaaacccttgagtatgcttctggcttctcgagcgagcagtgcagcgaaggtatcgtggctatatccaccaacaccttgaggatcttggccctggagaaactgggagccgtcttcaatcaagtagcgttccccttgcagtacactccacgtacctttgtaatccatccggatacgggacgcatgctaattgccgaaaccgatcacaacgcctacacagaggatacgaagagtgcccgaaaggagcaaatggcggaggagatgcgcagtgcagctggcgatgaggaaagggagttggcccgcgaaatggccaatgctttcatcaacgaagtccttcccgaggacgtgttttcgtcgcccaaagcaggactgggtctttgggcctcgcaaatccgttgcctggacgcaatgcatggtcagacgatgtttagtgtgccgctcacccaaaacgaggccattatgtcgatggccatgctgaagttctccatagcggctgatggccggtactacctggccgtgggaatcgccaaggatctgcagctgaatcccaggatttcgcaaggcggctgcatagatatctacaaaatagatcccacttgctccagtctggaattcatgcaccgcacggacattgacgagattcctggagccctgtgtggcttccagggtcgtctactagctggctgcggtcgaatgttgcgaatctacgatttcggcaagaagaaaatgctgcgcaaatgcgagaacaagcacattccctatcagattgtcaatatccaagccatgggtcatcgtgtttacgtgtcggatgttcaggaatcagtatttttcatacgctatcgtcgcgcggagaaccagctgattatatttgccgatgacacgcatcctcgatgggtgacggccaccaccttgctggactatgataccatagccatagccgataagtttggcaacctgagcattcagcgattgccccactccgtaacggacgatgtggacgaggatccaacgggcaccaagtctctgtgggatcgtggcctgctgtcaggtgcttcacagaagtcggagaacatttgctccttccatgtgggcgagataatcatgtcgctgcagaaggcaacgctaattcctggaggatcggaagcccttatatacgccacgctaagtggcactgttggagcatttgttccgttcaccagtcgcgaggactacgacttcttccaacatctggagatgcacatgcgcaatgagaatcctccactcttatctgtccattga

SEQ ID NO: 33063 - protein, 1169 aa, DROSOPHILA
MYLYNLTLQKATGVTHAVHGNFSGGKQQEVLLSRGKSLELLRPDSNTGKVHTLLSTEIFGCVRALMAFRLTGGTKDYIVVGSDSGRIVILEYNPSKNALEKVHQETFGKSGCRRIVPGQYFAIDPKGRAVMIGAVEKQKLAYIMNRDTQARLTISSPLEAHKSNTLTYHMVGVDVGFDNPMFACLEIDYEEADMDPSGDAAQRTQQTLTFYELDLGLNHVVRKYSEPLEEHANFLVSVPGGNDGPSGVLICSENYLTYKNLGDQHDIRCPIPRRRNDLDDPERGMIFICSATHRTKSMYFFLLQTEQGDIFKITLETDDDVVSEIKLKYFDTVPPATAMCVLKTGFLFVASEFGNHYLYQIAHLGDDDDEPEFSSAMPLEEGETFFFAPRALKNLVLVDELPSFAPIITSQVADLANEDTPQLYVLCGRGPRSTLRVLRHGLEVSEMAVSELPGNPNAVWTVKKRADDEFDAYIIVSFVNATLVLSIGETVEEVTDSGFLGTTPTLCCAALGDDALVQVYPDGIRHIRSDKRVNEWKAPGKKSITKCAVNQRQVVITLSGRELVYFEMDPTGELNEYTERSEMPAEIMCMALGTVPEGEQRSWFLAVGLADNTVRILSLDPNNCLTPCSMQALPSPAESLCLVEMGHTESTTQGGLDDDAPAQRSGNNKGTIYLNIGLSNGVLLRTVLDPVSGDLADTRTRYLGSRPVKLFRIKMQGSEAVLAMSSRTWLSYYHQNRFHLTPLSYETLEYASGFSSEQCSEGIVAISTNTLRILALEKLGAVFNQVAFPLQYTPRTFVIHPDTGRMLIAETDHNAYTEDTKSARKEQMAEEMRSAAGDEERELAREMANAFINEVLPEDVFSSPKAGLGLWASQIRCLDAMHGQTMFSVPLTQNEAIMSMAMLKFSIAADGRYYLAVGIAKDLQLNPRISQGGCIDIYKIDPTCSSLEFMHRTDIDEIPGALCGFQGRLLAGCGRMLRIYDFGKKKMLRKCENKHIPYQIVNIQAMGHRVYVSDVQESVFFIRYRRAENQLIIFADDTHPRWVTATTLLDYDTIAIADKFGNLSIQRLPHSVTDDVDEDPTGTKSLWDRGLLSGASQKSENICSFHVGEIIMSLQKATLIPGGSEALIYATLSGTVGAFVPFTSREDYDFFQHLEMHMRNENPPLLSVH

SEQ ID NO: 33064 - DNA, 2746 bp, DROSOPHILA
gcaatttcaacgttacaagagcaatcatataatttcaaatcaggacgggaaaacagtcaaaaacatggactgcgcaccactgaacttggtaagaacccgaagaaaacatcgaatttacatggttttaaatggaattacctacccaaatcaaaggctcatttccacgagcgaaggtcggagcgatttatacgcaatcaccgctatgaggaggccattaaagcgctggaaacatccctaatctacatgcaggatgcccaaaaacgggtggctctgcccaaatccaaggaagttctggacacattgaccctcgattttcagcgcaaactgcgtcaaattgagatgcgaaagacgcagcatggtctgaacaagctgaaggattatgctcccttgaaggaaaccagtcccatgctgcccctgcgaccagaagccggagcaagtggaggcgcaggaggatccgctcagtcggtggccaaggcaatcgacaaaacagtgcaggacttcgatgccaagttcacctcctccttggtggcaaaggcctctagcacactggcccattcggagccccatatggagacgctgaagaagagcgattctgcccaggaggagcaggaacacgatacttgcgatcagcggctggcgggcagtggagacctggacctgccatccttggcgcccttggagttgccctccttcgattacagcctgttcaccagctcctcggctccttcgttggccagctatgccggcatggctgagagcttccagaaataggcctggttaagatccatttgtaaaacttcaactaatttgaaagatctcgtggtaatgcagtgcccgctgagtggtgattaggatttaattttaggcacgttcttcatttcaacgttttgtgcagttccctttgtgaagtgtatttgggaattctctaaataaattaaattaggttaattcacaataataataataataataatactttgtgtattacaatctaagtcgtttatttggccatcagacccttcagcagatcatccatgtcggtttcggtgtcgacattcttgagcagaagcagcacctgtgcctccatctcgcagaggatatctggtttctggtaggtaatgatcagcgtgttgaactggtggtggacagagaggctctcctgcgcgggcttgaccccacagcggtccagttccgggaccgggatgaccttgtagtacttcttgttcgaggtgcgcacgactatggcacgcttctcgggatcggcggttacgctgtatgtgtccagggagtagggcatgttgcggatgcgccactcaatgttcttcttggtgatccgcttggtcagcagtggcgcggtgttgctctcccgcagggtgaaatctccgccggccagggagtccgtttcctcgccagatcctggtggcttgttgcccgaccagtttaactgacgcggctcatcgcccagctcgatttcccactccgactcgcccatgatcttgttgctcttcgatttccaggcccgccgctgcacgattcccgtgtccatgttgtactcctcggccatttgcctgccgtccgggaatttgtagagcaccttgcgggcgcggccacttatcatggagttcttctccgccgcctgcaggtagtttagccagttctggtaggacatctctggggattgatgggattacctaggcacacgtctccgccggagattcgaatataacaactgaacggggcagaaaatttgatcgatggcgcaaagttgaaaatttgttgagaagcacattgcgatggaaacctggcaacccagctgccagcttgtttacatcgcaagccgggttaccaaggcactttaaagcattacatacaataccttatgatcgatttgtcttgtaatatttggaggtaatggttaattttaatgcaaaatacgtactaattcttgccattttttttacttactaataaaatgattttgaaattcgaatattttccatgaattcagcttttttctggctacccaatttacagttgattccagcgcgcgagttggcagccccgtgcgtacacaaaaaaacagagttgacgtggccggcgcagtgactacataaaatatacgcatatttcatcacggcagcgatttaattattgctatttaaagtaagcagccagtcactccggccgtagtttataaatagccactagaccgtccgtcccgaatccgtagacttagcagctaatttggacgcatttctgcttacaggcggcagtcgaaaaaagcgaaaatccaagaagcgaaaatcgaacgaaaaagggaattaataaaacattaaaaatgagtttggtgtggactttgatcgccggatttctctatgcggaaatcgcactggtccttctgctggtgctgccggtgctcactccttaccgctggaaccggttcttcaagtccaaattcctatcgatgttgggacaacaggcgcacatatatttcctgctgatcatgggaattctggtcattttcctcctggaggccattcgcgagatgcgcaagtactccggcttgcagcagtctaacgaggtccacttgaacgtggagatgcagcacagcatgaagctgttccgtgcccagcggaacttctacatctctggattcgccattttccttgccctggtcatccggcgactggtaaacttgatctgcacccaggccaatctcatggcccagagcgaggcttccttcaag

SEQ ID NO: 33065 - DNA, 746 bp, DROSOPHILA
ttttctgccccgttcagttgttatattcgaatctccggcggagacgtgtgcctaggtaatcccatcaatccccagagatgtcctaccagaactggctaaactacctgcaggcggcggagaagaactccatgataagtggccgcgcccgcaaggtgctctacaaattcccggacggcaggcaaatggccgaggagtacaacatggacacgggaatcgtgcagcggcgggcctggaaatcgaagagcaacaagatcatgggcgagtcggagtgggaaatcgagctgggcgatgagccgcgtcagttaaactggtcgggcaacaagccaccaggatctggcgaggaaacggactccctggccggcggagatttcaccctgcgggagagcaacaccgcgccactgctgaccaagcggatcaccaagaagaacattgagtggcgcatccgcaacatgccctactccctggacacatacagcgtaaccgccgatcccgagaagcgtgccatagtcgtgcgcacctcgaacaagaagtactacaaggtcatcccggtcccggaactggaccgctgtggggtcaagcccgcgcaggagagcctctctgtccaccaccagttcaacacgctgatcattacctaccagaaaccagatatcctctgcgagatggaggcacaggtgctgcttctgctcaagaatgtcgacaccgaaaccgacatggatgatctgctgaagggtctgatggccaaataa

SEQ ID NO: 33066 - protein, 222 aa, DROSOPHILA
MSYQNWLNYLQAAEKNSMISGRARKVLYKFPDGRQMAEEYNMDTGIVQRRAWKSKSNKIMGESEWEIELGDEPRQLNWSGNKPPGSGEETDSLAGGDFTLRESNTAPLLTKRITKKNIEWRIRNMPYSLDTYSVTADPEKRAIVVRTSNKKYYKVIPVPELDRCGVKPAQESLSVHHQFNTLIITYQKPDILCEMEAQVLLLLKNVDTETDMDDLLKGLMAK

SEQ ID NO: 33067 - DNA, 3257 bp, DROSOPHILA
agccaccactcgaaagtttaaacctcttgttaactctttaaacagctgtcaagactgcggagacgtgtgcaaggactcaccgcccgagtgtcctaagtatccccacctagagcacccaccttatatccattcccaaacacccaaaacgaacaaaaatccaatcgaaactcaaacgaaatccgaattttgcagctcaacaagctgcgcgagcgcgtccaggagctaacctccgacttgaatcgcgaaaagaaggacaaggaggcggttaagtcgcaggcggagagcatcaaccgcgagtacgaccgactcaccgaggagtacagcaagctgcagaagaagataaccatcggcggaggcggaaacaaggatgattaaactcactggagccaagtccaacatttaaataacgataagacttataagcatggcggtggggcagcgaaagcaggcacatttaaaagattataacgatttcaaatcgatagaaagcacacacatcttattgttaatcctcatagatacaactacatataccatttgataatgataatggggtatattgataatggtccctcaactcaatgttcgtttcgtccgaagttttgtatttaattcgtatgtgttaagttttgtttgccacagtaacacacccaaaaagcgtcgtggctattaaaagaacaaccaaaaagtacccatccagttgtgatcgattcgatgattcatctgttggcgcggatagtccacatcatgtctgatagtacacggcaatgacgtcagacgtcgcaacctgtttgcatacttggagcttagaaatcggaggcgttacattatcggtgtgcgaaaagggcatcgaatatgtttccttgataattacccagaaatgctaatcaaattcgcatatttagtgatctatcgtggttttgcagtgcatactttaatcttaacttgaacagagatcatcctacataaatttgctgttcaataaactgcattaaaatgcttactcccaccagaagcttacagagaagctaggagcttcagatctcacatagtgccaccatttgggtggcatgtacaaacagtcaccaggttgcaggagcagctggtagaacttcaccttggctaccaagggatatgtttcaggatccagttgagcagcatctattcgcgctgtattggccaaaaactcactgtcgtggggatacagattgtctgtgtctgcaggagcagctaggatgatcctcttcgaaccgaatacctggcacagcaagttgtgcttgggatcgtagtgcatgggagatacggttccagctggtcccagccaggctttgatgtccacagctcctggggtatcttcgttgctgatggtgcagtagtcgggaatggatatatcctctttgagggctggtatctgggcgaagagctcgtgctgagcgagatactcgatattttggccagccttgcttggttcctttccgaattgtctgctcaggaagtcgcggatcttcaccagctgctgggaccattcatcgctggcatagttggaacctatttcaatgggcaccgtgcgattcccggccacttggagaaggtaattgagatccagccatttgtgcagtgcaggccaatgctggatggtgttgagcaggagtgtgggttgtcctgcctcaaagcactttgtctggaactcttctagactgggagcgtccagttggggtatatcacagttggaggttactcgggttaatggctctagagttggaagtggtgcggaattcagtgctactgctccatccttgtcgagataatccattagggcgactttcagttcactccaatcctccatgcaacccaaaagttgagcctcatcgaggatctcactgcacgcatccttctgggcgggactagtgctctccaagagaaggaaaaaaatctaaaatgtatatttgtagtttgtatggcttagttagcatctaaatcccaccttgaagcaacaggctatggcgtatatcttcctcgtgaccaagggaacctggctgaagtgccctgtgtgaatgcgttcccagttcctgtccaccagcgcacctaccagatatccggtttcctccgccccggaatctccgccagacctcaagttcgccaggtgatccgcggctcttttgagtatgtagcgcgcctcgacttcaccacggaccacattttccagatccacccagcggggcagcagctgcgtcagctccaggaactcactatccatagaatgttaaacaactattatttgtttaccttttagcttacattcagcgttgccagagttcatttgtaagcattaaatatttcgattaatcgatgttttaaaatatatttaaaaattgatgagttgttcagtacttcaaacatgtattgcttaaggatgcctttagtaaattataaatagtagctccgtgggtccttccatggtgaagatacattttgcactggcacgaaatggaaaaacgatttccatgggcggagttatgaccgccgttttggacgccgaatggcattgtgtgccccaagtgccactaattacgggttttagactaagctgcagcttgtaaacaacaatcatgagacaagaacccggatagtggaattgctgacggtcagagctgaggagcatgtcgaggacttcggatgacatccggaagcacctgaaagtgcggcgccagaagcagagggccattttggccatgagatggcgctgtgcccagggaggattggagttcgagcagctggacaccttctacggagccatcaggccatgtaagaccacttttccaaaccactttcatatgtgtctaaacatattacaatggacaatagatctgtgtgtggcgcagttcttcggcattatgcctttgtcgaatatccggagtcgcgatccccaggatgtgaagttcaaggtaaggagcattggcctggcagtcaccggtctcttccttttgctcggtggcatgaagaccttggtcggtgccaatattctcttcacagagggtctgaatgccaagaatatcggtgagttttagatggtatggtagtgtgatcccaactgaaagctcaatagtgggtttggttttccttatcgtgggcatggtcaactggctaaacttcgtgggctttgctcgctcctggtcgcacataatgctgccctggagttcggtggacattctgatgctctttccgccctacaaacgtggcaagcgaagccttcggtc

SEQ ID NO: 33068 - DNA, 1185 bp, DROSOPHILA
atggatagtgagttcctggagctgacgcagctgctgccccgctgggtggatctggaaaatgtggtccgtggtgaagtcgaggcgcgctacatactcaaaagagccgcggatcacctggcgaacttgaggtctggcggagattccggggcggaggaaaccggatatctggtaggtgcgctggtggacaggaactgggaacgcattcacacagggcacttcagccaggttcccttggtcacgaggaagatatacgccatagcctgttgcttcaagagcactagtcccgcccagaaggatgcgtgcagtgagatcctcgatgaggctcaacttttgggttgcatggaggattggagtgaactgaaagtcgccctaatggattatctcgacaaggatggagcagtagcactgaattccgcaccacttccaactctagagccattaacccgagtaacctccaactgtgatataccccaactggacgctcccagtctagaagagttccagacaaagtgctttgaggcaggacaacccacactcctgctcaacaccatccagcattggcctgcactgcacaaatggctggatctcaattaccttctccaagtggccgggaatcgcacggtgcccattgaaataggttccaactatgccagcgatgaatggtcccagcagctggtgaagatccgcgacttcctgagcagacaattcggaaaggaaccaagcaaggctggccaaaatatcgagtatctcgctcagcacgagctcttcgcccagataccagccctcaaagaggatatatccattcccgactactgcaccatcagcaacgaagataccccaggagctgtggacatcaaagcctggctgggaccagctggaaccgtatctcccatgcactacgatcccaagcacaacttgctgtgccaggtattcggttcgaagaggatcatcctagctgctcctgcagacacagacaatctgtatccccacgacagtgagtttttggccaatacagcgcgaatagatgctgctcaactggatcctgaaacatatcccttggtagccaaggtgaagttctaccagctgctcctgcaacctggtgactgtttgtacatgccacccaaatggtggcactatgtgagatctgaagctcctagcttctctgtaagcttctggtgggagtaa

SEQ ID NO: 33069 - protein, 394 aa, DROSOPHILA
MDSEFLELTQLLPRWVDLENVVRGEVEARYILKRAADHLANLRSGGDSGAEETGYLVGALVDRNWERIHTGHFSQVPLVTRKIYAIACCFKSTSPAQKDACSEILDEAQLLGCMEDWSELKVALMDYLDKDGAVALNSAPLPTLEPLTRVTSNCDIPQLDAPSLEEFQTKCFEAGQPTLLLNTIQHWPALHKWLDLNYLLQVAGNRTVPIEIGSNYASDEWSQQLVKIRDFLSRQFGKEPSKAGQNIEYLAQHELFAQIPALKEDISIPDYCTISNEDTPGAVDIKAWLGPAGTVSPMHYDPKHNLLCQVFGSKRIILAAPADTDNLYPHDSEFLANTARIDAAQLDPETYPLVAKVKFYQLLLQPGDCLYMPPKWWHYVRSEAPSFSVSFWWE

SEQ ID NO: 33070 - DNA, 3742 bp, DROSOPHILA
gaaaagcaagcgaggaaatggtttcagtggaagttgaaagttacaaaggatctgaattctctagatatagtgttgcatacttgcagacacctttaaaaattatctcagttttctgtgcataaacaaacgtattctcaattctaaattctcaaaacatgaaatatacatgaaatgcaaaatcgtaacacacttgacttggcatgcatatttcattttttaaaaagcgttttgtatccttgcattctcagttttttagagcggtttgcttcaagttcaaaattcttaaaaatgtgtgttgtgggttatagtaaacattcgcttttattattaatgatataaagcattgtatgtcacaactcgagtgtccagtgatgagtgtgcatcatgttcatatgtctaaatttaagatgattcgcgggccaagcgtgtcaagtgcgacactcgtggaaaaccaagggaacagagggcattgtggaccttgttatcgggcttttctgcgttttgtttgcctttaattgcggcttagtcgacgctgggcccttgaaggagcgtcgtccattctcctggccattccttgagccccgtcacgcggttgtcagccgcttcagctattctcatcgctggcattgtgccctggcttttaattgttcggcactcgcaggctgcaccggtggtcctccacctctggatgccacctaccctggatgccacctcaccaggataccgcctccccttctgcaaacagccgttagcaccgcacacagaatgcattgtgaccttgcacgggcaacaggtggggcgatggaagtgggagtgcgagtgccatctccacttttcctgtgtggttatgcatgaagaattcataggagatttaataacttgtgacttgattgttcgataatcgaggaacatatatgtctgagaatcccaaaaatcctcctttccagcacccaaattgatgacagccgattcgagccaagggaattgatcagcagtcgcgatgccctctcgtcgcggtggtggtggcaccaccaagagaaagcactcgctgggtaacctgcgacgggctcatcccgcctccggagccacatggaacgtccaggtggtgcggggcaagatgtcctcgaagtgcctgtggcacgcctgtcgagccctgatcctgggtctcactctgatgctcctcggcgccggcatggccactttgggctactacgcggatcacctttcgatgggttccgaattgcgtgggaatgtcacggtgcgggtgaagaacgacctcaagggcttccatctgaacaacttcgcgtatgtgggccccattgtcatgggtttcggaggcttcattgtggtggcctcctgcgtgatgaccttcgaggcacgggactccgccgctaaggtcgttccagcacggttgagagctggaggaggcggcagcagcaagaatccctcgcggagcaaccaaggaagctccgcgtcacagcgtcgcgggatgggtaagttcttaaagttcacaccattaaatttgggtgaaagaataaagtattcataaatataatttgatggatgatctgtaggtgcccagtaccagtcgagtcgttgggatcagcacttcggtgtgttccgctcctcgccgggcgatcctcaccagcagccgcagaccgcctgcatctccaccacacatccgcatcagcattcgcatccgcagcagccattcgatcgcgaggcactcaccgccgaactggtccagttctccaggtcactcaggtacagttgtgggctatttcggggagatcacctcattgggaacaggacccaaattatatgtatatatcaaaattcacttatacgattggctgtttctcgctcttaccgcccgcttttcgctttccgaaatctgaaatctgaaatccgcatccgcatcccgcttccgccaaccatcagtgcatccaatcgcttttgtccccagtggcgccgcctttcgggggctggttccgctccggatttgtccggatcccatgctcatgctaataccaccaactccaccaatgccacaaaccaccaaaacccaaccaccacagtcaccactaattactacaatttgctctcactgaatcgattgtcgccgttggattgggaactgtattgctcgcaccgccgtcaccgtcgtcaccatcaccgccactcgcaccaccaccaccaccaccaccacaaatcctcaagcagcagtgtgcggcgggtgcgcccagtgcgaccgggcttgggagcgggatcgcaaccctccggtggaggcggaggaggaggtggaggaggagctggctcctcttcgtcggcccggatcatcagcaattcctccagcctgatccagagggccaccagggagtgctccctgctccagccaccagctgctagtcgtgtctactggcaggcctcctcctttgacggcggcagtaatcatccgcccggattgggcatgagttccggcgcagagaagcgcagtgagcggaacaagcggtcggacaccgccaagcggcacgttctctcccggcaacgacccatcgagcaggaggaggcacgggatcacagtcgcagtccgctgggacacaggcggtgagttcaaggtgtccaatagctcctctagctggctaataacatataccattgcttacaggaactctacaatgtcggactcctcgtatagcggccgctggacggctcgctgtgcctccatggccagtcgaacatccagtatcgagtctcggcgtgttcaagtagatcttcatagtcccgaagtgatgcccaaatccattctccgttcgcccaagcgctacagctcgggtccatcggccacgccttccgtggagaaggagtttcggtatgtccatgttgtacccctccaaatcaagttcccaaatagattttaactcggttttccttgcaggagtcagttatctgtatgctcggagccaccgccaccggtgcgccagctgtcgggccaatccagcatggagccagccgttcccgaggagagtctggatcagtcggaggagcaggaggagacgacacagcccaaggcgtcctacgaggagatcaccgaactgcagcaccacacgagcagcttgccgccgaaaaaggctcgtccgggattcctgcccctcgcgcgcagcgagcaggaggaggatccgaggccagtggccaatccgctatacaggagcaatagttcccgccagttctacaggcccaagaaaggtgttccaaacgagcgggatgattccgttttctacatacggtccatggaaaggggattggctgaaaacggtgggtgtggcagtgcggatgagcagaggtacgattcactgagggtcatcaacgagaggaggaccactttgctgaaagccgactcccagggctccttgggatctgcggagcgaaagttgagcagcttctccctcaaaatgccggagatcacggagcgggagaactcgattgagatcgaaatagatgcggatgagttgcatccaagtaccccgccttctccacccccgcctccgacacagccgggcaattcccacacaactgaatcaatccaggatcaggatccctaggatcgaatggatacacccacttcttagcgtttaaccagcagccatcgacaattactttagcaactcgattgatgtttgtatatgtatttttgtgcgtgtgcgtgtcgtttatttttataacccctagatcgtatctagat

SEQ ID NO: 33071 - DNA, 2208 bp, DROSOPHILA
atgccctctcgtcgcggtggtggtggcaccaccaagagaaagcactcgctgggtaacctgcgacgggctcatcccgcctccggagccacatggaacgtccaggtggtgcggggcaagatgtcctcgaagtgcctgtggcacgcctgtcgagccctgatcctgggtctcactctgatgctcctcggcgccggcatggccactttgggctactacgcggatcacctttcgatgggttccgaattgcgtgggaatgtcacggtgcgggtgaagaacgacctcaagggcttccatctgaacaacttcgcgtatgtgggccccattgtcatgggtttcggaggcttcattgtggtggcctcctgcgtgatgaccttcgaggcacgggactccgccgctaaggtcgttccagcacggttgagagctggaggaggcggcagcagcaagaatccctcgcggagcaaccaaggaagctccgcgtcacagcgtcgcgggatgggtgcccagtaccagtcgagtcgttgggatcagcacttcggtgtgttccgctcctcgccgggcgatcctcaccagcagccgcagaccgcctgcatctccaccacacatccgcatcagcattcgcatccgcagcagccattcgatcgcgaggcactcaccgccgaactggtccagttctccagtgcatccaatcgcttttgtccccagtggcgccgcctttcgggggctggttccgctccggatttgtccggatcccatgctcatgctaataccaccaactccaccaatgccacaaaccaccaaaacccaaccaccacagtcaccactaattactacaatttgctctcactgaatcgattgtcgccgttggattgggaactgtattgctcgcaccgccgtcaccgtcgtcaccatcaccgccactcgcaccaccaccaccaccaccaccacaaatcctcaagcagcagtgtgcggcgggtgcgcccagtgcgaccgggcttgggagcgggatcgcaaccctccggtggaggcggaggaggaggtggaggaggagctggctcctcttcgtcggcccggatcatcagcaattcctccagcctgatccagagggccaccagggagtgctccctgctccagccaccagctgctagtcgtgtctactggcaggcctcctcctttgacggcggcagtaatcatccgcccggattgggcatgagttccggcgcagagaagcgcagtgagcggaacaagcggtcggacaccgccaagcggcacgttctctcccggcaacgacccatcgagcaggaggaggcacgggatcacagtcgcagtccgctgggacacaggcggaactctacaatgtcggactcctcgtatagcggccgctggacggctcgctgtgcctccatggccagtcgaacatccagtatcgagtctcggcgtgttcaagtagatcttcatagtcccgaagtgatgcccaaatccattctccgttcgcccaagcgctacagctcgggtccatcggccacgccttccgtggagaaggagtttcggagtcagttatctgtatgctcggagccaccgccaccggtgcgccagctgtcgggccaatccagcatggagccagccgttcccgaggagagtctggatcagtcggaggagcaggaggagacgacacagcccaaggcgtcctacgaggagatcaccgaactgcagcaccacacgagcagcttgccgccgaaaaaggctcgtccgggattcctgcccctcgcgcgcagcgagcaggaggaggatccgaggccagtggccaatccgctatacaggagcaatagttcccgccagttctacaggcccaagaaaggtgttccaaacgagcgggatgattccgttttctacatacggtccatggaaaggggattggctgaaaacggtgggtgtggcagtgcggatgagcagaggtacgattcactgagggtcatcaacgagaggaggaccactttgctgaaagccgactcccagggctccttgggatctgcggagcgaaagttgagcagcttctccctcaaaatgccggagatcacggagcgggagaactcgattgagatcgaaatagatgcggatgagttgcatccaagtaccccgccttctccacccccgcctccgacacagccgggcaattcccacacaactgaatcaatccaggatcaggatccctag

SEQ ID NO: 33072 - protein, 735 aa, DROSOPHILA
MPSRRGGGGTTKRKHSLGNLRRAHPASGATWNVQVVRGKMSSKCLWHACRALILGLTLMLLGAGMATLGYYADHLSMGSELRGNVTVRVKNDLKGFHLNNFAYVGPIVMGFGGFIVVASCVMTFEARDSAAKVVPARLRAGGGGSSKNPSRSNQGSSASQRRGMGAQYQSSRWDQHFGVFRSSPGDPHQQPQTACISTTHPHQHSHPQQPFDREALTAELVQFSSASNRFCPQWRRLSGAGSAPDLSGSHAHANTTNSTNATNHQNPTTTVTTNYYNLLSLNRLSPLDWELYCSHRRHRRHHHRHSHHHHHHHHKSSSSSVRRVRPVRPGLGAGSQPSGGGGGGGGGGAGSSSSARIISNSSSLIQRATRECSLLQPPAASRVYWQASSFDGGSNHPPGLGMSSGAEKRSERNKRSDTAKRHVLSRQRPIEQEEARDHSRSPLGHRRNSTMSDSSYSGRWTARCASMASRTSSIESRRVQVDLHSPEVMPKSILRSPKRYSSGPSATPSVEKEFRSQLSVCSEPPPPVRQLSGQSSMEPAVPEESLDQSEEQEETTQPKASYEEITELQHHTSSLPPKKARPGFLPLARSEQEEDPRPVANPLYRSNSSRQFYRPKKGVPNERDDSVFYIRSMERGLAENGGCGSADEQRYDSLRVINERRTTLLKADSQGSLGSAERKLSSFSLKMPEITERENSIEIEIDADELHPSTPPSPPPPPTQPGNSHTTESIQDQDP

SEQ ID NO: 33073 - DNA, 5298 bp, DROSOPHILA
aacgtagaaggattggtgtgcattttttttagatttcctccaatagtctcagatttattttcagacatattttccaactgattaaggttgtttttagttcatatttcaaagagctgaaaaatcaaacgatctttttgaatcaaaataaagcctattcttggaagcgcagttggttggaaaacacatagagatattattttgatcgcagctgtcgtcactagtcttcctattgttagaatatgagatatatcacgttattacgatcccatatctggggccgaaatgtcccgttgggtgtaccgttgttatcaatactatttatcggttaatgttaatgctaatctctacgaggatgtgtactcacaacgatctaaatacgagggcgtggccaaataaatgccagacttgtgcataccctgtaaaaagtacaatcagcttatagtaaagactgattaggcaaattgatttacaaaattggtcaatggcgaatggaaaactagtcaatgaaaagcaatcggaacacggattaagttcgatgcacatatataattagttgtacgctctcagtgttaatccccacattacagcattatatgtacctatacgattatatatctgagtgtttatttgtaatccatgcaattacaatgtttctcgttccataatagatgttgaaaatcccacagcaatccgaaaattcaaaatgcccgagttggtttaaatggaaggccgaacacgaatctctgttgatgtgcagcgaatttttgtataattgttcattgcatgtttaatattgcataaataaaaacaaacaatgtgtgtctaataatagtcttggtgttttgtattgtcgaatacgtccgaaataggttttaataacatagtcaagcattcaaattacccgccaattttccacagcgttgccatcggttgcaggcgggtggccaccctggccatcgatagcacgcgccgacgattatcgcactgtcatcgaattgcgacaaccctgggagcaggaaggtttttcggccgaaaaatagagaacaataaaacgtttgtggccctcagcaatatagggatcgccgagtgccgtgttaaccggtgacctctcgcccgtgccccgagacctgtgaccccgcgcaactgcccgcctcaatgttaatttgtggcagcaaaagcagcagaatttggagcagcagcgtgtaaaaagttgcggaattatcgtggcaccgcggagaaagagagagcaggagagagattgccgcacgcataaaatatgatcaaattgcaaaattgatttcaattggccactcaacaaaaggtacgttcgatacacccgccccggcgcccacgaaattagcacaataataacaccaaacacctggctcctccatttacataaaactcggaagaagtaaacctggcaactagtagggaatcgtggactttttgcttccagcgaacgttattttcccatttcttccatttgccctgcctctccgtgtgtgcatgtgtgcgtgtgtgtgagtgcgtgcatgtgctggtgtatgtgtgttgtgttcggcagagatgagtaatttaaaactcccaaagaacagcaatgaatgtctgtcaaatgcaggtagttttcaagatgaacgaccagcttccatgccgaagtcatttcactttccatgaccaacttctaatctagaaaaacccattaaaagagccctttgaacctgttacattcgtgaccgatatttacgtgagccggcaaatcgtcgcaattactcatctctagcgggcgccgtgtggcaccaaaaaatcgtccagaaaatgtccagaaatgcaatgggcagcagttagttttgtttgataaatatgcatttataatgcgtctacatttgagataattcccgtgtaagccttatttaaattatgcgtctcttttgctttgtttatttgattttctcattacaccgtctcatcacagctgtgcggccttgccagatcgcttttctggctgcggcacgcggagtggcgtgaattgaaaatcgcatttaattagaatttaacctgcgtcgggtaaaatataatgaatttgtgcgctccagctgcataagctagtgttagaattgaagttactttattgatgtgatatatttaaacgtgcggctcaagatttgtagaatcagccatagtattcaacagttggtcttgtcaatagaaattgttttgaatcattaccctcatgcccccatactttatattaataaatttaattaggggactctaataaatggtgtattcttctttcgactgcgtgcataattaatattgattgcccagtcttatataattatctccttaatgtactaattaatcaattgctatgcgctctctttccgatcagcaaaaaccaatttcaatgtttggcgcctgctgcgactcttgagactcgtctaaatccgcaagtacattcaaccggaatttgagccaagtttctaacctttggcctcaaagccatggcatccacgtcgtcgtcggcttccacgacggcgggatcctccggcgcggcaggcggaggagcagccacgcccatctcaacgccctcgacgccccagccgtctggcgtgagcagcggacccggcaataatggcaacaacaacaacaaccatcacaacaacaccctggtctcaccatccgggaacaacaacttgatgacgcccgtccaggcattcactccaaccggacagccagtgtacaatccacccgtctatatgtccgcccacggaggacacccgcacgccggagcccactacccggccatgatccccgctccgatgcccagcaatcacgtctatgtgaacaacgtcactgccaatgtgaacctgcatggctggccgcacggtgttccggcttatatgccacccggaggtcagcatcactacattggacacggcgacatgccccaggagcaggtgggtgaaacagaacaggatctatatacatctgttcgataatttcgctaattactaagcattgttactagctagcacctacattactgaccttcttacttgttattccacacagggcaacacggtgatgccgcacctgcagcctgtgcccattaatttggcgccccagggcggatctccgaatccccatggtcctagaatgggtggcggacggatgcgcgaacgaggtcgtccccgtggcggtggaccgcgacgcaatgactaccatgggccacgtcacctccagcagcagcaactgatcacccttccgccgcagcagcaactgccaccgccggacggagccaatcccgggctgcagcttcagccggatcagattggtcagcagttggcgccgccggaggcgcacatgcagcacttacagcagtactacgcggcgccaccaacctacgcctacgggccatatccctctccctacttcacaccccaacatgccaatgtgcagcctccccccaatgccactgctgcccaacaggcaactggaacgccgctcttcatctccggaccgctgatgtataatcctgcgtggttcaaccacggtgggtacatctaccccatgatgcatccggctgagtaccagtatgtacccgaagacgctggccagccgggagtggatgaacgtggagctcagccggacggcggaatgacccagatctggcaccagggccccatgtacgcagaggacttcgaagcgctacagcagcagcaacaacagcaacaggtggctgtgcatcccaatggaggtgctgtcagtgtagccgatgagctcaaccacaatagctcatccctgccctcctcggagacgtcgagcatgatcagtccaaactatcccatctacgatccacagatgcacgaaatgcagcaccaaatgggcgtgatgcagatattcgacgatggtcagatggccgccctgcagccaatccatccaggagcgggtccgctaccgcaggtaagtgggcctggcataccgtgaagctaaagacaatggcaatactaaacatttcttatcgttaatagtacgaggacgagctagccgagtgcggagcaccgccaccaggccctattccggtggcctggactgctgccatgcccctccctccggatgcagtccagccagctctgctgccgccaccgccgcatcacattttgcagcaaacgtcgcccctgttaatcgaacagccagcccagttggttcaggcgcaacctccgcagccaccaacacccactccccaacagcagcagcaacaacaacatcaggagcaaacgggtgagtgctagtgctcggtattgattagtgattcatttgggaattggaattcataatgcaagctgagtttcactttgtctaatttcccattttccattccgaacgttcataatcttgcatcattcgatgttgctcgataaggaataatcaatcattatgaattgtataaaaactagaactttgcacagaccaattgaaaaatgtgtatattggctgagtcatgagtatttgaataatctcctcgttgtgggtcaatgacttttcactatcttactattatgagtttttgttgtcaactaattcttaacttcagtcgatttagttgtacatatgtggtgtgttcctctctcaatatatatcaccatatattttatcacaactataaagtaactctgcatttgtcctgttattgttttggagcaagctcagcgataaaggcagcgagatcattttgtggacttttaacacgactttcgcacagagtatctgcgtttcgtgttactttacatctattgaaaggcagtttttctatgttgtacgagtatattggaattcgtcatggcgtgccttcgatagcgtcgcctggtcccgtgttcatatgcagttttttgcttgctttgcttttccacgctttcattaactatattctcttcagttgccttacactcttctcaggtgtcaaatgacataaacgtatttacgtatgtgtgcacattttgccatagtttgtgggccttaattattctgaatgcttgttgccaggcctacctttgttttcggttgcccttttgctttgggctgggctttcatctatcgtcgtgtagtcgccaacaggtgttgaacttgttgaccacccatccacccactgaatcatccacaacccactctctaatcagcagcacaagtcgcttccgtccagttctttgttattattattttgtttgctcgtttcttgtgtgcattgttcacgcttatcaatcgaatgggcggacaaatccgagtgaaaatacc

SEQ ID NO: 33074 - DNA, 2041 bp, DROSOPHILA
acaaccctgggagcaggaaggtttttcggccgaaaaatagagaacaataaaacgtttgtggccctcagcaatatagggatcgccgagtgccgtgttaaccggtgacctctcgcccgtgccccgagacctgtgaccccgcgcaactgcccgcctcaatgttaatttgtggcagcaaaagcagcagaatttggagcagcagcgtgtaaaaagttgcggaattatcgtggcaccgcggagaaagagagagcaggagagagattgccgcacgcataaaatatgatcaaattgcaaaattgatttcaattggccactcaacaaaagcaaaaaccaatttcaatgtttggcgcctgctgcgactcttgagactcgtctaaatccgcaagtacattcaaccggaatttgagccaagtttctaacctttggcctcaaagccatggcatccacgtcgtcgtcggcttccacgacggcgggatcctccggcgcggcaggcggaggagcagccacgcccatctcaacgccctcgacgccccagccgtctggcgtgagcagcggacccggcaataatggcaacaacaacaacaaccatcacaacaacaccctggtctcaccatccgggaacaacaacttgatgacgcccgtccaggcattcactccaaccggacagccagtgtacaatccacccgtctatatgtccgcccacggaggacacccgcacgccggagcccactacccggccatgatccccgctccgatgcccagcaatcacgtctatgtgaacaacgtcactgccaatgtgaacctgcatggctggccgcacggtgttccggcttatatgccacccggaggtcagcatcactacattggacacggcgacatgccccaggagcagggcaacacggtgatgccgcacctgcagcctgtgcccattaatttggcgccccagggcggatctccgaatccccatggtcctagaatgggtggcggacggatgcgcgaacgaggtcgtccccgtggcggtggaccgcgacgcaatgactaccatgggccacgtcacctccagcagcagcaactgatcacccttccgccgcagcagcaactgccaccgccggacggagccaatcccgggctgcagcttcagccggatcagattggtcagcagttggcgccgccggaggcgcacatgcagcacttacagcagtactacgcggcgccaccaacctacgcctacgggccatatccctctccctacttcacaccccaacatgccaatgtgcagcctccccccaatgccactgctgcccaacaggcaactggaacgccgctcttcatctccggaccgctgatgtataatcctgcgtggttcaaccacggtgggtacatctaccccatgatgcatccggctgagtaccagtatgtacccgaagacgctggccagccgggagtggatgaacgtggagctcagccggacggcggaatgacccagatctggcaccagggccccatgtacgcagaggacttcgaagcgctacagcagcagcaacaacagcaacaggtggctgtgcatcccaatggaggtgctgtcagtgtagccgatgagctcaaccacaatagctcatccctgccctcctcggagacgtcgagcatgatcagtccaaactatcccatctacgatccacagatgcacgaaatgcagcaccaaatgggcgtgatgcagatattcgacgatggtcagatggccgccctgcagccaatccatccaggagcgggtccgctaccgcagtacgaggacgagctagccgagtgcggagcaccgccaccaggccctattccggtggcctggactgctgccatgcccctccctccggatgcagtccagccagctctgctgccgccaccgccgcatcacattttgcagcaaacgtcgcccctgttaatcgaacagccagcccagttggttcaggcgcaacctccgcagccaccaacacccactccccaacagcagcagcaacaacaacatcaggagcaaacgggtgagtgctag

SEQ ID NO: 33075 - protein, 535 aa, DROSOPHILA
MASTSSSASTTAGSSGAAGGGAATPISTPSTPQPSGVSSGPGNNGNNNNNHHNNTLVSPSGNNNLMTPVQAFTPTGQPVYNPPVYMSAHGGHPHAGAHYPAMIPAPMPSNHVYVNNVTANVNLHGWPHGVPAYMPPGGQHHYIGHGDMPQEQGNTVMPHLQPVPINLAPQGGSPNPHGPRMGGGRMRERGRPRGGGPRRNDYHGPRHLQQQQLITLPPQQQLPPPDGANPGLQLQPDQIGQQLAPPEAHMQHLQQYYAAPPTYAYGPYPSPYFTPQHANVQPPPNATAAQQATGTPLFISGPLMYNPAWFNHGGYIYPMMHPAEYQYVPEDAGQPGVDERGAQPDGGMTQIWHQGPMYAEDFEALQQQQQQQQVAVHPNGGAVSVADELNHNSSSLPSSETSSMISPNYPIYDPQMHEMQHQMGVMQIFDDGQMAALQPIHPGAGPLPQYEDELAECGAPPPGPIPVAWTAAMPLPPDAVQPALLPPPPHHILQQTSPLLIEQPAQLVQAQPPQPPTPTPQQQQQQQHQEQTGEC

SEQ ID NO: 33076 - DNA, 6110 bp, DROSOPHILA
atacacattttagcatgttcaaaatggccagtaggcggttataaataataaatgatagcagcacaagtacaggctgccctgggaaagtcgtctttggaaatgagatccaattcgaggaataaatttaaattttgaatcgagaaaagagcgggcaaggtatgtaacgtaatcaaagtagtattaggtagtaatcggatccttattgtacaattcttaaacattttgatattttgtcattgtttttataaagggagtgatttatttatcaggcttgtattgagatatttctgaggtatgctctcgatatctatagtttacatttcccaatattaatcccgacccagatttcgctttgtataaatgagggagcgatctgtttgaactgaatctgggatgggagggagatcacatggatgttgactgccattcgcctgtgttggcttaacctttttccgactctacattgtaaggttcttatcgagttgggaacgagtggccatgctggtttatctggtggctcatatcagggtcgagtgcgaagttcaaacacctagcaacaggccaatcatccgccagtgatttaataacaatttggcccgccgaacagcgtaaatggggtctactctccaccacctcgcactgttttttccctacttgagtttgacatggattagttatgttttctatttgcactgatagctgcaatcgatggcccgcttatcagtatcagaacgaataaagcagaaagaagggggggatatgagaacaatgcctgccggcagttattggatcatccataaacatatgtagactgaaaacccccatggagccggaaaagggagagatatgcgtgctctctttttggatcagctctttgtatacgaatatgcaggcagattagtaggcttatccgtatttgctgtggatattgtttgttaaatttgtcagttcttcacattatatcgaatcattttggggtttaattaagcattaattgcctatggcttcccaaaattccaccacaagtcagacagccaagcattccgtcagtgatcgttggagttctaagcatttagcttcaattggcatcaattatgttgattttgtaaattagtttgcatgcggcaattgaatttcttctcacatttcaacagcgggtgctgggaaattgccatttaaggtcagagtaaaagcttttattgattgtaatcaactttcttgctctttgcagctgacaagagtttgacacagaacaacaacgaagtggtggccttggatgaaaagttggccaacgagaagcagcagcaaatcgatttccaccagcagcaacaggagcagcagcaacagcagcagcaacagcagcagcagcagcagcttcatccactagcacagcagcagcagcaagaagagcagcagcaaccgcagcaactacagccgctgcaaaccgaaaaaccgccaacgaaagtgccaaaccttgttgtagctacagtggcacctcagctgcaacagccaccgctgcagcagcatcagcaacagcaaacatcacctgtggtggtgtcgccaaaacagcagcagcagcagtcacaagctgcgcaccagaatagctaccatgatcagcatcctttgccgcagcagcagcaaccgcagcagcagcaaccgcagccacagcgcaaaccctcgcagcaatacaatcaagcgcagcagcaacaggtgcgtcgtaagtactcctcagagtacaatcaccatcatcaccagcacggcagcagcgacacgggcatccaaactaccaagaccatgtcctggaccaattcagctcagcacaaaaagtcgacgcagtcggtgtcggtcaccgcttctcccaatagtgtaaacaatggacctggagtgggtgctgcgggcaaagccaactatagtcacaccactaagacatttaccaatcagcagcattaccagcagcaacactatcacactcagaacagctataacaacaacagcagcggcggaggaagcagtagcaacagcagttcgagcagcagcaacaatcagccccaggtgcgcaactatggcaccatgaagatgccctcttcgccggtggcttggacagcgccaacaccggagcgcaaaaacagccaacaggcagcagcggcaccggcagcagcaacagcgtctgcagctcccgtggcaatcacaacagtaactacctcaacggccagcattacggctaccccaaatcaatttcaaccggagaccggcagcagtagtgcatcaccagccgtagctgccgcgcagcaacagcagcctgcagcacagcaacatgcgcaggccgcacaaacaggagcagcagcagctccaagcaagtcccacagcaactatgcttcttctaaaaagcatcagagctatgagccagtagtgctgagctccgtggtggccaccagttcatcagccaatccgcagccgcagctaaatcttgccccacctgcgccaccagcctcgcagaacagcagcgacagttcgcagctttcgtgggccagtttgtttgccagcaacaagcccgtggccaaggtggcgccctacgaagccagcaaaattgcacagcagcagccatcccatccagtgcttcaattggctcctccgcagccagctcaagtggcggctgccgccccagttgctcagctgtcgtcgcctcctcagaatttgcccctgcctacggctcaccaacagtcacagttaccagcacctgtgccggcgcccacggctccgctggtcactccaggagcgctctcctattcggctgcatccgctcaggcagttcctgctcccagccccgcgtcggcatccgtcaagcccctcaagccggaaccaccgcgtcctgtgcagcagcaactggatgagtggaccagcaagtacgctgagtacctgacgcgccacaagaccaatttggcgtcgatcagcttgcgtccccgaggactgaccaacaggtcgaactattgctacatcaactcgatcctgcaggcactgctcggctgctcgccgttctacaacctgctgcgctccattcccaagcaggcggctgtcctgagcgaggtcaaaacgcccactgtgaacgccatgtaagtttatagcacgaactggggggaatgggtctaacactaagtctgagaactgggattgaacttatatttggctcaatcaaatcattcgaagccaagccacaggcaagtcaacagacacttcggcaccaattgccagccggcgtctgtgttacgtttgtggaagatgaaatgccaccggctctgtctacgctctttggttacctccgttttggcggtagctgctgagtgttggggttggtgcacgtgctccggttttaagtagaagatctcacgttcattggatttcttcgccgaatgcggcacaaacaatattattattttacacagccgtttccgttttataacctttcttttttttattgcctataggatgtcttttatgaccaacttttcatcgttgcccagcggtcttcgcctgcgtctgaacaaccttaacaagggatcgcaaagcaagggcaaggacgattttgtgggctcagatttgcaatgcgacatggcctttgaacccacagagatctacaagctgtggaacgacagtcgcgaggagcatgtcgaaggtcgtcaagaggacgccgaagaattcttgggctacgttctaaacaagctgaacgacgagatgctggaggtaagtgtttggcaaaagttgtggttccagatttctgattgtcttgtttgctttgttgcaggtgattaagctaattgataagcccacaccccagcaaaatggtcaggaacccgcggaaccagaggatggaggcgatgtctggcaggtaagttaattgctttattatgatgtcattgcgcttaattgaatgtttgcctccccagatgatttgcaacaatcgtaataagggcagcgtaacccgccagaccgacttcggacgcactcccgtaagcgatatcttccgaggagaactgcgctcccggctgcagcgtgaaggagaacactccacggatgtgattcagcctttctttacgcttcaactgaatatcgaagtgagttttgagtgttgataccatttttagaatttgttttatgtttttggcttcgtcatagctttatccgtaataaatcattcaatcaccacagacaagtcaacagacacttcggcaccatttctcagccggcgtctgtgttacgttcgtggaagatgaaacgctcagcctcgcctgcgtttggtgattgtttccgttctggcgatggtcaccagacgttggggttgatgcacgtgctccgctttttaatagagataattgtattcaatagttttttcaacagtgggcacaaacaataaatgtagaataattattactaagataatcttgcacaaatcagctttttaaattcattaatattatatctctacagaaagctgcatctgtgaaggaggcactggagatccttgtgggtcgcgatcagctggagggagtcacaggcagcaaaaccaaacaggaggtggtggcctggcagcagatgacgctggagaaactgcccgtcgttctgatattgcatttaaagtacttcgactaccgctctgatgggtgcactaagattttgaagaaggtggatttccccgtggaactaaagatcgatgccagtatgttgccattaaatcagcattaccgtaccgatgttcattttcgactttgtttcagaaatcctcggctcaaagaagacctcgcagaagcagcgcgcctatcgtctgtttgcggttgtctatcacgatggcaaggaggcgtcgaaggggcactacatcacggacgttttccacacgggctacagcagctggctgcgctacgacgacagctcggtgaagccggtcagcgagaagcatgtccttcagccgcacacgcctcgtgtgccttacctgctgtactaccgccgttcagacaccctgccaccgcaacagcagcaaacccagcagcagaatggcggaggatcaggtggagtcgtgggcagcagctcatcatcatcgaatgccggggataacaagtgaaagtgaaccacaacgcggcgttgtaaaaatacatcagaactttaagtgctagcgatatactttatatttttgtgtcagtgcgtgtgagcgagcgagaatgcgagtttggttttatatgcatatacatatacaaattaacaattagatatattcgagcggtatatagttaagcccaaagtccaaagcgcatgaccgtttgttagagtacgattgtgtgagaaagaaacttagctctaagctagactagaattaaggttgagtagaaaaataggcagcaaaagaaactcgttggaacgaaaactttgtacaaagagaaacgaaagaactctgtaaactaaacagcgagtaaataattaacatataacttagtgctaaatttacaaaatccttcagcgtagcgaaaccccaaaatatctgtggcacaaaagccctcccagatgttagaagtagtggatgttagaaatgcccttaaataccttttggaatttggcgatatgttatgacaaacgcttacagctgtatatatacacaaataatcatatattgtagttgatcagtttcgcggcatgcaccatgcatttaaacaaacaaacccagcaacaatatatatcgaatgctttgaatatgctttaaagaaatatacatttagaaccaaggtgttttccacacaaagagtaaatacaggcagtggtggtcagagcaatagccgcaagcatttcagcatctgtaagccaaattgggttacttttgttatggtctcgaagaccaaatcaaatagatatttcctttactaacaatttttgctcatgtagatggaagtttaaacatgaaagtaacgagctgaataaattatctatacggcttttctagaccactactgcatgttgcattgcatataagcagcaaagtaagttaacaacgcgttcattttgtaatttattttatatgttgtttagttttatacgtaatcagttaggcgagcagattcatatatacacaa

SEQ ID NO: 33077 - DNA, 3012 bp, DROSOPHILA
atggcttcccaaaattccaccacaagtcagacagccaagcattccgtcagtgatcctgacaagagtttgacacagaacaacaacgaagtggtggccttggatgaaaagttggccaacgagaagcagcagcaaatcgatttccaccagcagcaacaggagcagcagcaacagcagcagcaacagcagcagcagcagcagcttcatccactagcacagcagcagcagcaagaagagcagcagcaaccgcagcaactacagccgctgcaaaccgaaaaaccgccaacgaaagtgccaaaccttgttgtagctacagtggcacctcagctgcaacagccaccgctgcagcagcatcagcaacagcaaacatcacctgtggtggtgtcgccaaaacagcagcagcagcagtcacaagctgcgcaccagaatagctaccatgatcagcatcctttgccgcagcagcagcaaccgcagcagcagcaaccgcagccacagcgcaaaccctcgcagcaatacaatcaagcgcagcagcaacaggtgcgtcgtaagtactcctcagagtacaatcaccatcatcaccagcacggcagcagcgacacgggcatccaaactaccaagaccatgtcctggaccaattcagctcagcacaaaaagtcgacgcagtcggtgtcggtcaccgcttctcccaatagtgtaaacaatggacctggagtgggtgctgcgggcaaagccaactatagtcacaccactaagacatttaccaatcagcagcattaccagcagcaacactatcacactcagaacagctataacaacaacagcagcggcggaggaagcagtagcaacagcagttcgagcagcagcaacaatcagccccaggtgcgcaactatggcaccatgaagatgccctcttcgccggtggcttggacagcgccaacaccggagcgcaaaaacagccaacaggcagcagcggcaccggcagcagcaacagcgtctgcagctcccgtggcaatcacaacagtaactacctcaacggccagcattacggctaccccaaatcaatttcaaccggagaccggcagcagtagtgcatcaccagccgtagctgccgcgcagcaacagcagcctgcagcacagcaacatgcgcaggccgcacaaacaggagcagcagcagctccaagcaagtcccacagcaactatgcttcttctaaaaagcatcagagctatgagccagtagtgctgagctccgtggtggccaccagttcatcagccaatccgcagccgcagctaaatcttgccccacctgcgccaccagcctcgcagaacagcagcgacagttcgcagctttcgtgggccagtttgtttgccagcaacaagcccgtggccaaggtggcgccctacgaagccagcaaaattgcacagcagcagccatcccatccagtgcttcaattggctcctccgcagccagctcaagtggcggctgccgccccagttgctcagctgtcgtcgcctcctcagaatttgcccctgcctacggctcaccaacagtcacagttaccagcacctgtgccggcgcccacggctccgctggtcactccaggagcgctctcctattcggctgcatccgctcaggcagttcctgctcccagccccgcgtcggcatccgtcaagcccctcaagccggaaccaccgcgtcctgtgcagcagcaactggatgagtggaccagcaagtacgctgagtacctgacgcgccacaagaccaatttggcgtcgatcagcttgcgtccccgaggactgaccaacaggtcgaactattgctacatcaactcgatcctgcaggcactgctcggctgctcgccgttctacaacctgctgcgctccattcccaagcaggcggctgtcctgagcgaggtcaaaacgcccactgtgaacgccatgatgtcttttatgaccaacttttcatcgttgcccagcggtcttcgcctgcgtctgaacaaccttaacaagggatcgcaaagcaagggcaaggacgattttgtgggctcagatttgcaatgcgacatggcctttgaacccacagagatctacaagctgtggaacgacagtcgcgaggagcatgtcgaaggtcgtcaagaggacgccgaagaattcttgggctacgttctaaacaagctgaacgacgagatgctggaggtgattaagctaattgataagcccacaccccagcaaaatggtcaggaacccgcggaaccagaggatggaggcgatgtctggcagatgatttgcaacaatcgtaataagggcagcgtaacccgccagaccgacttcggacgcactcccgtaagcgatatcttccgaggagaactgcgctcccggctgcagcgtgaaggagaacactccacggatgtgattcagcctttctttacgcttcaactgaatatcgaaaaagctgcatctgtgaaggaggcactggagatccttgtgggtcgcgatcagctggagggagtcacaggcagcaaaaccaaacaggaggtggtggcctggcagcagatgacgctggagaaactgcccgtcgttctgatattgcatttaaagtacttcgactaccgctctgatgggtgcactaagattttgaagaaggtggatttccccgtggaactaaagatcgatgccaaaatcctcggctcaaagaagacctcgcagaagcagcgcgcctatcgtctgtttgcggttgtctatcacgatggcaaggaggcgtcgaaggggcactacatcacggacgttttccacacgggctacagcagctggctgcgctacgacgacagctcggtgaagccggtcagcgagaagcatgtccttcagccgcacacgcctcgtgtgccttacctgctgtactaccgccgttcagacaccctgccaccgcaacagcagcaaacccagcagcagaatggcggaggatcaggtggagtcgtgggcagcagctcatcatcatcgaatgccggggataacaagtga

SEQ ID NO: 33078 - protein, 1003 aa, DROSOPHILA
MASQNSTTSQTAKHSVSDPDKSLTQNNNEVVALDEKLANEKQQQIDFHQQQQEQQQQQQQQQQQQQLHPLAQQQQQEEQQQPQQLQPLQTEKPPTKVPNLVVATVAPQLQQPPLQQHQQQQTSPVVVSPKQQQQQSQAAHQNSYHDQHPLPQQQQPQQQQPQPQRKPSQQYNQAQQQQVRRKYSSEYNHHHHQHGSSDTGIQTTKTMSWTNSAQHKKSTQSVSVTASPNSVNNGPGVGAAGKANYSHTTKTFTNQQHYQQQHYHTQNSYNNNSSGGGSSSNSSSSSSNNQPQVRNYGTMKMPSSPVAWTAPTPERKNSQQAAAAPAAATASAAPVAITTVTTSTASITATPNQFQPETGSSSASPAVAAAQQQQPAAQQHAQAAQTGAAAAPSKSHSNYASSKKHQSYEPVVLSSVVATSSSANPQPQLNLAPPAPPASQNSSDSSQLSWASLFASNKPVAKVAPYEASKIAQQQPSHPVLQLAPPQPAQVAAAAPVAQLSSPPQNLPLPTAHQQSQLPAPVPAPTAPLVTPGALSYSAASAQAVPAPSPASASVKPLKPEPPRPVQQQLDEWTSKYAEYLTRHKTNLASISLRPRGLTNRSNYCYINSILQALLGCSPFYNLLRSIPKQAAVLSEVKTPTVNAMMSFMTNFSSLPSGLRLRLNNLNKGSQSKGKDDFVGSDLQCDMAFEPTEIYKLWNDSREEHVEGRQEDAEEFLGYVLNKLNDEMLEVIKLIDKPTPQQNGQEPAEPEDGGDVWQMICNNRNKGSVTRQTDFGRTPVSDIFRGELRSRLQREGEHSTDVIQPFFTLQLNIEKAASVKEALEILVGRDQLEGVTGSKTKQEVVAWQQMTLEKLPVVLILHLKYFDYRSDGCTKILKKVDFPVELKIDAKILGSKKTSQKQRAYRLFAVVYHDGKEASKGHYITDVFHTGYSSWLRYDDSSVKPVSEKHVLQPHTPRVPYLLYYRRSDTLPPQQQQTQQQNGGGSGGVVGSSSSSSNAGDNK

SEQ ID NO: 33079 - DNA, 4553 bp, DROSOPHILA
gatgtttaacaatgcgaaacgattaacaacacaatctgaagtgaaataattagtccacatttagtctaaagaaaccatgctaaagtaaatctacaaagtaaagcgaattcagttaaactaagtaaacataacaagcggatatgtaccatggaaagctaaatcataaacgaccgaaatgaaatgaacattatctagcaataaaataaacgagtgatttcattgccacaagcaaagccgttcgctctggattaactgggatttcagtgggcgagaggcgctaacttgtgccggagtgggtcaagaggaggttccaaaccggttggccacaaaaatagatgccggtgcgttcctccggatgctcttggcccacgaaagggaaagggaaaccattcggcggctagtcagccgataattgtcagcgactttggaccaaatttagtcttgttttggtttcctattgttgactattggaaagatttgctgaaagagacgaccgacgcgacatggcagcgaagacgaactcaccgcaccacgtgtgactcattacaaatgccaatcacaagccaaagctgaaaactcgttttggccgggctgagagaggtgcacttgaaacaaaatcttatgcggcaacttaaatatgttttttttctgattattaatcgtttttggtttgcagccttcaacaaattgtttccgtttcttatattatgtttataaaaatgatttattttttgttggaagctactatgaaattgtttctttcagtgactttaattgcccacatctttctcagttgggggagactctttaagccatttgcgatgtgagcccatcgagcagtcgacgatcagctggcggcgatgagcgacaccgcgaaatgcattcgctgtgcccccggctcgttttgtaagagctccactccagtgccctccatttccccacagcggaatcgccaaatgccagctggagctggttagttgcagccaggaacactctcgccatgtatcgcaatatactctgcctggtgctgggcctcatcattggcattcaactgacagacttcttagagtactttcagctgaccgatagtcagttcgccagcacgtccattacgcagctggaggaaggggccagccagctggcgacggaggaggaactggccttgtggctccataacgagacacgggtactctgcatggtgctaaccctgccaaagaatcaccaatcaagagtgagacgagttaagggcacatggggcaggcgctgcaacaagctgatcttcatcagcagccaggaggatcgggaactgggcgtcattgatgtgggcgtgcccgaggatcgaaacaacctgtatctcaaaatgaggaaggccctagagtatgtgtaccggaaccatggagaagactacgactggttcctcaaggcagatgatgacacgtaagtgaaaacataccgagttccaaaatcacatattcattttcacccaattttagctttgtgataatggaaaacctgcgcttcctgctctatccctatgatcccgaggcagcgctctactttggccacagattccgcaccacctttccgcagggctacatgtccggaggagctggctatgtgatgagtcgggatgcactgcgtcggctcaatctctttgccttcaacaacagccaattctgcccgattaacaacaattcagaggacaggcagattggcttctgcctgcaaaatgtgggagtagttgcaggggattcgcgggatgaggaaggccgggatcggtttctgcccttgtctctcaaatttatgctgcctacctttcccaccgacaattggctgcccaaactgacattttatgaaccagtatgtataatatcttagaaagtactacattatttctaatatattattgtttcaggtgaatgaaactggctcgacttcgggaatcagctttcactatgtcaaaatccacgagttcgaaatgtatgaatacctgctatatcgattgcacatttttggaactcccttgtcccagagaacgctgccaccccgactgggtcccgatgaactgcagaatcagctgaatcagtgggctcaagaaaatagcacgaattcaaacgcgtggctgaaacaagaataatatatatagtatattagtacatatttaagactcattttaacataccgacagtcaaatagaattagtttttaaactcttaagaatatcattaaatagaaaacaattgtttttatactttcaagactttgtgactgactgccatcagcagtttaccaacgaacaaattgtattgtttcacggactctctaatcgaaatgtataaacgaaattgctgcgccaattggacacagcatgggatctctcttctcaccaaagaaaatactgcaatcgcagtatacaatgatcctggtaatgattcggaacatcatcttcctcgtcttaggcattatgttgggcattcgactcaccgattttataggctacctgaagctgtggaggaataatgacttgcgggcgagtgagaaggctgctctacttaagtatccagtggcctcggaggagcacctggctacctggctgagaagggaggtgcgcatactctgcctagtgctcacgatgccatcttcacatgccacaaaggcggcgttggtaaatcggacatggggagcgcgttgcaataagctgatctttatgagcagccaaacagattccaatctgaacatactccagataaacaaatccgaatcccgaaagaatctatatgccaaagtgcgtacaggaatggcctacgtacacaagcattatctaaacgagtacgactggtttctgaaggccgatgatgacacgtaagtgatgcaatttggccaatgggcacagagcctaagaaatgtatctttgcagttatattgtcatggagaatctgcgcctgtttctatacccttacgatccggaatcgtctgtgtactttggctgtcgcttcaaagcgtatttttcccagggctacatgtccggtggcggtggctacgtgctcagcagggacgccttgcgtcgtctgaatctgttcgccctgaacagcaccaccatctgcaagttgaacggggagtctgaggacgttcagatcggtcactgcctgcaagatgtgggtgttatagctggggacacccgggacttccagggtcaccaccgcttcctgcccgtcaatcctttcacggtattcccaaccatcctaagtaattcctggctggagggctacttcttccacaagccaaatgtaggattgcatgcccatatacacaactacaatccatataagtaatgttttgctcgtttaagaaaagtgattgctgtgctgcttcggctatatcctttcattatgtcaaagactttgagttcgagcttttcgagttcttcctgtactacatgagagtctttggattgcacaggacgccgagggctcttccgtcgcgcttgggattccgtcagatgaacgagcgcctgcagcattggtcccaacaagtcaccgacaacaagaactaaccaagaatatccaaggatacatctagtcctgtcttcatcaacaagcattatatacttaatctacgatatggaacataagaaaatatatttcgacattaaattcagaacttaatcgggagacactttattgcaaagaagagaaagaactggaaaactagtagctaatttcagttcctcgcctgctgctccagttcccagatcaccctcgcccagccagtgggaatgtctttgacctctgggagttcctcatgcatcacgcaaggacttttggctacccgatggggccactgaagctgcccccacgtctggacttccggtagatgcatgcccagctgcgatattggtcccgggttgtgtccaataaccatgccagacttaatgtaattgctacaccttgataaataaaccaggagccgggaagcgatgaagatttattccagcaataaggcagacaatgtttcgtctcgttcttggcagtgtcgtcctgtcgtccggagttgttttggccatttgtcaagggcgtttgctctagaaacagaatccaaaacccgagccctgcgctttaaagcacaatttatcaaaaaggacgcgtgcccgttttccgaggggagattagggagggaattgagggaatcgagaaccggaaaatcgagcgaaacgtgccaaacacgtgaaaaatacctggggatcattgcattgttatttatgagcaacgaaatgagctcggaggggagttaaaaccggactgacggcacgcgagttcagacagccatgggttcttggataaggataaactcgttttggcaatgcagctggtaccccgaactgcctgtgtgccgctatccatgccaggggtggtggtcgtggtccaaaaaacctctggaacgtgcccaacccagtttcactatctgtatctgaattccgaaccccagttgcgcctgcgctgtttgctttgtttcccctaatagtcgcccatttgctcggctttttgtgcagggag

SEQ ID NO: 33080 - DNA, 2043 bp, DROSOPHILA
atgtatcgcaatatactctgcctggtgctgggcctcatcattggcattcaactgacagacttcttagagtactttcagctgaccgatagtcagttcgccagcacgtccattacgcagctggaggaaggggccagccagctggcgacggaggaggaactggccttgtggctccataacgagacacgggtactctgcatggtgctaaccctgccaaagaatcaccaatcaagagtgagacgagttaagggcacatggggcaggcgctgcaacaagctgatcttcatcagcagccaggaggatcgggaactgggcgtcattgatgtgggcgtgcccgaggatcgaaacaacctgtatctcaaaatgaggaaggccctagagtatgtgtaccggaaccatggagaagactacgactggttcctcaaggcagatgatgacacctttgtgataatggaaaacctgcgcttcctgctctatccctatgatcccgaggcagcgctctactttggccacagattccgcaccacctttccgcagggctacatgtccggaggagctggctatgtgatgagtcgggatgcactgcgtcggctcaatctctttgccttcaacaacagccaattctgcccgattaacaacaattcagaggacaggcagattggcttctgcctgcaaaatgtgggagtagttgcaggggattcgcgggatgaggaaggccgggatcggtttctgcccttgtctctcaaatttatgctgcctacctttcccaccgacaattggctgcccaaactgacattttatgaaccagtgaatgaaactggctcgacttcgggaatcagctttcactatgtcaaaatccacgagttcgaaatgtatgaatacctgctatatcgattgcacatttttggaactcccttgtcccagagaacgctgccaccccgactgggtcccgatgaactgcagaatcagctgaatcacatgggatctctcttctcaccaaagaaaatactgcaatcgcagtatacaatgatcctggtaatgattcggaacatcatcttcctcgtcttaggcattatgttgggcattcgactcaccgattttataggctacctgaagctgtggaggaataatgacttgcgggcgagtgagaaggctgctctacttaagtatccagtggcctcggaggagcacctggctacctggctgagaagggaggtgcgcatactctgcctagtgctcacgatgccatcttcacatgccacaaaggcggcgttggtaaatcggacatggggagcgcgttgcaataagctgatctttatgagcagccaaacagattccaatctgaacatactccagataaacaaatccgaatcccgaaagaatctatatgccaaagtgcgtacaggaatggcctacgtacacaagcattatctaaacgagtacgactggtttctgaaggccgatgatgacacttatattgtcatggagaatctgcgcctgtttctatacccttacgatccggaatcgtctgtgtactttggctgtcgcttcaaagcgtatttttcccagggctacatgtccggtggcggtggctacgtgctcagcagggacgccttgcgtcgtctgaatctgttcgccctgaacagcaccaccatctgcaagttgaacggggagtctgaggacgttcagatcggtcactgcctgcaagatgtgggtgttatagctggggacacccgggacttccagggtcaccaccgcttcctgcccgtcaatcctttcacggtattcccaaccatcctaagtaattcctggctggagggctacttcttccacaagccaaataaaagtgattgctgtgctgcttcggctatatcctttcattatgtcaaagactttgagttcgagcttttcgagttcttcctgtactacatgagagtctttggattgcacaggacgccgagggctcttccgtcgcgcttgggattccgtcagatgaacgagcgcctgcagcattggtcccaacaagtcaccgacaacaagaactaa

SEQ ID NO: 33081 - protein, 680 aa, DROSOPHILA
MYRNILCLVLGLIIGIQLTDFLEYFQLTDSQFASTSITQLEEGASQLATEEELALWLHNETRVLCMVLTLPKNHQSRVRRVKGTWGRRCNKLIFISSQEDRELGVIDVGVPEDRNNLYLKMRKALEYVYRNHGEDYDWFLKADDDTFVIMENLRFLLYPYDPEAALYFGHRFRTTFPQGYMSGGAGYVMSRDALRRLNLFAFNNSQFCPINNNSEDRQIGFCLQNVGVVAGDSRDEEGRDRFLPLSLKFMLPTFPTDNWLPKLTFYEPVNETGSTSGISFHYVKIHEFEMYEYLLYRLHIFGTPLSQRTLPPRLGPDELQNQLNHMGSLFSPKKILQSQYTMILVMIRNIIFLVLGIMLGIRLTDFIGYLKLWRNNDLRASEKAALLKYPVASEEHLATWLRREVRILCLVLTMPSSHATKAALVNRTWGARCNKLIFMSSQTDSNLNILQINKSESRKNLYAKVRTGMAYVHKHYLNEYDWFLKADDDTYIVMENLRLFLYPYDPESSVYFGCRFKAYFSQGYMSGGGGYVLSRDALRRLNLFALNSTTICKLNGESEDVQIGHCLQDVGVIAGDTRDFQGHHRFLPVNPFTVFPTILSNSWLEGYFFHKPNKSDCCAASAISFHYVKDFEFELFEFFLYYMRVFGLHRTPRALPSRLGFRQMNERLQHWSQQVTDNKN

SEQ ID NO: 33082 - DNA, 2684 bp, DROSOPHILA
gttttctggctctaaagaggaggcgtgtcctggccaatgctaattatcgtgaatgaaacattccgaaaggactccctcgagtggaactaatgtcgcctggaccggatatgcgatcgggtaaaggaaactaactaactaattacgcacacacatctgtcgattacatgctgcttattttattccagaatcccaaggactgcacttgaccaaggaagtcctttacatttttgtgttggagatctagtcttgaaattgtgacatcattgggctttgatcaattcaccagccagatggagttccatatgtttttcaaactcttcgctgctgctaattcagaaaagttataagagtttatttaattcaaagtgacatcattatttgtattttattattcgtgtgtcggaattacttcataaaatgttgtctgacttgaccgaattctttccaagtaagaaagctgcgatttatggactgtgaagtcgtctgcctcgaatagttagatatttcttaagtatttttgtggttccctgttatctcaagtatgtgtccgaaagtcggagaaataaataaataagtgcttacttaaatcagttcagtaatgtttattatatacaaatctgaccgatttgttttgatagctttcttagatttccagatgtgtgaatgcccatctcttcttagtgcacttttactaacttttttgattccagttggtcgtgctactgaaaatggtcacctgctaagcaaacccaagtgactaagggttgtaaatagactcccttaatcagatgtcagatcttcccgtttcccacctgtgtggaccacgtcagtttgtaaagcaagctgcctccgataagaggcagctaagtcacaaacagaaagtcagataacagagatgacatttcgctataaaagcgccgagggaatagccaaagtcgactagttcttggagtgaacacagatcaggatgcggttcatcggttgtgctttcttgggcttcatgtgcctggtggcttttccctctgcaacgccggctattttggctccgatccggccatatggtcagaatggaaccctcgctcagcagaacaactttgccttggagctgaagtcggtgattcgacagataccggtggacaacatcgagaagctggttcagacctacctcctcaacgacatcgagttccaaggtgtgatcagagccattaactccctacccgcctatcgattctaccgccagttgatcaaccaacccgaagtgcgccaactgcagcagtggatcacgcagcaattgatcctgtccggcggtggacccaaaatctttgattatctagaactggagatcaagatcttgaacaagtatccctattggtcgcagatcgtaaatggaatccagggattccaagcggagttcgtgcagatctacccagtgcaactgatccgatcctttctggaacccagtgccacccaaacaagtcctcaactgtcggaactctggcgtcgtctggtggccttgcgtccagtttacgaaagagttttggccactccacccggcaaggccatcactgctgaactccagagactgggcgtggatgtgggtggtgtagacgcccttatccgttatcagttcggttggagcaacgtcacctttccgagctacgattacacagattacctgtactagagattcaatgtggaactggctatcaatagattattcttatggacgaaccataataacctctcaagtattaacatattaagatattaatgtgtgaaatgaatagatatacatcatggcaattctggtccaatatatttagcattacttaacaaacatatatcgattgaaaatacatgctcaaaggcgtaaagaacataaatcaattgtttaaaaaaatatatatcttattcatgtgcaaaaacttcaatccctaatatatctgctacatggaactgcaagtcaatcacagaaccatttccacatgaatggcgcattcaagccctgggaaataccaccgaatcggaatatggccagtgctttaagccagttttcctgctctccaaacagacggagaaatctcgttccccccgggcaataacaataaatatccgtactggctgctcaaaggtcgggctcaaaggcggcaccctcgcaatgcgaggtacgcgtatctatggcaatgccatgattaagtaacagatgagccatgtgtcctgcaatgtgtcccggcgaatggtggcccaggacctcggttttaatgccgcctgcctggtgtcctgcgcctgttcgtgggtcgcacatgcgatttaattgaaacaaaccaaacaggaagcgtcgcaggaaggcggaggaggtcctgcgaatggggtgcttttataatgaagttcccatttcgctcagttactcattaaaagtggaactggcaatggtattgggctcggagctgggattgcgactgcgagtgcagcggaaactagttaatgtgaggccattgtcaaaagcagaagcgcaagtcgtgcaattttcgcacagcagcatgaaggacactgagagaaattggcagtagcaattttcagaagaagtaattttcagaaaaaaaagatcgcattaaattagtattttctgttcataattgtctgattatatgcctcaaatgttttataatccaaacattacatat

SEQ ID NO: 33083 - DNA, 684 bp, DROSOPHILA
atgtgcctggtggcttttccctctgcaacgccggctattttggctccgatccggccatatggtcagaatggaaccctcgctcagcagaacaactttgccttggagctgaagtcggtgattcgacagataccggtggacaacatcgagaagctggttcagacctacctcctcaacgacatcgagttccaaggtgtgatcagagccattaactccctacccgcctatcgattctaccgccagttgatcaaccaacccgaagtgcgccaactgcagcagtggatcacgcagcaattgatcctgtccggcggtggacccaaaatctttgattatctagaactggagatcaagatcttgaacaagtatccctattggtcgcagatcgtaaatggaatccagggattccaagcggagttcgtgcagatctacccagtgcaactgatccgatcctttctggaacccagtgccacccaaacaagtcctcaactgtcggaactctggcgtcgtctggtggccttgcgtccagtttacgaaagagttttggccactccacccggcaaggccatcactgctgaactccagagactgggcgtggatgtgggtggtgtagacgcccttatccgttatcagttcggttggagcaacgtcacctttccgagctacgattacacagattacctgtactag

SEQ ID NO: 33084 - protein, 227 aa, DROSOPHILA
MCLVAFPSATPAILAPIRPYGQNGTLAQQNNFALELKSVIRQIPVDNIEKLVQTYLLNDIEFQGVIRAINSLPAYRFYRQLINQPEVRQLQQWITQQLILSGGGPKIFDYLELEIKILNKYPYWSQIVNGIQGFQAEFVQIYPVQLIRSFLEPSATQTSPQLSELWRRLVALRPVYERVLATPPGKAITAELQRLGVDVGGVDALIRYQFGWSNVTFPSYDYTDYLY

SEQ ID NO: 33085 - DNA, 5191 bp, DROSOPHILA
cgactcagtcagctcagtcggcttcgcatttcgattacattaatgcaaagcactcacacgaacgatacacgtccaggatactcgcacacagatacagctaccgttacagcgacaaggatacgaggatagaagcgattgtgcgccatgctccgcggtggtgaagttcgaagttcgaatccaagttgtgtctgctagtctgttagtctgttacctaccccaccaaaagcgaacttgacgagcttagtcgtctgaggctgataaatgcagtgccgcaaagtacacatcgcgaaatttgtgtatgagatgtatgaaaaatgtaaaaatagatagcaatccgaactatgccctatgttgatgtactttccagccgttattacttgttacattgtttacttttataaccatcttggccaacagctgtttagcaccaaatgccaacaaagaaacaattcaccttttggcccaaggatattcccgatctattgatgaaccttatggttacatgctcaattaacgactccatgggtgtcagctgttttttttggcaaaaataaggacaatgtgctgctcagatttccgctgaatacacaaacatacattcatatttgcctaggaaggtgctgcgattttggtgcgtggcaatttcgggtaccgaaacaacagctgtcgcacattgatttctccgagtgcattgtcctggccgcaaaacgggagactgtgtggtgtgtgtgtgtgcgtaggactttcactccgtgtgtatgtgtgtgtgtggaaaaaagggtgactaatgtgtgtgtgattgctaacaaaagattccggcttttgcggctctgccggcgtcgaaaaaggacaacgacttcggccgaaaagggggttgaaatgtatttccaggacgccggcacaaacaatgatttcgagtttcggtttcgctttcctttggcctgtggtacacataaatagccgccaccgagtccaccgaacgtcattcgcagcacaaacgtcgagccgactggaggtcttctgcatagagtcccagtccgcgaggatcagcgttatcagtttgttgttaagtttgcttagttcccgttctacgttccccgttctactccgttttcgttttgcctcgttgaagttttaagttgaaagtcccatcgatgccatggcccagatacagacaccgataccgattccagcccccgcggagcccattgaaaagctcagccacccgcacagcattggcatccagttgcagcacaaggggatgccccatggcctgggcctgctgaccacagtggcctcgctgccccccaagtaccgcagtcgatatctgaacctgaaaaccaggtgcgaaataccgctggatctaacgctgaagcttccctcaccactgcccagcagcgatgtgcccatggcggccacattcgcggaggtctatagcgaaaatacgagtgctagttccagcgaggtgcagggggaggtgaccaaggtggaggagctgccggtgaagcccccaacaccaccgcagagtccagcagggaagcgtaaattgagccgggagagctatgacgacgagccggctaaaatggccaaaaaggaggaggaggttccggtggaaacagtagaatccacaccagcgaaacccgtcaaagtggcagaatctgcgcctaaaaccaacaaggcctccacttcctcgggaaagccctcccgcaataaagccacccgcaagctgaagttcgatgaggagaccagttcccccgtctcgggcaccgtcatccgaccgctcgaggacatcaccgatggatcgatgcagtacagcaacggcgacattgaccccaagtacaacatagtcgagatcacggaggagaccaaggcggaactggccgccatcaagaacgtgatcggggactatgtctgccgactgtgcaagatcaagttcgaggacgccttcggcctggcccggcacaggtgcgcctgcatcgtcctgctggagtaccggtgtcccgagtgcggcaagcagttcaattgtcctgctaacttggcctcccatcgccggtggcacaagccgaggaaggaggcgtctaaaaaggagaatcgcaataccaccaaccagccggagaaacagcagcaggtggagaaaaagtcggaggaggaactggccttcgattgccaggagtgcggcaagaagtttaagagagccgcctacctgaggaagcaccagctgacccatcagaaaaaggaaaagccagcggaaaaacagttggaaatgaagcccaccaccacaactatcacaggcagttttcactttaaccaggcggtgtccacctcctcctccgccagcagttcgcactccgatgagggagtctacgtggtgggatcgaatgccagggagaactacgactatgacaacgactacctctcggactccagctcctccgcctcatctgcgggatacggacggcttcagattgtggaacatggtctcacggaggaggaaagcattgctgccgcagctctgaccaacttgaggaactgcgcctccgtcatccaacacacaaccatggcccactgaaatcgagtgagatttatttttaatgttaagtttagtttctagttgaacaccaaacccgatgcagctgaaacagaccaaagaaatagttatattccacggaaatttcgttttccacttcgtattcttagttagctataaaatttagttcttaaccgattcagtttcgttcgcaaaatgagttcaattctagttagactctagtttgtatccgtacttcggcccacattccacacggcaatttagttgtaacttaatttctagtcagtgaatccaaagaatcttggcactagtcagcttcaatacgatctcgaaaagagtgtctcttgtgtaccacgaaggcatttctattagtctctagatttagctagtttaggaacttttgggagtgcaatgaacctacaacgaaagccaaagcaaccaaccaaagatttataactaatactagtcagtcatatatccatctactcctttgctcctacatcatcccatgacatcattcatcacccatatcatccttcattcttcttactactaatcatcccatagcttttcacactttcataccaatttcctcatgactcactctcatcctgtatcatctttgcattttttgctaatcattttccagttaatattctacccttaattcaaccctttaacaactttttcaatctggaaatttctcgtcattctagtcacaagttcttgcattccttctagtcacttaggataaatcatctctataagtcagcttcagttcgatcttactaagtttgtacaaacatatatcgttcttcaatttcggatacagctttagtcatattcaggttatataccgaaaccaaaattcaggcaaaattgtgcagtaatagtgtttaagttcgaatcaaaccaaaaagcaaaccaaatcctagtttaaagcaaattcaagcccagtgtttgtgaaccaaagtcgagtgtgagctctagtcattttagccacctaatcaagcggaatcagcttgttctcagtttagtttagttagttaagttaggcatagaaacggacattggaccagcgtctcactaccagtcaaagtattgaacagtacaacctagctataagggccacaggcttcagaaccggcggttgtgtacttaaagcaataaaataagtaatccccgatatcgggacaatatcacagcgctattgttccttagcatcagtatgtgtaaattggttgtaaccgcagagtacaacgaaaagggaaactttcgctcaatctaggaattaactaactctaagctatatcatacatgtaaccatatcggttgagattttgtgatactacagtctaagcttcaagtttacaagagaatcgttgcgctcgattgtgcattaacaataagctaagaggagacagatcattgaaccaagtatttttatacgtaatatacaccatatatttttatacaaaaacaaactcttgaagaccttttttaattatatgatgtctaagatgtaatcgacatatatttatcggaaaccaatatatttttatacaaaacccaatcttggaaaacccataaaaattgtaaattataaaagctcttgaataaaaacgcaaaactgaaaatgaaaacttcttgttgggttctctttgggttgtcagggaaaacaaacccccaaatgattgctttataattgcggcgaggtggtcatatatcatctatacgggggttgtaagactggtaaccaataatgatgagtgctcttgggtgattccttataatcatgcccaaataacggcgaactgcagtaatgaaatgccattaagggccattgacatggtccatcgatctgggaccgactaaaacaaataccaaaacacactaactgccaaggcggaaaagcggaagtggaccattgaatcggacagatgcatttgggcactgggctaaggacgaggaaacttgatgacgatggggtggaatcccagggtgttttcaactcagtctctggtcggtccatagtgaaactctaaacgggccaaactaatgatgctctcaacggaaacgcgtaaaaaatgtttaatcaaatacaaatgcatgacagcacggaaaaaaggcgaacaggatatgccaggatatgctaggatagtacgggatgcgagggtgcagctgaataaaactaaaggatgcgggggtggcagttgcgtgcgcggtgtgaatcaatttaaagcgtcaaaagatgtggatgtccttcccctcgcacagcgaaaattgtgtaaaatcatgccgcaaaaacaaccccgtcgatgttttcaagggggcgatgcagcagccgtaagtcaccaacatctgtgtctgaaggcctgaagcaaacaaaaaacataaaatactaataaaatgatctcgaaaccgatacgttttgcagtttgcaccttggcacgggacattcctgtactgtggtacccgcattagatggttcgatgtccaacaagtttccatttctgcgggtcaaaggcagctgctcgaaggatcttacttcctttcaggtcctcgggactcttatcctgctgctctgctaatttgcaccttgagaggcatgttggcttggaaatccgttcgagactaccttat

SEQ ID NO: 33086 - DNA, 3191 bp, DROSOPHILA
tcgagccgactggaggtcttctgcatagagtcccagtccgcgaggatcagcgttatcagtttgttgttaagtttgcttagttcccgttctacgttccccgttctactccgttttcgttttgcctcgttgaagttttaagttgaaagtcccatcgatgccatggcccagatacagacaccgataccgattccagcccccgcggagcccattgaaaagctcagccacccgcacagcattggcatccagttgcagcacaaggggatgccccatggcctgggcctgctgaccacagtggcctcgctgccccccaagtaccgcagtcgatatctgaacctgaaaaccaggtgcgaaataccgctggatctaacgctgaagcttccctcaccactgcccagcagcgatgtgcccatggcggccacattcgcggaggtctatagcgaaaatacgagtgctagttccagcgaggtgcagggggaggtgaccaaggtggaggagctgccggtgaagcccccaacaccaccgcagagtccagcagggaagcgtaaattgagccgggagagctatgacgacgagccggctaaaatggccaaaaaggaggaggaggttccggtggaaacagtagaatccacaccagcgaaacccgtcaaagtggcagaatctgcgcctaaaaccaacaaggcctccacttcctcgggaaagccctcccgcaataaagccacccgcaagctgaagttcgatgaggagaccagttcccccgtctcgggcaccgtcatccgaccgctcgaggacatcaccgatggatcgatgcagtacagcaacggcgacattgaccccaagtacaacatagtcgagatcacggaggagaccaaggcggaactggccgccatcaagaacgtgatcggggactatgtctgccgactgtgcaagatcaagttcgaggacgccttcggcctggcccggcacaggtgcgcctgcatcgtcctgctggagtaccggtgtcccgagtgcggcaagcagttcaattgtcctgctaacttggcctcccatcgccggtggcacaagccgaggaaggaggcgtctaaaaaggagaatcgcaataccaccaaccagccggagaaacagcagcaggtggagaaaaagtcggaggaggaactggccttcgattgccaggagtgcggcaagaagtttaagagagccgcctacctgaggaagcaccagctgacccatcagaaaaaggaaaagccagcggaaaaacagttggaaatgaagcccaccaccacaactatcacaggcagttttcactttaaccaggcggtgtccacctcctcctccgccagcagttcgcactccgatgagggagtctacgtggtgggatcgaatgccagggagaactacgactatgacaacgactacctctcggactccagctcctccgcctcatctgcgggatacggacggcttcagattgtggaacatggtctcacggaggaggaaagcattgctgccgcagctctgaccaacttgaggaactgcgcctccgtcatccaacacacaaccatggcccactgaaatcgagtgagatttatttttaatgttaagtttagtttctagttgaacaccaaacccgatgcagctgaaacagaccaaagaaatagttatattccacggaaatttcgttttccacttcgtattcttagttagctataaaatttagttcttaaccgattcagtttcgttcgcaaaatgagttcaattctagttagactctagtttgtatccgtacttcggcccacattccacacggcaatttagttgtaacttaatttctagtcagtgaatccaaagaatcttggcactagtcagcttcaatacgatctcgaaaagagtgtctcttgtgtaccacgaaggcatttctattagtctctagatttagctagtttaggaacttttgggagtgcaatgaacctacaacgaaagccaaagcaaccaaccaaagatttataactaatactagtcagtcatatatccatctactcctttgctcctacatcatcccatgacatcattcatcacccatatcatccttcattcttcttactactaatcatcccatagcttttcacactttcataccaatttcctcatgactcactctcatcctgtatcatctttgcattttttgctaatcattttccagttaatattctacccttaattcaaccctttaacaactttttcaatctggaaatttctcgtcattctagtcacaagttcttgcattccttctagtcacttaggataaatcatctctataagtcagcttcagttcgatcttactaagtttgtacaaacatatatcgttcttcaatttcggatacagctttagtcatattcaggttatataccgaaaccaaaattcaggcaaaattgtgcagtaatagtgtttaagttcgaatcaaaccaaaaagcaaaccaaatcctagtttaaagcaaattcaagcccagtgtttgtgaaccaaagtcgagtgtgagctctagtcattttagccacctaatcaagcggaatcagcttgttctcagtttagtttagttagttaagttaggcatagaaacggacattggaccagcgtctcactaccagtcaaagtattgaacagtacaacctagctataagggccacaggcttcagaaccggcggttgtgtacttaaagcaataaaataagtaatccccgatatcgggacaatatcacagcgctattgttccttagcatcagtatgtgtaaattggttgtaaccgcagagtacaacgaaaagggaaactttcgctcaatctaggaattaactaactctaagctatatcatacatgtaaccatatcggttgagattttgtgatactacagtctaagcttcaagtttacaagagaatcgttgcgctcgattgtgcattaacaataagctaagaggagacagatcattgaaccaagtatttttatacgtaatatacaccatatatttttatacaaaaacaaactcttgaagaccttttttaattatatgatgtctaagatgtaatcgacatatatttatcggaaaccaatatatttttatacaaaacccaatcttggaaaacccataaaaattgtaaattataaaagctcttgaataaaaacgcaaaactgaaaatgaaaa

SEQ ID NO: 33087 - protein, 469 aa, DROSOPHILA
MAQIQTPIPIPAPAEPIEKLSHPHSIGIQLQHKGMPHGLGLLTTVASLPPKYRSRYLNLKTRCEIPLDLTLKLPSPLPSSDVPMAATFAEVYSENTSASSSEVQGEVTKVEELPVKPPTPPQSPAGKRKLSRESYDDEPAKMAKKEEEVPVETVESTPAKPVKVAESAPKTNKASTSSGKPSRNKATRKLKFDEETSSPVSGTVIRPLEDITDGSMQYSNGDIDPKYNIVEITEETKAELAAIKNVIGDYVCRLCKIKFEDAFGLARHRCACIVLLEYRCPECGKQFNCPANLASHRRWHKPRKEASKKENRNTTNQPEKQQQVEKKSEEELAFDCQECGKKFKRAAYLRKHQLTHQKKEKPAEKQLEMKPTTTTITGSFHFNQAVSTSSSASSSHSDEGVYVVGSNARENYDYDNDYLSDSSSSASSAGYGRLQIVEHGLTEEESIAAAALTNLRNCASVIQHTTMAH

SEQ ID NO: 33088 - DNA, 4571 bp, DROSOPHILA
ttgtggtacatattatactgtttaattagtttagccgcgtgaacaatttcgtttgtatagaactgcacttgccgtattgcttatggttcgtagctactaggctatatgtttggatagttaaaaacggacatacacaagccttaaaaatcatttactcttggtttttctgttgctggactttagtttagtaagtaacttacaaaaatgagccgtaaatttgtatttgagtttgccacctaaacgattagtgtaaaattgaaaacaattttagttcttactgcggtcctttgtgttctcgcctttgagttttgctgtgtagcgttctttcttaaaaaatatacaatttattatttctcgaaatagttgctgctgccgctctttaagttaatcgggccacctctacttagttacattttagtttacacacacgctatgtatcgctctatctctatatcgctacggtatgacacatttataacgcctggccaacaactattagaagtacacaataatctttaatagtaatcataatggtaattatagtaatcgtaggttttaacaaacaaataataataatagaatttactttacaatattttgtggttgctgtataacagttgcaatctaccagcgatcggtatcagttttcgatcgttaatttatgagcgtagtataactttatatatagccgaaggtttctctatatcttatcgaaagctaagctgagttctcctggtagaaaagtgaattttccgcacttcatcctccgctgttgcctaggcttaaaggtatatatatatatatatgtatatatggtgtggggctggctatatatatatccatccgtcttctccactttgtatataggtgtgctcgatctctgatctcctcctcctctgctgtataagtaaatagaaaaatatctcaccggatcctcttaagctccgcactgccccctgtaaattcacttctctctcctttccaaccgatcgaagtctccttagagcttcgattcgcttgtcttctgggggaactgcggatgtccctcttcctgttgcggactcgccagtgtcttgatgatcttgggcactatggtgatcggctgatcctcgtcgtcctcggcatcttcgccctgctcctcgtcgatgggtgtgagcgtttccacatgcacaggagtctcctccgagggactgcatctcttcaagcagggcgccaggaaactggttatcgtggagatgccgaacaacgcaccggccatgtaaaagggcaggtcgtaggtgtgcgtcatgtcgtagatggctcccgccaagggcgttccgatcagggcggcaaatcctctgaacaggatcagcagtccgaaggcatttgttagcttgtccaggccgaggaggtcgaccaggataattgacgtcagcgagatgtagcccgagatggccagtccgaagaatatggacatggttatgtaggccgcgtagctgtagcacaatggggtcaaagtcacggctatggtggacaccagcaggcagcagttgttgagcagtagcgagttcacttgcggcaggtccgctacccagccgcagaagacacggcccacggtgttggtgatgccaatgatggacagaagcatggctgcatcgttctttggtatgtcgtgttccttggccgcatccaccaggtagacgaagggcacgtacagtccggccatgccaaaaatattcgagactccgataagcatgaagacgggatccttcagaaggctaacatccaacatggtgttaaccacggacttcacggaatcgggaatgccaaggcagggacacaggtcatactcctcgcgatgcttctcagcctcggccaagggatccaatttagccacactctgcatgctcttctcgtacttggttagcgacagcaccgaattcctgtagttggccaaggacttctgggactgatattgcggcaggttcgtcacggatcccgagtagaagatatccttgcgggacatgggtcgcaccatcctgccgctgcttccagtttgactgccgccctgccgttgtgaaagcgacaacttcgaggaggcgaagtcaccgcctgctcctgcctccaaatctccgcgagaagtggccctgatggcggccagcgaaggctggaagcgctccgaggcggaggttttcctaactcgcgtgttgaatgccggcacggatccgtttttgggcaaactctgatgatctccggccaggaaggcgggctgcgatgcgttccgggtcatggcatcctgcgagtggtacggactattctccgactccgagttcctgtgaggacggcggccgacggcacctgcggcggatcgagcggataactggccattgctgtcgccatttggtggagattgcgcgccgttctgtcgatgaacatccaccactttggactccgtgatggtgggcagggtagagacgggatgcagacctccgccgcctgcctgttgggccagcagctccagattcaagctggaatgcacaccgggatccgcattgagcggcatcttcagtttccgctcgatggttccatccggtaactgcaccatgaagtgggagcccgcaaaggaacccctttccagctgcagctgcttctcctcgtacatcctttgcatcaagggcttctgcttcttctttttcgggtaggtcagtggccgcatcatggctccgaagatggcgcagttgaggatcaggccagcaaagatgagcagggcgtttttccagccgtactcctccaggagataggtggccagcggggcaaaggcgaaggtgccaaagccagagccgcagaccgcaattcctgtggccagactccgcttggtttcaaagtaatagcccacggccactacagcaggcagataaatcatgccgaacccgaatccccccatgaagccataggtggccatcagcatgctcacgttggtactgaacgtactcaagacgaaggctatgcaggcgattatgctcccggctatgcagacggctcggcatccgtacttgttggccagggcggaaacgataggtccggcgctgaggtagactcctgacagaagactgcccacccaggccaccgtacccttgccctcgtggaagtaggccacgaactcctccaggaagatgccgaacgtgtaggcgataccgtccacgatcatgttgcacatgaagctggcgaagcagatgacccagccgtatcctccgtccggcggaggcggcagttccccgtacacgctctcctcgtcgtcgtcatcctcgtcgttgtcctgattgtcctcgtcctccggactctgttccgccgtcagcctggccgcctcctcgcaggccagctcactgtccgtccgctcgaatctcctcagcctggcggacgaggcggagtttccacccacgattcccggatttgaactgtttgtatccaccatgttggcgggacgaagggttagggttcccgggcacacacgcggttttggtggagttgaaaaagtgggctagaaagtgtgaagtgcgaagggcgaagaaggaggaggaacgtccgcttggcgtcgctgcccgcgtgtgaatgccaaatgcgaaggagagagcccaagtttatctcttcactctcgctctttgcaagctcgctcttcgctgctctcccactgcagttggcttttgtgtgagtgtgtgtcaattgttattgagtttttgttttcgtttagtttgataaattcataaattcactagcgataaaaggcgtgggctgcctgtatttaagcaaatattagacgagtgctgcctttggcctggtttattaatattttagctccagttgaacagtttgactttattttgtgctggtttcaacttaaccgttactattttccttgcggtttttgtgctttattttcgcttatttccgctttgtttgtgtatttttaacttgcacttgcagctgcagctgaggtcactagaaaatgtttgttttccttaaatttgcccgattttcgctggttctttgctttgatttttctttgactttgattttgcgtttctgtgatttcctcagcttttttgggggtgctgtacgtacgtacgtacgtgtgtacgtcgtaatttgcgaatgcaattgtataatttttcgattttcagctttgaaattcgattggagagcgtgacagagtgtctgagttggtatggggtggggaggtgaggtggaaaggaggaggaagaagagcggagtgtgatcgataaaaagcgcacaccacgcacacactcggcggcacacacacactactcgataacttttagctgcagttgcatttgggcgacattttcatttgctttttgcgaatctggcgaaaaataacaatctccgattccgattttgaattccccgagttttgttctgaactgctgcgccgtccgctgcgaaatgaaaatgaaaattcctcgtaacggcagcaaatagcgactgttatacgatatacaaagacaaattctaagtttctgtaaaaacactcgccctctctccttcgctctgtcgcccgttttgttgcatttgaa

SEQ ID NO: 33089 - DNA, 2571 bp, DROSOPHILA
cgccaagcggacgttcctcctccttcttcgcccttcgcacttcacactttctagcccactttttcaactccaccaaaaccgcgtgtgtgcccgggaaccctaacccttcgtcccgccaacatggtggatacaaacagttcaaatccgggaatcgtgggtggaaactccgcctcgtccgccaggctgaggagattcgagcggacggacagtgagctggcctgcgaggaggcggccaggctgacggcggaacagagtccggaggacgaggacaatcaggacaacgacgaggatgacgacgacgaggagagcgtgtacggggaactgccgcctccgccggacggaggatacggctgggtcatctgcttcgccagcttcatgtgcaacatgatcgtggacggtatcgcctacacgttcggcatcttcctggaggagttcgtggcctacttccacgagggcaagggtacggtggcctgggtgggcagtcttctgtcaggagtctacctcagcgccggacctatcgtttccgccctggccaacaagtacggatgccgagccgtctgcatagccgggagcataatcgcctgcatagccttcgtcttgagtacgttcagtaccaacgtgagcatgctgatggccacctatggcttcatggggggattcgggttcggcatgatttatctgcctgctgtagtggccgtgggctattactttgaaaccaagcggagtctggccacaggaattgcggtctgcggctctggctttggcaccttcgcctttgccccgctggccacctatctcctggaggagtacggctggaaaaacgccctgctcatctttgctggcctgatcctcaactgcgccatcttcggagccatgatgcggccactgacctacccgaaaaagaagaagcagaagcccttgatgcaaaggatgtacgaggagaagcagctgcagctggaaaggggttcctttgcgggctcccacttcatggtgcagttaccggatggaaccatcgagcggaaactgaagatgccgctcaatgcggatcccggtgtgcattccagcttgaatctggagctgctggcccaacaggcaggcggcggaggtctgcatcccgtctctaccctgcccaccatcacggagtccaaagtggtggatgttcatcgacagaacggcgcgcaatctccaccaaatggcgacagcaatggccagttatccgctcgatccgccgcaggtgccgtcggccgccgtcctcacaggaactcggagtcggagaatagtccgtaccactcgcaggatgccatgacccggaacgcatcgcagcccgccttcctggccggagatcatcagagtttgcccaaaaacggatccgtgccggcattcaacacgcgagttaggaaaacctccgcctcggagcgcttccagccttcgctggccgccatcagggccacttctcgcggagatttggaggcaggagcaggcggtgacttcgcctcctcgaagttgtcgctttcacaacggcagggcggcagtcaaactggaagcagcggcaggatggtgcgacccatgtcccgcaaggatatcttctactcgggatccgtgacgaacctgccgcaatatcagtcccagaagtccttggccaactacaggaattcggtgctgtcgctaaccaagtacgagaagagcatgcagagtgtggctaaattggatcccttggccgaggctgagaagcatcgcgaggagtatgacctgtgtccctgccttggcattcccgattccgtgaagtccgtggttaacaccatgttggatgttagccttctgaaggatcccgtcttcatgcttatcggagtctcgaatatttttggcatggccggactgtacgtgcccttcgtctacctggtggatgcggccaaggaacacgacataccaaagaacgatgcagccatgcttctgtccatcattggcatcaccaacaccgtgggccgtgtcttctgcggctgggtagcggacctgccgcaagtgaactcgctactgctcaacaactgctgcctgctggtgtccaccatagccgtgactttgaccccattgtgctacagctacgcggcctacataaccatgtccatattcttcggactggccatctcgggctacatctcgctgacgtcaattatcctggtcgacctcctcggcctggacaagctaacaaatgccttcggactgctgatcctgttcagaggatttgccgccctgatcggaacgcccttggcgggagccatctacgacatgacgcacacctacgacctgcccttttacatggccggtgcgttgttcggcatctccacgataaccagtttcctggcgccctgcttgaagagatgcagtccctcggaggagactcctgtgcatgtggaaacgctcacacccatcgacgaggagcagggcgaagatgccgaggacgacgaggatcagccgatcaccatagtgcccaagatcatcaagacactggcgagtccgcaacaggaagagggacatccgcagttcccccagaagacaagcgaatcgaagctctaa

SEQ ID NO: 33090 - protein, 816 aa, DROSOPHILA
MVDTNSSNPGIVGGNSASSARLRRFERTDSELACEEAARLTAEQSPEDEDNQDNDEDDDDEESVYGELPPPPDGGYGWVICFASFMCNMIVDGIAYTFGIFLEEFVAYFHEGKGTVAWVGSLLSGVYLSAGPIVSALANKYGCRAVCIAGSIIACIAFVLSTFSTNVSMLMATYGFMGGFGFGMIYLPAVVAVGYYFETKRSLATGIAVCGSGFGTFAFAPLATYLLEEYGWKNALLIFAGLILNCAIFGAMMRPLTYPKKKKQKPLMQRMYEEKQLQLERGSFAGSHFMVQLPDGTIERKLKMPLNADPGVHSSLNLELLAQQAGGGGLHPVSTLPTITESKVVDVHRQNGAQSPPNGDSNGQLSARSAAGAVGRRPHRNSESENSPYHSQDAMTRNASQPAFLAGDHQSLPKNGSVPAFNTRVRKTSASERFQPSLAAIRATSRGDLEAGAGGDFASSKLSLSQRQGGSQTGSSGRMVRPMSRKDIFYSGSVTNLPQYQSQKSLANYRNSVLSLTKYEKSMQSVAKLDPLAEAEKHREEYDLCPCLGIPDSVKSVVNTMLDVSLLKDPVFMLIGVSNIFGMAGLYVPFVYLVDAAKEHDIPKNDAAMLLSIIGITNTVGRVFCGWVADLPQVNSLLLNNCCLLVSTIAVTLTPLCYSYAAYITMSIFFGLAISGYISLTSIILVDLLGLDKLTNAFGLLILFRGFAALIGTPLAGAIYDMTHTYDLPFYMAGALFGISTITSFLAPCLKRCSPSEETPVHVETLTPIDEEQGEDAEDDEDQPITIVPKIIKTLASPQQEEGHPQFPQKTSESKL

SEQ ID NO: 33091 - DNA, 5835 bp, DROSOPHILA
ttgagtttttaatttcctcgttatttgttgtgcaaattgctcgaaccacacacccaatatttgcatatccatatacacaggttgtgaaacgaacacacacacaagatagcaaatgtcctgtaggtaaacatacataaaagaccctaattttgaatttacttgttaactgtttaaaccgaacaaactgtatctatgtaaattgccacatgaaccaaacttgtctaacgcgtcgcataattaattttttgtttgacataaccgaaactgcgtccaaattatgcgcatttaaatctgtagggacttaaaaaacactcttttttgggtgaagaggaaacataaaatttgaatttaagaaaaacacaccttttcgagcaattagtcaatagatgtttcgttagttaatcacagcaaaaaattctgcattaacccgatccattcaaattccctttctgaactccatcatctccactcattaatataagtgtgtgtgtgtgtgtgtgtgtatctatgaatttacgactcttattgtttgcctagtaactctgatgtattatttggaatgtcctatttacttagttgcttgttattgtagcaattcgatttgtactgctctcttctaatctgtaactaaaaccgcgatgcgatgctcgcgtccgtctgaataaattaactatcttgcattgtttatttccattcggatttatgaattgtgtttttttggatcaaacaattttaaacattggaaccctatcaatctcaatcgatcaaattcaaccatcaactggacctctaacacacaaccaacactcaactattgtatgtaaccaacttcgacaacaaccaccaatattggcgcctatctgatcttgcatgaaatgaaaaaccaaaactcgataatcgaaaatctaaaatcaaaatctgcaaatcgagaaatccctttgccgtgcattgtaataatcaagtgtttggtacgacctcgttttccctgacggttgaaggcatgggtccctatccgctgagcgatagcaccaatctcctgggtcccggatcgagcagctatggtccgggcggagtcctcggcctggccggttccggctccggattgggtggccagtgctacacgaactacggcaccaatctgcaaacgccgcaggcggcgagaaagtgccactacgacgaggtcgacgactacagtttccgccggcactcggcgcacggaaggatgtcatgtaggttgacccacaccaccgctaataataagccaccacaatccagctagctagtcagccactgagccactgagccactgagccactgacccactgagtcacctcgctgccactcaggcaatcacgaaagcatttacacgaaaatgcccaaaccaagtgcacccagtcgaatctaagccatctaactaactatatagtacatatatatccaattaggctaaggctcaagctgacgctaaaacgaaccaccgacagttcggatctgatgaaccgtagcttacattatttcctttcgttcctttatagtacgcaaatgaagggaaaaccactgatcttgggaccaactataaaaaaagacaaaaaaaaggagcgaaccgattggctaagtaatgaaaagtcgcaccattctgtgaaaacaaacaccatacacccaaagtacacccaagtcacccactcgctcaaagatcagagaaaaaaaagtgccaataatgcgactgaaaataaacacaaatcattcaaaccatctgaccttttcactcgaaatcatttattatttaaatgccagccaattagccccgtaaacattatttctaatgctttcaatatattagcttaaaaatcgaatgggccataatttaatagaatgatgcagctgcggtcaatgttttagtttttagttgcagtggcgcccgaacacagggcctattgcctatttctgttacaatttaattgattacaactattattgccgcagccgcacaaaaaggctaaatgaaaatcgtttgagtaaattaattaatcaatcaatcaggccatcaatcaaccagccctctcgacttcatcatcgccgtgtcaaggatgtgttttgtgcatgatgtatttgcaagcaattgcaagcgtttttatcgcctttacccaattgcatgcgtattattggcatgaactttttgcatgcactttattaattagcagcagtagtgaatgcatcgcagctatgaacgcccgaaaaaagcccgcccataaattaaatactaacgatgaacgatgaacgatgaacgctgagaaacccacaatttggcacgccgtattaattgcttttttcgtattctcgacctgtgtttatttgtttgctccctcgccgcctttcgctgggcagctgcatccgagcgatttttagaaggcggccgaagtacacaccagggccggagcgctgcctctgcgccccatcaccctcgtcagcctccacctgtctgcccgagcagcgggccttgactgaggagcgcctcgcctcctgactctgccagtgttcgttccacgagtcgcgctgaggagccgcaccagccgcagcaggtgcaccatcaacagcagcaggtgcaccaccaacagcaacatcagtcgcgctatgccacacacgaatacgtacactgtagctatgagaaggaagtcgtatgtgatcaggccaatccctcgcaagcaccaccacagcagccagcaccaccagtacagcagcaccagcaacagccaccaccgccattgcaccactgccagcagcgtaagcacagccatagtccgcaccacagtcgccacacctcgccgcactcgcaccatcaccattcgcaccacagtcgccacagtcggaggagtcgtcgccagggtagcggcagtctgccgggagcgcatcagggctcggccaaccactcggtgatgcgaccttcgatatgcaccagtcgtcggcatcgctccgttacggacatatccacgacgaatgtatgccaggatcccgcctgttcggatcgggaggttcaggagattatggtaagacgtacctgctgcaacaccactgccaccaacagctcctcccgcaccgaactggcccagtgtttcgccgaagacctctacggctcatcccgacgaccgagtagctgttgcaccagctccgactactgctaccagacagactcgacgagtctgtatggctctaggtcatcgttgagtcgcaacaattccatcaagtctgcctcggctctagtgcgtaagcaccacaggagtcagaggagcctgctgcccgagcatcgccaccccagctacacttccatatcgctgaggggcttaaacgccagccgcccgaatagccaattgggttcgctgacttcgatctttgaccgcgccaagaacatggcgcccgagggatccacactggagcgtcagagttcgaaaggcgccttgggcagcagcgagctgccggagtacgcctgctccccgtcaccgattcgctggagcttcctggccgatggtagatctccttccgaaatggagggagcagtcggcggaggtcctgagagggaacaggaggaggaggacaagttggacgcctggcaagtgcccgagccggagccggaaaagaagccctgccggaagattaccacaagctcctccgtttacgacgaggggccgagcacctcggcagcagctgctcggaagcggcggggcagcaagggaagtcgcggaagcaagggcagtggcagttaccattgtgagttcgaggatgaggccaccaccactgtgatgttccatcaggatgccggcgaggcgtacaacaattgctgcagcaataactacaactacatacagtgcaacacgtacttggatcaggatctgcagatcaccagcgaggacatccaccagtatctgtccaagggcgatgccacagccagtgacattctgaacaactccaaaaactatcccttccagccctcgaacgccctagagtttcagtacaagaacaatttccagcagggtcaagcgaacgccaataacaataataccaacaccacaaacacagcgtccagcgatgctgccgagtgtttccaaaactacagggccatctcgaaggagacgaacctgaaccagacttcaacggaacagctctcgcccacaaacatcaatttgtcaacgagctcgaacaacataaacatcgtgttcagcagcagcttggaacggaatgccaacgaggtcaagtttatcaataacagaagtggtgcaagcggtggttccgagatgggctgtgaggtgggtcaccatgcgggctatttgccctacacctatcccagctacgattacacgaacatgtcgggaaactcgcatttcgagaagcccctgggcatagacgagctacccaaggagttttgcggattggagggcgctggaggcggtggcgcctccaccaccagtgagcactcctcgtcgctgccatcgccgcaaccactgacgcaccaccagcagctgcaccacttcgagtccttcgatgccgcctccgaacacaatttgctagctgcccaacctatgtcgccgggctccccgctgtcggggtccgtgaaccctgctggcgatgactttgtccagatgcaccactatcatcacgccaactcaccgcactcacaatcgcaccacagccacgcccacacgcacacccacggccaccacgtgcaccacctgctaaaccaccccgcctacgatctgaccgacgatcagttccggttgggatcggctttgaagcgagtgcgcaagcgagcacgcaagtacaccgacttcctgcgcaagaagtgagcgattccgcggactcactgcatcctgaatcctgcatcctcccctagattcaccctacttcggccgcaaatacctggtggtctcgaagcgacgatcgcagagcctggacgaagactaatcatgtggcgactggacaagcaatagccgaggaagcagcggtgttgttcggccgatcgagaaccataattacatttaattacaatttttacactgccaaaaagttaagtaaattaaagttaatttttgctaagccaaaactctgtttaaagcgaggatcacacagatcagacacgagcactacggaaagggtggatttacgagggtggtaaaattcgggttcttgaagttatataggttattgtccgtacaatcttggagaacttgtatatagttttaccttccagaaattcactcgccctaatgcacaaacaagccacacacacgaatcacatcagctgcaaacacaagaggaagatgaacaacgactattttaaataatgaaaggaagtacttaagctaacagtgcgtatacataataaatacaagcggtatcagaggcgggcatttgtatattcaacttaaacataagcgaaggttttgaatttgcatatttaaattgactaaacccatatacatagttaagagccaaggcaaatggaaataataatgcacacctactcaagcctagaagatagacaaccaatctaaacataccagttaaagctagctataaggatgcgatcagatggatcagatggatcagatcggagcagcgccacaagatttagagtttcagcaaccgcaactgcaaacgcaagtgcaactaaataatgaaattaaccattaattaacaaacaaaacaagcaagacaagaacagcaactgtagtttggcacactaaggacaacaagttaaatgttataaaaacgagtgttaagattacacgaaaaagtgagagttttgttagcatttatttgatatgcgcgtattttcagggactg

SEQ ID NO: 33092 - DNA, 2526 bp, DROSOPHILA
atgggtccctatccgctgagcgatagcaccaatctcctgggtcccggatcgagcagctatggtccgggcggagtcctcggcctggccggttccggctccggattgggtggccagtgctacacgaactacggcaccaatctgcaaacgccgcaggcggcgagaaagtgccactacgacgaggtcgacgactacagtttccgccggcactcggcgcacggaaggattgttcgttccacgagtcgcgctgaggagccgcaccagccgcagcaggtgcaccatcaacagcagcaggtgcaccaccaacagcaacatcagtcgcgctatgccacacacgaatacgtacactgtagctatgagaaggaagtcgtatgtgatcaggccaatccctcgcaagcaccaccacagcagccagcaccaccagtacagcagcaccagcaacagccaccaccgccattgcaccactgccagcagcgtaagcacagccatagtccgcaccacagtcgccacacctcgccgcactcgcaccatcaccattcgcaccacagtcgccacagtcggaggagtcgtcgccagggtagcggcagtctgccgggagcgcatcagggctcggccaaccactcggtgatgcgaccttcgatatgcaccagtcgtcggcatcgctccgttacggacatatccacgacgaatgtatgccaggatcccgcctgttcggatcgggaggttcaggagattatggtaagacgtacctgctgcaacaccactgccaccaacagctcctcccgcaccgaactggcccagtgtttcgccgaagacctctacggctcatcccgacgaccgagtagctgttgcaccagctccgactactgctaccagacagactcgacgagtctgtatggctctaggtcatcgttgagtcgcaacaattccatcaagtctgcctcggctctagtgcgtaagcaccacaggagtcagaggagcctgctgcccgagcatcgccaccccagctacacttccatatcgctgaggggcttaaacgccagccgcccgaatagccaattgggttcgctgacttcgatctttgaccgcgccaagaacatggcgcccgagggatccacactggagcgtcagagttcgaaaggcgccttgggcagcagcgagctgccggagtacgcctgctccccgtcaccgattcgctggagcttcctggccgatggtagatctccttccgaaatggagggagcagtcggcggaggtcctgagagggaacaggaggaggaggacaagttggacgcctggcaagtgcccgagccggagccggaaaagaagccctgccggaagattaccacaagctcctccgtttacgacgaggggccgagcacctcggcagcagctgctcggaagcggcggggcagcaagggaagtcgcggaagcaagggcagtggcagttaccattgtgagttcgaggatgaggccaccaccactgtgatgttccatcaggatgccggcgaggcgtacaacaattgctgcagcaataactacaactacatacagtgcaacacgtacttggatcaggatctgcagatcaccagcgaggacatccaccagtatctgtccaagggcgatgccacagccagtgacattctgaacaactccaaaaactatcccttccagccctcgaacgccctagagtttcagtacaagaacaatttccagcagggtcaagcgaacgccaataacaataataccaacaccacaaacacagcgtccagcgatgctgccgagtgtttccaaaactacagggccatctcgaaggagacgaacctgaaccagacttcaacggaacagctctcgcccacaaacatcaatttgtcaacgagctcgaacaacataaacatcgtgttcagcagcagcttggaacggaatgccaacgaggtcaagtttatcaataacagaagtggtgcaagcggtggttccgagatgggctgtgaggtgggtcaccatgcgggctatttgccctacacctatcccagctacgattacacgaacatgtcgggaaactcgcatttcgagaagcccctgggcatagacgagctacccaaggagttttgcggattggagggcgctggaggcggtggcgcctccaccaccagtgagcactcctcgtcgctgccatcgccgcaaccactgacgcaccaccagcagctgcaccacttcgagtccttcgatgccgcctccgaacacaatttgctagctgcccaacctatgtcgccgggctccccgctgtcggggtccgtgaaccctgctggcgatgactttgtccagatgcaccactatcatcacgccaactcaccgcactcacaatcgcaccacagccacgcccacacgcacacccacggccaccacgtgcaccacctgctaaaccaccccgcctacgatctgaccgacgatcagttccggttgggatcggctttgaagcgagtgcgcaagcgagcacgcaagtacaccgacttcctgcgcaagaagtga

SEQ ID NO: 33093 - protein, 841 aa, DROSOPHILA
MGPYPLSDSTNLLGPGSSSYGPGGVLGLAGSGSGLGGQCYTNYGTNLQTPQAARKCHYDEVDDYSFRRHSAHGRIVRSTSRAEEPHQPQQVHHQQQQVHHQQQHQSRYATHEYVHCSYEKEVVCDQANPSQAPPQQPAPPVQQHQQQPPPPLHHCQQRKHSHSPHHSRHTSPHSHHHHSHHSRHSRRSRRQGSGSLPGAHQGSANHSVMRPSICTSRRHRSVTDISTTNVCQDPACSDREVQEIMVRRTCCNTTATNSSSRTELAQCFAEDLYGSSRRPSSCCTSSDYCYQTDSTSLYGSRSSLSRNNSIKSASALVRKHHRSQRSLLPEHRHPSYTSISLRGLNASRPNSQLGSLTSIFDRAKNMAPEGSTLERQSSKGALGSSELPEYACSPSPIRWSFLADGRSPSEMEGAVGGGPEREQEEEDKLDAWQVPEPEPEKKPCRKITTSSSVYDEGPSTSAAAARKRRGSKGSRGSKGSGSYHCEFEDEATTTVMFHQDAGEAYNNCCSNNYNYIQCNTYLDQDLQITSEDIHQYLSKGDATASDILNNSKNYPFQPSNALEFQYKNNFQQGQANANNNNTNTTNTASSDAAECFQNYRAISKETNLNQTSTEQLSPTNINLSTSSNNINIVFSSSLERNANEVKFINNRSGASGGSEMGCEVGHHAGYLPYTYPSYDYTNMSGNSHFEKPLGIDELPKEFCGLEGAGGGGASTTSEHSSSLPSPQPLTHHQQLHHFESFDAASEHNLLAAQPMSPGSPLSGSVNPAGDDFVQMHHYHHANSPHSQSHHSHAHTHTHGHHVHHLLNHPAYDLTDDQFRLGSALKRVRKRARKYTDFLRKK

SEQ ID NO: 33094 - DNA, 4027 bp, DROSOPHILA
tctttgttttttgttaagcctaaacattaaatttagttgattccatttgcgttcgaagccacaagcttcgatttcaatttttatttttttttttttcatttttagataattttgtacattttctttctcgcttctcgtgaactaaagactaaaccaaattcgggcacacaattaccaagttaaatccgcttaaactcttttgattttattccatttcattaatattaaactgctttgatttgtggatcatcctgcttctgattcggtttcaattgaagtttgaagttgcattcgaaacagatttcgaatggtttgtggaatgttccgggtttgctgcttccaccttcgctgtagcttacaactaaagagatcggtcgctatttagttagttagttagactgatggactataacataataatactttaattttgattcagtaagtacgctaggaatagaaactaggtggcgaagatcgcgtggaggaaactagagtaaaactggctaatgcgacagcctacaccttggttaactacaatagattgcaatgtacacttttgatatgataaacagaacgtggttaaagcttatttgtaaattcgattggatatcaagtgtaggaattgttcgaggtgaaaacgcaaagatttggaggaaaccttcaaaacgtatatatctagtttatttacacataattataatttgaaatgtgatatatcatgtagttggaaagtaactcgtttacaatatgtggatgcaatgcctaatgcggttttctcgggccaaattcaatcaatttgcactatgggcataaatcggggaatgcagtttacagattccacgtataataaataatatataatttaaattaatttaatttaaccaaggcgtaggcttacacaggccaagtaaagctgccgaagcttctgatttgcgttcattcacccattatcatttctcaactttatcatttccttcgtttcaccctccctttactccctttactcgctagtggtggtaatgggttccaccttgatgcctccactgctcgaggaactgggtgcatccgcgcctgtggctgcggaagctgctcctgccgatctttccggaggagccgtcgctgccgccgccgatgatgaggaagatgagacactggcgcccaccagctcggccagatcctcggcgaagaggcggctgggcgagaattcgcgcttgtagctggccatgtccaggccaagatcgccgagcggggagtgcagccgaggcgtttcgctgcgcaacggactgctcttggccttgggcgcatggtgctggcccattgacgacgaggaggctgaggaactggagctggcaccgaaaccggacttgtgggccacctgatggccgccctgatggtgctgctgctgctgctgttgctgttgctgctgatggtggtgcaagtgggcctgttgctgctgcaggtgcagctgctgcatgtggtggtgcgccgcctgctgttgctgctggtggtgcagagcgacggccatgctgggcggcaggttcggcaggaggccggcgggaccgcagggcgagggagcgtgccttggtccggagccactgctcagggccggcgatatgctggccctgcctccagctgcgccgggaacgttgcccactccaccgcccactcccggatgaggcggcagattgaataagccgggcggaaccgctgccatttgcatctgctggcggatgttgtgcgccacggcggccaccgcggcggccgtttcctgtgacatatgctgctctccggccacgcccactccggtctgcggtccactgccattcggacaggccatggagctgggcgcgcctgccagggcgccactggctccgggatagctgagagggaggtcctgcaagggaaacgcgggctaacccgagagcagttagttcggttcaagaaatccccttgaatgcagtatatttcgcaaagcttcacattacatcaaatcatcaatatgaagaaaactcatgggtaatcccgaaaaaaaactgaatgtaagtaaaggattttcgaccttttgacattttcgaggaataataacttttaaggaactctagattaaggaaatactggaagtacacttttaaaacttatataatataaattgagttgaaattttgcaaaaaaggtatcacaagcaaacactatattttataataagaattttaagaattttaaaaccgattaagaaagtctcgataagaatggctcgtaatgaaaaaggacttcaatctcctgaagctgaaacttcgccagatttttattttttaaaatgaatgtttatgttattattccacaaataatggacattgtaggcctattcatttttatttctttaatttaaaatgcaattgtttgcagcatcagttcgtgagaatgcggaatttggcaaagtccgctaagcgaattgtactgcactaattacctaccgaatgtcgaccgtagggtggcatgtgagcggccaggctctcgtccttgatgtccttggtgtcgcgaaagaccaccgtcttgatgacgcccttaatgtgctcgtcgggccagatgcccagaaggattcgctgcggcctgccacgccccttgggccgcaaatcgggcccgccgtcaatggatggtcccagcatattgtgcaccctgttcgcatagagcacgaatgttggatacgggatgtcgtacttgcgggcggcctgagatagcgatagaccctcctttagcacactgaaaatggcctccgccatggtctcgggtcgccacgacttcagaggacctcgctcgcggaagcgcatgtgatgcatcagattctggttggtgttccagcacttttgccacatggactgcagctggtactggtagctgtctgctgaaagatcaagatatggaagaggccgacgatcagttggtttccagctgcccggcggggctgctctacgaacctgccagcgttgatccggtggcgcccatccaggcgtgcgagttctccatcattttggcctgcgaatgcagaaaagtaaattcaagtatcagcaaagtgaggcaagagaagaaagctgggtaagtggtgcttcaattaattgtgtgactcgctttggttagcgctcgatgcgccgtctcttgtctcgtatccggattccggatcccgcccacctcttggcctttgattgacatgcaaaaccgacctatattcgtttaattcttcattcttgtacttcgatgtctaggtgtaatgcgggcttattgtttcggtgggtgttttgactgactatattacctatttcagttatttagccatactatagcatacttttgggcacctagttgcaagcttctgcagatgcatttctatctacaaactgaacgaacagcctctagattatatgcttatgtgaaatgcacttttggaaaatgtatcttattggattgctttccgttgaaactacggtgattttttgcactggtgtttcgcattcgcattgcaacatcgtctggtacatttaactggctgactgaaccttcgagtggcgactcggttgggttgccattgctgcgattgtctgtttgccgactgtcgagtggcttgcatcgaattcactaattgcataacaaagtaacatttgcatattgttctacatatgttagtggctgggttcggattcggattcggattcggatccaccttgtcgataacttcattacaaaaatttccatgccacactctcacccgtgtggagaaaatacaactgaaacagactgaagtggttgtggctcaggtgggcacttgtgcccatttagcgttaagtattacttgtaactttctgccatgtgactgactgagagtgctcctatccacttggtccttgccacttcccctgcgccattcctcgggccagacaatgtggcgatgttctcagaaatcgttgctgcttttatgggcccaggacatgcaatggatggatttacttttcggctcattacgccgcaaattata

SEQ ID NO: 33095 - DNA, 1374 bp, DROSOPHILA
atgatggagaactcgcacgcctggatgggcgccaccggatcaacgctggcagcagacagctaccagtaccagctgcagtccatgtggcaaaagtgctggaacaccaaccagaatctgatgcatcacatgcgcttccgcgagcgaggtcctctgaagtcgtggcgacccgagaccatggcggaggccattttcagtgtgctaaaggagggtctatcgctatctcaggccgcccgcaagtacgacatcccgtatccaacattcgtgctctatgcgaacagggtgcacaatatgctgggaccatccattgacggcgggcccgatttgcggcccaaggggcgtggcaggccgcagcgaatccttctgggcatctggcccgacgagcacattaagggcgtcatcaagacggtggtctttcgcgacaccaaggacatcaaggacgagagcctggccgctcacatgccaccctacggtcgacattcggacctccctctcagctatcccggagccagtggcgccctggcaggcgcgcccagctccatggcctgtccgaatggcagtggaccgcagaccggagtgggcgtggccggagagcagcatatgtcacaggaaacggccgccgcggtggccgccgtggcgcacaacatccgccagcagatgcaaatggcagcggttccgcccggcttattcaatctgccgcctcatccgggagtgggcggtggagtgggcaacgttcccggcgcagctggaggcagggccagcatatcgccggccctgagcagtggctccggaccaaggcacgctccctcgccctgcggtcccgccggcctcctgccgaacctgccgcccagcatggccgtcgctctgcaccaccagcagcaacagcaggcggcgcaccaccacatgcagcagctgcacctgcagcagcaacaggcccacttgcaccaccatcagcagcaacagcaacagcagcagcagcagcaccatcagggcggccatcaggtggcccacaagtccggtttcggtgccagctccagttcctcagcctcctcgtcgtcaatgggccagcaccatgcgcccaaggccaagagcagtccgttgcgcagcgaaacgcctcggctgcactccccgctcggcgatcttggcctggacatggccagctacaagcgcgaattctcgcccagccgcctcttcgccgaggatctggccgagctggtgggcgccagtgtctcatcttcctcatcatcggcggcggcagcgacggctcctccggaaagatcggcaggagcagcttccgcagccacaggcgcggatgcacccagttcctcgagcagtggaggcatcaaggtggaacccattaccaccactagcgagtaa

SEQ ID NO: 33096 - protein, 457 aa, DROSOPHILA
MMENSHAWMGATGSTLAADSYQYQLQSMWQKCWNTNQNLMHHMRFRERGPLKSWRPETMAEAIFSVLKEGLSLSQAARKYDIPYPTFVLYANRVHNMLGPSIDGGPDLRPKGRGRPQRILLGIWPDEHIKGVIKTVVFRDTKDIKDESLAAHMPPYGRHSDLPLSYPGASGALAGAPSSMACPNGSGPQTGVGVAGEQHMSQETAAAVAAVAHNIRQQMQMAAVPPGLFNLPPHPGVGGGVGNVPGAAGGRASISPALSSGSGPRHAPSPCGPAGLLPNLPPSMAVALHHQQQQQAAHHHMQQLHLQQQQAHLHHHQQQQQQQQQQHHQGGHQVAHKSGFGASSSSSASSSSMGQHHAPKAKSSPLRSETPRLHSPLGDLGLDMASYKREFSPSRLFAEDLAELVGASVSSSSSSAAAATAPPERSAGAASAATGADAPSSSSSGGIKVEPITTTSE

SEQ ID NO: 33097 - DNA, 5482 bp, DROSOPHILA
atgaaagccacttgccattcaggaccagtcgagcggctgcctttctcgttggctccgccacactggcagaaaaagtggttcctgaagtgaattgcacggtattacttttgatggtatagctcctactctagcattatgtattctagagtagctatttgctaggactgcttggattaaatcaattaaatcgcctattcaaaccttcctcgattttttcgcagtgtcggctttgcttgctgcccaaaagggtggccaggaacagaaacagcaacggcaactgctccggaatgaccttgagcattaccactgtaaagtgtggtagcttgtccccgctgcggacagagtttgggagcccttctccggctttgtcctctcctgtttatctgcagtccgcttttaaggatgcccgggatgctcggcatgtttccgtcggagtgaaggagcgggaagcgaggaccaaggaccaaagtcatgagtcctgcgagcagaccgagttttgcatcaagtgcaaagtgatgtgttaagctgttaagtgccaaagtaattgttttctttcaccgacaaaagcagcaacaacaataggcggccatgacgtcgctttcacttgccacttgaccttgaaagccgcctgggtgtgagagtggtcacagtgtgtgtgcatgtgtgtgtgtgtgtgtgtgtgaaggggatgaagacagcattgttgcggagtcgttcgttcggccccaagttgcacttgcttcgaggggcattaagtgaattatgtcttcggaattggggccatcagttggccgacgaggaagtgagtttcccagatggatatggggtaaggtcgatttaaatgcctcaatgtgctggcgaagtctttcgagccattgttccttaaccgaccatatatgaaataaatatgatgtgtaggcatatttccctataactccaatccattcatttctcccataaataaaacatcaaaagtgattggttgacatttagcttttcgattcgtttttattttctctttctttgtttattgttgtataatttacggtttaactaaactcaagaatgcctcgcgcatctctagggttaggtaataataataatcgtaataatagttataataataatagttttcacccacgcagttcggacaatacatatgcacatatacacacatatgcgtatctgacagtcgagtgtgtgtgccatgtggtggtatggtattgtgtaatctgtgtgactttgtgtctgtgtggttgtttacataaaattagcacaaatttaatgtgatgctgcctgcgttgtttgcccattcgttcatttacaatacgattaccatagaagaagtgcggcgaagggctttttgggggtaagtctaagattaagtcgaagcctaaagctatggaaatttgtacattatttacagttacatttggaaataccattaatataagtttatgtacgtgcgtggtacggtatgcacgtctatctgtatgggtttatgtatctaaagtattgcgtatatatgtacatacatatgtatgtactcgtatatatatatatgtatgtataaagtggtgattaccggatttgacaacattcagtgttttgtatttgagggctattctagggttaagctacatttaagaaatgcacaagtctctaatcgtaactttaatgtttacggttacgttgtttattgttaatcgtaagcctatttattattattttcgcgtggcaaaaaaggcaatcaacgcaacgaattttctcgaaataaataagacaaagtacgagatcctatccttacaggaaagttccgaagtatgtgtgtgggtgtgtgtttgttgtgttttggggtgtgctttaataataggttaatactttataccttcctcgatgatacactctaaaactagcctaggcataaaaaccagttagcaacttcaactaagcactaaacactaaaaacgttggggttcaagtagcagtccaaatatgtttgtttgttggtaggtcttctattgttttcttcctttgggctcagggtggttatccaattggggccaagaatctttggggcaagtaatcattggacttttcgggctatttcttggggaaaataaatcgcatatgcttggtattgacgtggtatattgatgtcattggtgtgaatttgtgtttcatttaattccacgtttttgctatttcttgataagatataacgtgtgttttacgttatcagtcacattttatatgagctgtgcggcttcctacacacttttcctattttaaaagatttatcataaaaaaaaaaaccgtatgtgtaatgctatgtatcttgctgctctaagaaatatatgtcttgcacattataaaattgaaattgctagaccttccagtcctaaaatcaaaactacttactcttatccaagattacttagcacccctcgcatttatttggttacctaatgattgccccaccccagcgtgtgtcccaatgccacgcccctgcccaggattcaatcctcgtgcggcagttcggtggcatgctgctgctccagcttgatcttcatcagaggcgattcgcggatggcgccaggaggcgcgtaggcggccgccgcggcagctgcactcgcgtccggattggcaaacagttcactcatgtcctggccgggtcccgggaagaagtcctcgaagcgcggactcttgttcaccgacttctggagcagtccgttggcgaaggcctccaagtcaatgccggcgggcaggctctcgagaaacctcttgttgtaggcactcgcctgatgtttggcatagtgggcggcggagtacggcgaggcggctcctggtctttggctggcggtcagggacttggcgcttccggaaccggagctcgatccccgcgactggctgccatactggcgggacagctcccgctccctttcgcgctcccgatcgcgttccctttcgcgggataactcgcgggcataggaggcggcactattcggcgctgcgccaccacttcctccacccgatccccgtgagggcatcacattcaggccgggcagacccatcaggcccagggcactgaggtcgggcaggttctccgaaccccttcgctcaccctgctgctgctggtgcttggccgccgccgctgccacggccgccgctgcggatacttgatcttcgatctcggatcgctgcagataggccggggacttgtacatgttcatggactgggcgtggggcgactgttgctggtggtgcgagggctgttgctgatggtgtgcctgctgctggtggtgctgctgatgttgctgctgctgcgagaggatctggcggcgaagggtttccgtcatggagctcagcggacttcctgcgtccggcggagccagtgcagcgttctgagccgccagcttggctgcggcagcactgtggtagccattcgtggtggttcctcctccgatataggtctgcaagtatcagagaaaaggggagagggcgaaatagtgggttagaattggatataagctatttgaataggaattggaaaacaatatacataaataaacaaaatagtgggttactataggatcagctataaattgttgataataagaaatcgattggcagtttatacactgaaatcagaccttggcgcctctaaaataatataataacacatttgtttacacaaagcaaattccacctggctgaaatacagctattaattctcgccattgagaaatgtttattattatgaagttaattccaatagcatttcatagtcttataaaaagtcttccaaggaaatttgcaactataataagtagactgctgatctcttcaatgcgatcagtcatatttaaaaacctaaagtagtgcaataaaatgtacttacaccatgaccctgtccattggcgtactgatgggcgctcatgtcctccttaatctcgcgatagtcccggaacaccacggccttaatgacgctacggatgagctcctccggccacatgcccagcaggatcctctggggacgaccgcgtgcctttggccgcggatcagctccgccatccagcgagggtcccagcatgttgtgcacccgattggcgtacaggacgaaggtgggatagggtatgtcgaacttgcgggcagcctgtgacagggagagcccctccttcaggacactgaaaatggcctcggccatggcctcgggtcgccaggacttcaatgggccgcgctcgcggaatctgagctgctgcaccaggttctgctgattggtgttccagcacttctgccacatggactgtagctggtactggtagctatctgctggaagaagcacgtcacgcggacataatgaaacggctggaaatggcatcggcttagacctgaaacttacccgccacagaagctgctccagttgccgcagctgccgctcccatccatccaccgtggcctccactctcgatcatcttggcctggaagaaatgagaattagatagtacagagttagtcaggtgtttttcttctggcctatttatacctaacgtaaggttaattatctaaagttttgaaacattttcagttcactgtgcaggaacttgcataataagcaagcaatagatatacatatattccacagccataaccttttacatttccttctttctacttttaaataattagccaactttgcatagccagtgccgtgtatctttggagtcgaccgaatcgctagttttttccacttcggctcactttgggccctgtgacatttgcacacgaattgtggctggccgtaaaagtttatgattgccataaatgtggcggaggcattttcgtatgcaaaggagttggggagttgggccatcgaaggcaaattagtatacaaagtggggccatcccgaccccattgtcttggcggctttttacggccaaaaggctttggctcggcttcacctagcggaatgcacaaaaagccatttatttattgctgttattaggaattcaggcgaagcctctgtgccgcctaattgagcccgcctttaaccctttcggccgcactaatcagcgctggccattcaggggttaaccgggagctgggactcagttgaactccaaaagccaaaaactaaagcgcaaatgaagagaatccccattttatttcgcttttttttctgctctcactccgcggaggcataggaaaagttaaattgatgcacgtttcgtgcctccgaaactgaggctctggccataaagccttccttttggccagcttgccagcttgccagcttgctagctcgccagttggccagtggctggccacgccccctctgcgcacgtagccatgcattttatatgcaggggcgtaatacaaattatgtgcagcgagcatgggcagcgcagaaaaaaaatatatgtatgtacatatatacacatgcataagtacataggtgaaaaaaagatgaaatacaaaaca

SEQ ID NO: 33098 - DNA, 2981 bp, DROSOPHILA
ggccaagatgatcgagagtggaggccacggtggatggatgggagcggcagctgcggcaactggagcagcttctgtggcggatagctaccagtaccagctacagtccatgtggcagaagtgctggaacaccaatcagcagaacctggtgcagcagctcagattccgcgagcgcggcccattgaagtcctggcgacccgaggccatggccgaggccattttcagtgtcctgaaggaggggctctccctgtcacaggctgcccgcaagttcgacataccctatcccaccttcgtcctgtacgccaatcgggtgcacaacatgctgggaccctcgctggatggcggagctgatccgcggccaaaggcacgcggtcgtccccagaggatcctgctgggcatgtggccggaggagctcatccgtagcgtcattaaggccgtggtgttccgggactatcgcgagattaaggaggacatgagcgcccatcagtacgccaatggacagggtcatggtacctatatcggaggaggaaccaccacgaatggctaccacagtgctgccgcagccaagctggcggctcagaacgctgcactggctccgccggacgcaggaagtccgctgagctccatgacggaaacccttcgccgccagatcctctcgcagcagcagcaacatcagcagcaccaccagcagcaggcacaccatcagcaacagccctcgcaccaccagcaacagtcgccccacgcccagtccatgaacatgtacaagtccccggcctatctgcagcgatccgagatcgaagatcaagtatccgcagcggcggccgtggcagcggcggcggccaagcaccagcagcagcagggtgagcgaaggggttcggagaacctgcccgacctcagtgccctgggcctgatgggtctgcccggcctgaatgtgatgccctcacggggatcgggtggaggaagtggtggcgcagcgccgaatagtgccgcctcctatgcccgcgagttatcccgcgaaagggaacgcgatcgggagcgcgaaagggagcgggagctgtcccgccagtatggcagccagtcgcggggatcgagctccggttccggaagcgccaagtccctgaccgccagccaaagaccaggagccgcctcgccgtactccgccgcccactatgccaaacatcaggcgagtgcctacaacaagaggtttctcgagagcctgcccgccggcattgacttggaggccttcgccaacggactgctccagaagtcggtgaacaagagtccgcgcttcgaggacttcttcccgggacccggccaggacatgagtgaactgtttgccaatccggacgcgagtgcagctgccgcggcggccgcctacgcgcctcctggcgccatccgcgaatcgcctctgatgaagatcaagctggagcagcagcatgccaccgaactgccgcacgaggattgaatcctgggcaggggcgtggcattgggacacacgctggggtggggcaatcattaggtaaccaaataaatgcgaggggtgctaagtaatcttggataagagtaagtagttttgattttaggactggaaggtctagcaatttcaattttataatgtgcaagacatatatttcttagagcagcaagatacatagcattacacatacggtttttttttttatgataaatcttttaaaataggaaaagtgtgtaggaagccgcacagctcatataaaatgtgactgataacgtaaaacacacgttatatcttatcaagaaatagcaaaaacgtggaattaaatgaaacacaaattcacaccaatgacatcaatataccacgtcaataccaagcatatgcgatttattttccccaagaaatagcccgaaaagtccaatgattacttgccccaaagattcttggccccaattggataaccaccctgagcccaaaggaagaaaacaatagaagacctaccaacaaacaaacatatttggactgctacttgaaccccaacgtttttagtgtttagtgcttagttgaagttgctaactggtttttatgcctaggctagttttagagtgtatcatcgaggaaggtataaagtattaacctattattaaagcacaccccaaaacacaacaaacacacacccacacacatacttcggaactttcctgtaaggataggatctcgtactttgtcttatttatttcgagaaaattcgttgcgttgattgccttttttgccacgcgaaaataataataaataggcttacgattaacaataaacaacgtaaccgtaaacattaaagttacgattagagacttgtgcatttcttaaatgtagcttaaccctagaatagccctcaaatacaaaacactgaatgttgtcaaatccggtaatcaccactttatacatacatatatatatatacgagtacatacatatgtatgtacatatatacgcaatactttagatacataaacccatacagatagacgtgcataccgtaccacgcacgtacataaacttatattaatggtatttccaaatgtaactgtaaataatgtacaaatttccatagctttaggcttcgacttaatcttagacttacccccaaaaagcccttcgccgcacttcttctatggtaatcgtattgtaaatgaacgaatgggcaaacaacgcaggcagcatcacattaaatttgtgctaattttatgtaaacaaccacacagacacaaagtcacacagattacacaataccataccaccacatggcacacacactcgactgtcagatacgcatatgtgtgtatatgtgcatatgtattgtccgaactgcgtgggtgaaaactattattattataactattattacgattattattattacctaaccctagagatgcgcgaggcattcttgagtttagttaaaccgtaaattatacaacaataaacaaagaaagagaaaataaaaacgaat

SEQ ID NO: 33099 - protein, 484 aa, DROSOPHILA
MIESGGHGGWMGAAAAATGAASVADSYQYQLQSMWQKCWNTNQQNLVQQLRFRERGPLKSWRPEAMAEAIFSVLKEGLSLSQAARKFDIPYPTFVLYANRVHNMLGPSLDGGADPRPKARGRPQRILLGMWPEELIRSVIKAVVFRDYREIKEDMSAHQYANGQGHGTYIGGGTTTNGYHSAAAAKLAAQNAALAPPDAGSPLSSMTETLRRQILSQQQQHQQHHQQQAHHQQQPSHHQQQSPHAQSMNMYKSPAYLQRSEIEDQVSAAAAVAAAAAKHQQQQGERRGSENLPDLSALGLMGLPGLNVMPSRGSGGGSGGAAPNSAASYARELSRERERDRERERERELSRQYGSQSRGSSSGSGSAKSLTASQRPGAASPYSAAHYAKHQASAYNKRFLESLPAGIDLEAFANGLLQKSVNKSPRFEDFFPGPGQDMSELFANPDASAAAAAAAYAPPGAIRESPLMKIKLEQQHATELPHED

SEQ ID NO: 33100 - DNA, 2556 bp, DROSOPHILA
agtgttgaagattgtaaagatgttcgcgacactcaaatcaagatggaatatatatttatatataccttcttgtccataatcaaggagtcagaggtaacagaagcgctataacgaatgagctttcgttactaagttttgcttatatcgcgaaagctttccacacatggtggtggaacagggaaacacaagcggagtaagcagtgttccagactagtgtcgaatgtatggatgtgcgacctggctacctcagtttgtagagaagcaatggcatagccgaaatctaaaattaaatagttgaaactgacgataatggaatgaacacaaaaccgctgcgcagagtaaaggtgaactagatgtatgagcgcgataaggctgcattatcagaccacggaccatgttcatgtgatagacccagaccagaccccattataatgggtaatcaccacggacggcgatccgccgcctactcatccaatccggggtccaaggtacacggcgacgtacagcaaacattacgtagtttccaagcgattcagagttattttgacgccggccgtagaaaaatgatccataaaattgatcgataagccgaatgtcagcgccttatcaccaatgtccaacagagagaagccaactggattcgactgggagaggagagtacctgatgcagacacattacgagtaaacgatgatatctctgttctcgagcattagcatcggacatggcttatccatacggcttatcagtgccaggtcgccctgggctgaaaacagaaatcgatttcagttggatttcagcagcggagcagaccagtcggttcgcgatcagtgcaaataaacagatccacgtgccgagcatagaaactagccattgaatacatcaccagatcggcaataaaacacgcagtgactgataagagtgcaggcaaaaaaaataaaataacaaatcagatagacaaaaatacggcactacggatacaggcatttctgaacagccaagatgatgtcacatactgtgaggtgcgtttcgtgttcctttggatgacccgaactacaatactaattccacgggtattcctttcaacagggtcttcaagatgatgtacattgtggcgggcatcctcatcagcaatgcggagatctgcgacacagtggaccgcatccagatagcgccacgcgtcgacctcaagccggaatacgatcacaggtacttgacctccggaggcaatagtcccggctcccgatcccgcacccactctcgacagaattccggaagtggatccggatcggaggaaggatcccccaccaagaggcggagagtcagcgtttccggtatcgcggggggcgtggtcaggggcgtcactagccaggtcaccaagagagtgggccaccgcttcgtctggctatccgacatccggctcattctccggcaatggcgactcctggccctcagcttcaacctctggaccattcccaacttcttggtgcagtgcctcaccagctacatgagcaagaagctgctcatcaatagcgactgtgatatgatctacaagtaggattaggttatgggatattgagtagtaggacagcgcaccgagaggttgcaatttattgttactttagtttttacatagctttaagatttgaataaacaactgctagacatagataaagatacgtgtgcatatttaaaaggtgtatgcgtagtacaattcacttggcttcctttcggaaatacgataagttcttaagatatcggagacttcgcgggtaatataatttgtctagttccctacaatttgatttttaacttgaatattctctgttgagtatatttggttgagatttcataaaaagatttgcctaatatcttgagcttgttaatatattttgtatatatctgtataacatctgtttacacgaaaatattttcatttgccaagtgaattatactgctctgtggtcccgagaatctgttcccttaaggtttcattgctgtccatttccattcctaatctccctccgccgtagagttatccgagttgtccggactgcacggacttccgcctccgccagaagctccacctctcacattcaggctgttgtggagcatgttagcgatgctatccacatccagattctcgtccgtggcggagatctttcgcagtgccgagcagacaatgctgagatcgcctctgagttcgctgaccaccgctgtgatcttcttggcattcgacaggacttcaacactcatcgtgtacgggttgtagcgcactccaaatggccgttggatgctctcggcaaaagctctttaagcaaagaataatttaatttatttgaaatgtggtttccagtgtagccaacgcacctcatttgctccttggcctcctcgaaggaatcggtgtagtagtaggcattctggtaggaggtgatgatgcactcctgctggcacgtcacctccgggtcgaacttctttatcttattctccgccgtaatggcatgctgcaactcggccactgagctcagaagtccggctccatacaccttaaatgtgct

SEQ ID NO: 33101 - DNA, 489 bp, DROSOPHILA
atgatgtcacatactgtgagggtcttcaagatgatgtacattgtggcgggcatcctcatcagcaatgcggagatctgcgacacagtggaccgcatccagatagcgccacgcgtcgacctcaagccggaatacgatcacaggtacttgacctccggaggcaatagtcccggctcccgatcccgcacccactctcgacagaattccggaagtggatccggatcggaggaaggatcccccaccaagaggcggagagtcagcgtttccggtatcgcggggggcgtggtcaggggcgtcactagccaggtcaccaagagagtgggccaccgcttcgtctggctatccgacatccggctcattctccggcaatggcgactcctggccctcagcttcaacctctggaccattcccaacttcttggtgcagtgcctcaccagctacatgagcaagaagctgctcatcaatagcgactgtgatatgatctacaagtag

SEQ ID NO: 33102 - protein, 162 aa, DROSOPHILA
MMSHTVRVFKMMYIVAGILISNAEICDTVDRIQIAPRVDLKPEYDHRYLTSGGNSPGSRSRTHSRQNSGSGSGSEEGSPTKRRRVSVSGIAGGVVRGVTSQVTKRVGHRFVWLSDIRLILRQWRLLALSFNLWTIPNFLVQCLTSYMSKKLLINSDCDMIYK

SEQ ID NO: 33103 - DNA, 4809 bp, DROSOPHILA
gttcagttttgagtttctcctgtctgcggccaatggctgctgacattgatcgaagtgtttttgtctgagctgctgtgggaacctcatccacatggctagatcccccagtcaatcagtcgtttctgtagcctccgattgggagctgcattgaggggctgcgtgaggggcacatgcgtacctgacgaaagaatcatattggacccactccccggcataactgggcatcggaggtacgtgactgatgggctgattgataccggctgaggtaacccacctgagtggcacgttataaccacccgaacacaatggcatatgcgatttgcatagccacatgtgaaccgttaaccccttattgtggtttaacggtacccatgcctcgagagagggaactgcaagccaagatggtcgcatctgttttagctggctagtgaaagtgtctttatttctagcatattaaaatgctaattttcattttattttgtccacgcatcgaaggcagaaatcgaaaacaaatcagcgattgtcacagatcaaaattcgagtcgatcggatcgcttagtggctaggaaacaggcctgcagcccacttgcgagactgggtgtcgatctgggtgtcgttgacagcggatatctgcaaaggcacctgtccagacagcacgaaaccacagtaccacctcagccccaagtccaactgcatgcagataagccacggctcaaaatgttcaataaacttaacggcttgtttttccggtgcgttacgtggtggcgacccaagctccattgccgactccaactgcgtctgcggctaccaactcccaactcccaacctcacaaccactttttaaatatgcaaattcaagttctcccatgtcaagcacgtacattaattgactccacccgattggttttccccttccaattaacgcagcgacagctcgacactgcagcgacaccatccgcaaccccgtcacccgggacagctgggacagctccacctcgagatggctcccagtgtgtgcgagatggccggccagggtcaaagtggtccggtgcccccgcagaaagcaagcggatccaacagctcaaaaggcacaaacaagtgcggagccagcagcctgaatggatccctggcctcctacaagatcggcggctccgaacagagttggcctcaggccccagtttacagcaaggtgagtgggggtagcttacctacccacagcatatccaatttgtcaccacacatattctctacacacaggaaaaccagcgtccgcctgtctacaatcccgaggactacgttcactcgctgaggaagttcatcaaggccagtggatcggccaaaaagctatccatatatgatgtgttcacgggtccgagtccaaaagaagaggcctccagatcggccactttgccagccaagcactcggagtacaagtaaggattggagcgtatgttcctgatatatttcattcattttgttccctccaacagatctcccattcctgctccaccagagaacgatagagagatgtccctgcgtcagtttggctccattacggatttgttgaccaagttgcgagctgatctgcgggtgtcctttcccaggtaagatcaatttcaccctttcagcgatctcttgcttacgattttcctttcagcttcgttcaggagtttgtgggcactcctgcggatggaataagccacctgctggaagtcctgcgcgccattcaaatggctcaggccagcaatgcgcctgctccaatgccaggagcctccagttccttggccatgaacaggaatccccaaagctatcagcgccgtgctttgctggacgaactgtcttgcctgtgagttttcaattctcaaagtgctcttgcgaaagtacctcatcctttaatcccatccaggcaatgtctgagcatctgttgttcgcgatctctggatgccatagcccgtttgggaaacacacccgtgggtctcatgccactggcttcctcggccacgggtcagggcatccgagctcgaatcctggcgctccagttacttgcctccgcctgcgatcgccagcccttcggaagcggcagtggtggtcagaagatagcctcggcaggacacacagccgtatcggatgccatgtccactttgcgattaagatgcagtgagccagttcgcttccgtttgctggttggcatcctgaacagcggcggtggttcgggcgaactgcagtgcgcgggtgttaagtaagggaatcattttgatatcagtttaggaacttactgaactttcttaatcttccctagatttctcaacacgttcattgagagcgccgtaagcattcagcagcgtctgtacatccaggctgagctcttccaggcgggattagatgccagcaccttggctcgtaccatctcctcctcttcgccctggttggatgctctgaagatcgaggtgaagcgcttcaacgaactccatattgacgtggaccagatgataacccgggcaagggatgcggagcgggtgcgcagccaaatggtgattctcgagcgaagggttcagattctgcacgaggagaaggccgtgctgacgtccatggagcggcgactccaagagcgatgtgccgaattgcaacgtgagatcttccggctgcagggcacgcagcagcagtctaagttcaagcccgttgagtcctcccatcagccagtggcccttcctcgtcaggtaccaccacccaagaaaaacaagcagaacagttcggagcacgaggacgagggcatcagcagttcggagacgggtgcatccctgagtccagtgcccattctgatacttccctccaaggcgaagccatcgcgaaaggttgtcgaggaggatgaggacgatgccgctaccattgaggatgtcatcgaggagctggacaacattgtaagtgaggccgaaaagcagatcagcagccagacgagcagtgtaacacggccaaagatgcgccaccatcgtccggtcgagaaggaaattgtgccggttaacatcgtaccacagcctcccagaaaatctcggtccttggcacatctggtgccccgcaccgattgctccgatcaggagggatcggactatggaatggttctacaccaaccagcagatcccgacgccgctgagcgactagcggccatgcaaagcttcttcgacgaagtggactacgatgctccagagacagatcagcctgctgcctaccaaatggaatcaccaacgccggacatgccagaggcgaatgccacggccacggcgtacaatgcgagcacaaatcgagagttgctggacgtgattatgaatgcgcggcatgacgatcacgatcccacaatgcaggccctgcggaaaagtgtccaggatgcggcgcccgtgacaattccccatcacccggtgaaggtcaaagcaccggcaccaccgcctccgactccgccagcccagcagtttaacggggtcttcttcatgaccggcatgaacacacctcagaagtatcccaagccagacatctcggctgccctgcaggccaggagagtcaccaagaacgtggagcgcctggaggcggccttcgcctcagcgcatccggaagccctcaacgaagcagccatcggaagggagaagtcacgcagcaatcagcagatatacttcaccagtaacctggcgatgaggatgcacgatcactctggcttcgccaattccagcggtgggcagattcagggtccaaccctccgcactcgatcccacacccaggggtccatgtcaaaggtcacggatctgccatccggcctctactaagcgatactccacaagatactcttagagattccagagactctccagctcctgtgcaatagcaacccactcctaggttacaacagcccatcagatcaccgtatttatagaacacttaatggtatttccatgcattataaacacgtttcttatgcaacatctcgagataactgcagcccagactaggttagttacggtggcagcttcaaccgggtatctagccagtaagatttagtatcgtagttcatgtctagcctaattgattattttccattgaataaagttcttaaactaaaatcaaacccttcttttggctaatggcagccgagtacataaatcggcaaatcaaatacttaatagtcaaggtaatacgttttcttgcctgctaatcacttatgagattagtcggatcttatcgctttacgctttaagtatttaaagtgttgaccagttggaagtgcatttggttagtctgcaactgatagcgctgccaaaatgagtggaagttctcccaattccataaggcctctgccgccgggtctgcaaaaagtggccatcgaagagctgaacgaagtgccaagtcgtgtggaatcggacattgctgctctgaaagaatggctacagaagcagccccatctctgcgcctgtctcgaggatcagttcctgcttagttttcttaggggatcgaagtttagtctggagaaggccaagcagaagattgatcgattctatagcctgcaagcggtcattccggaggttttcaacgatcagcgattggttgacaatgcccaggtgttggaaattattcgactggggtatgtaaatccactttgcgttctctaaactccaaatatttctatccctgcagagtgatcttgcgcattcccctcgatgaggaggatactggaccagccgtgactattattcgagctggctcctacgacatcaataaattcaagttccaggacatcatacgtgtgggctccatgttcggtgagatcat

SEQ ID NO: 33104 - DNA, 2511 bp, DROSOPHILA
atggctcccagtgtgtgcgagatggccggccagggtcaaagtggtccggtgcccccgcagaaagcaagcggatccaacagctcaaaaggcacaaacaagtgcggagccagcagcctgaatggatccctggcctcctacaagatcggcggctccgaacagagttggcctcaggccccagtttacagcaaggaaaaccagcgtccgcctgtctacaatcccgaggactacgttcactcgctgaggaagttcatcaaggccagtggatcggccaaaaagctatccatatatgatgtgttcacgggtccgagtccaaaagaagaggcctccagatcggccactttgccagccaagcactcggagtacaaatctcccattcctgctccaccagagaacgatagagagatgtccctgcgtcagtttggctccattacggatttgttgaccaagttgcgagctgatctgcgggtgtcctttcccagcttcgttcaggagtttgtgggcactcctgcggatggaataagccacctgctggaagtcctgcgcgccattcaaatggctcaggccagcaatgcgcctgctccaatgccaggagcctccagttccttggccatgaacaggaatccccaaagctatcagcgccgtgctttgctggacgaactgtcttgcctgcaatgtctgagcatctgttgttcgcgatctctggatgccatagcccgtttgggaaacacacccgtgggtctcatgccactggcttcctcggccacgggtcagggcatccgagctcgaatcctggcgctccagttacttgcctccgcctgcgatcgccagcccttcggaagcggcagtggtggtcagaagatagcctcggcaggacacacagccgtatcggatgccatgtccactttgcgattaagatgcagtgagccagttcgcttccgtttgctggttggcatcctgaacagcggcggtggttcgggcgaactgcagtgcgcgggtgttaaatttctcaacacgttcattgagagcgccgtaagcattcagcagcgtctgtacatccaggctgagctcttccaggcgggattagatgccagcaccttggctcgtaccatctcctcctcttcgccctggttggatgctctgaagatcgaggtgaagcgcttcaacgaactccatattgacgtggaccagatgataacccgggcaagggatgcggagcgggtgcgcagccaaatggtgattctcgagcgaagggttcagattctgcacgaggagaaggccgtgctgacgtccatggagcggcgactccaagagcgatgtgccgaattgcaacgtgagatcttccggctgcagggcacgcagcagcagtctaagttcaagcccgttgagtcctcccatcagccagtggcccttcctcgtcaggtaccaccacccaagaaaaacaagcagaacagttcggagcacgaggacgagggcatcagcagttcggagacgggtgcatccctgagtccagtgcccattctgatacttccctccaaggcgaagccatcgcgaaaggttgtcgaggaggatgaggacgatgccgctaccattgaggatgtcatcgaggagctggacaacattgtaagtgaggccgaaaagcagatcagcagccagacgagcagtgtaacacggccaaagatgcgccaccatcgtccggtcgagaaggaaattgtgccggttaacatcgtaccacagcctcccagaaaatctcggtccttggcacatctggtgccccgcaccgattgctccgatcaggagggatcggactatggaatggttctacaccaaccagcagatcccgacgccgctgagcgactagcggccatgcaaagcttcttcgacgaagtggactacgatgctccagagacagatcagcctgctgcctaccaaatggaatcaccaacgccggacatgccagaggcgaatgccacggccacggcgtacaatgcgagcacaaatcgagagttgctggacgtgattatgaatgcgcggcatgacgatcacgatcccacaatgcaggccctgcggaaaagtgtccaggatgcggcgcccgtgacaattccccatcacccggtgaaggtcaaagcaccggcaccaccgcctccgactccgccagcccagcagtttaacggggtcttcttcatgaccggcatgaacacacctcagaagtatcccaagccagacatctcggctgccctgcaggccaggagagtcaccaagaacgtggagcgcctggaggcggccttcgcctcagcgcatccggaagccctcaacgaagcagccatcggaagggagaagtcacgcagcaatcagcagatatacttcaccagtaacctggcgatgaggatgcacgatcactctggcttcgccaattccagcggtgggcagattcagggtccaaccctccgcactcgatcccacacccaggggtccatgtcaaaggtcacggatctgccatccggcctctactaa

SEQ ID NO: 33105 - protein, 836 aa, DROSOPHILA
MAPSVCEMAGQGQSGPVPPQKASGSNSSKGTNKCGASSLNGSLASYKIGGSEQSWPQAPVYSKENQRPPVYNPEDYVHSLRKFIKASGSAKKLSIYDVFTGPSPKEEASRSATLPAKHSEYKSPIPAPPENDREMSLRQFGSITDLLTKLRADLRVSFPSFVQEFVGTPADGISHLLEVLRAIQMAQASNAPAPMPGASSSLAMNRNPQSYQRRALLDELSCLQCLSICCSRSLDAIARLGNTPVGLMPLASSATGQGIRARILALQLLASACDRQPFGSGSGGQKIASAGHTAVSDAMSTLRLRCSEPVRFRLLVGILNSGGGSGELQCAGVKFLNTFIESAVSIQQRLYIQAELFQAGLDASTLARTISSSSPWLDALKIEVKRFNELHIDVDQMITRARDAERVRSQMVILERRVQILHEEKAVLTSMERRLQERCAELQREIFRLQGTQQQSKFKPVESSHQPVALPRQVPPPKKNKQNSSEHEDEGISSSETGASLSPVPILILPSKAKPSRKVVEEDEDDAATIEDVIEELDNIVSEAEKQISSQTSSVTRPKMRHHRPVEKEIVPVNIVPQPPRKSRSLAHLVPRTDCSDQEGSDYGMVLHQPADPDAAERLAAMQSFFDEVDYDAPETDQPAAYQMESPTPDMPEANATATAYNASTNRELLDVIMNARHDDHDPTMQALRKSVQDAAPVTIPHHPVKVKAPAPPPPTPPAQQFNGVFFMTGMNTPQKYPKPDISAALQARRVTKNVERLEAAFASAHPEALNEAAIGREKSRSNQQIYFTSNLAMRMHDHSGFANSSGGQIQGPTLRTRSHTQGSMSKVTDLPSGLY

SEQ ID NO: 33106 - DNA, 2363 bp, DROSOPHILA
agagcaccatcgaggacatcaagttccgcgtgctaaaggttgtctccgcctacgacaaagtgaccgccgaaaaggtaaagtacccattgcatggcgccactaatccggtctttgtttccttcctttttttctcgggccggccaaaaaccaggagtgccgtggtcgctggcaaacgcaattggtgcgcagatactcggcgaaaccgccgctctcgctgaagctgatcaatgagcgcgtcttgcttgtgctcaagctctacgacaagatcgatcccagcaaggtaaacgccacatattgcctttgccagtgcaatggtcgcctcagaaatcagaactgaacaaagctgatgaaacctttgaatacccaatgctaatggctcgcatttacagctcaacgttgagtcgcacttcatcaacgacttgggactggattccttggaccacgtggaggtcatcatggccatggaggacgagttcggtttcgagatccccgactctgatgccgagaagctgcttaaacctgccgacattattaagtacgtcgccgacaaggaggatgtgtacgagtaaattgtaattgtaatgcaagccattgaacggattacacttaaatttaaatagaaaacaagtcaaatacaatttgatcaactgaataaaccaaacgttaaattaacttgtagtcagcaattgtacacgagggctataattaactgcggaatagcagctaataaattaactatccaaataaataaacgagtcatttagtactggcggttaaatttaaatttcgatagaaacgttggtctttcgattgttttagaaagccttgtgtattttagatacgcagcgacggtcacgttaatctgctagcattacaaacagaatattcgaaatgtcagacgctgtggacaaaatgttggcgggaatgggtaaatatatctttaaaccaccgacacgcgttctattccgtgcttccaatttcagcggccaatcggcagaccatgaaccgccagctggctaagatagacgagataatggagcggtcgaacaacacattgctccacatcgagtccaacagcaaggcattcagtcagaatgtggctttgtcggagacccagaagatgtacaacctcaggccggaggctgagatgaccctgtccaagatcctggagaacttcaagctgctcatgtctagcagtgaccagcgggaggagacatacagcgctctggagggctgcctggcctacaggcatcgcgtggagcaccttggcagctccgtgcgtaagctggtggcgctctacgacaccgtgggccagatgaagaactcacaggaagagcagtatgccagcgaggattccccctagctcatccatttttagaatttattattatgttatagttgaaaaataatttaaataaattaaacatttgatttgtatttaaagctctttaagcgaggttttcaaatcatggccatattgtagctgctgacttggagaagcgtataggtaagcacctctacgaacatctccaggcgagcggcaagactcccggtggcgagtatctcattgggattgggcagctggaggctgttggagcgcaggtagttgagctgttccatattggcggctatggtcagaagcttctcctgctgctcggatgtaaaagcatctggcggagactcaccgccggttggcatgagcttttccagctgctgcgcaaatccatggagctgcgtcagcttctgcttgtatatggattctgtggtgtccagagcggctgcctcgtcgtagatcttggccagctttcgctggaaacccttaaaatcattgtacacgtccacggcactgcgctgctcctccagacgcgtcagactcagcgaaacgttggatgtgttgatgcccatggccaccgactcgtctgctcctcgcaggagcgttgagttggtacgttgtagctcccgcttcttgggcattttctgcaggttggccgggtactcttccaaggtcttgaagagctccgcatagtcggctaccgagctaagatccctcgggggcgtagtggctgctgcctcctcctccatcatctgctgcaggctgtcaaagaaggcccccggtttcatcaccgtcttggatacgcacacgtcctttaggtttctcacatgttgcgcgtactttctgtacaacttggatgaaatgctgctgaaatctacattagtttccatttttattgtttacgcttcacttctcctttgataacttcgtttgaatggcctgcgccgcatctatcggaaatcgataacgcaagctgtggcggtttaaatttgaaaacaaaagttctatacaaattatgatcgcttacgga

SEQ ID NO: 33107 - DNA, 363 bp, DROSOPHILA
atgaaccgccagctggctaagatagacgagataatggagcggtcgaacaacacattgctccacatcgagtccaacagcaaggcattcagtcagaatgtggctttgtcggagacccagaagatgtacaacctcaggccggaggctgagatgaccctgtccaagatcctggagaacttcaagctgctcatgtctagcagtgaccagcgggaggagacatacagcgctctggagggctgcctggcctacaggcatcgcgtggagcaccttggcagctccgtgcgtaagctggtggcgctctacgacaccgtgggccagatgaagaactcacaggaagagcagtatgccagcgaggattccccctag

SEQ ID NO: 33108 - protein, 120 aa, DROSOPHILA
MNRQLAKIDEIMERSNNTLLHIESNSKAFSQNVALSETQKMYNLRPEAEMTLSKILENFKLLMSSSDQREETYSALEGCLAYRHRVEHLGSSVRKLVALYDTVGQMKNSQEEQYASEDSP

SEQ ID NO: 33109 - DNA, 3062 bp, DROSOPHILA
caactgcgaacccagtgtgtccattcgattccagtccgctggacgctgctgcggtccgcaattttaatcgatttgcgtatatggcgaatggaggactattaaaaaaaaaaaaaaaaaaaaaaagaccaggagagagccgaaaatgagactggcgaacttggaacttggagcgtacccaaaagtgggcgttaccccaaactgaatgggaaaatgagtgagttctgaggctgggagtcggaatctgccggtggtgctgatgacgacgtcgcattccaagtagcgcatatgctgcaccattttgcctttccattgccttatgacttggactccggagctgcaggcagccctccagctggatatctgcagctctggtgccttgaaagcaaaactaattaaaagtgccccgaaaacaaaacatctccaaagggcaggattagcctaagcggaaccaaaattcgcaataccctgggttaaaccataaaggaatatgacactttgggtaaacataagtaattgagtttagcaaaaagcaaagaaatatcctttacttatattataacctataaaggacagtctttcataattaaactatatgaaagagcaaaggaagtatctaaatagtatatagtacgtatctctcagataagaaagatgtaaaaccttcctgcaaaatgaaatgtaccccgagtaagggcatgacaagaatcagggcaatccaaacaaaaccacaccgagttgactcgactcgagccaagacgggacattggacattggacagtggatggtggacattgccaggaaccttttgcccatctgcatgccttttttggggcccggggcgctgccgatcggagtgttcagggagtccggggacccgagaagctcccattttcttaaccactaaaattaataataagtgatctggatctggtttcgagcaaaaacaaaacggccggcctgcggttgagttgaagtagaacgacgtctcgggcataaataaatgttatgtgctttttgccagccaccgcagaaggagcagcatgagcagcatgagcagcaggagcagaaggagctggatctgggcaggcaaatccataatgcgcccgaaatcccataccacgttcctttggcacctttgtggcctgcggcgagacaacaaaatcattttgccgccgccgaaggtttactccatttggcaggacgcaagggggcatttgggggacttggagcgcccattattgattggctaatcaaatcatttgccagacttacggcaacttgtagagcccgggaatcagaccaacgacagccgcaattatcattccaaagtcgcgacgcgacacggccaactaattaataatcccagcgattagcccagtcccgaaaaacccagtctgtcccgccatcctcgcccatttctttagcccctatttctcgggccgtttattaattaaaagactctcggtttcttggaggctgtaactgggcaaggctgcccaactcaacacccagctgaactgaagttcatcttgtgtacgattacgcgaaaatgccctttcaattggtaatatggctttggataaaggggttaaagaaattaatatttgagtcagttaccattttgtatctgtgcatagaacaaagatagatagataaccttttaaagcaaatgaaacatggcataaatatcgagtttaaatgtgtgaccaagccaaggtaacttgcctttcatcaccctgtacatcttggcatacaacacacttattattacctaatttgatagatgtaactaaaggactcattatccttgctgctcatctaagagtatcccatattcatttaactctaagcacggatttcccccttgttttcatttgtttattttcgcgcttttcggtgtttcggcattaattagttcttttggcgtatccattgggttttctggcgcggttttaaggtaggtgtttcctaatgagtcgccgcagacgccctcctggcgaagaagtcgcatccagagcaaggacccagatggcaggagccatggaaaggaaggtgtacttgatgggctgctccccaaatgtttgctcaagttagttgtgcaaataagtttattagtgcgattggggcgggaatcgaaaggggcgtacattgtgatgaagaacgaggagaccggaggtccagcgaagcggaggatgagctcataaatgtgtagtccattagcgctagtggagatcggttgagtcaagagccggagcgagcattcgcgagttgttttttttttttttttttaaagtgcgaaatttcatttttaataagcgaggatttcctcattaagcgccttcacaattttgtggccaggatatggaatgaatttctgtatgcggccagaaggcattaaaagcattatgcaagcggcgaggtgagcagtggaatacgagatgtaattgcggatttatgtgctggcagttcgaaagagtgttgaccaaaaggataatggagtcctcgagcgagaggaaataaagtttcgtaatgattttcacaatttttcgctcattctctctcacttgaaatgttgcaaggcgagtagcaatctgcattctgtttaaacactttaaatcaattgactgaattttactgcactcccataatcctttgtcccgtggccacaaaataaacaacgggggcatcgaatgaatcgaatgaatcccttttggcgactccacatgctaattaaattaggttcgaatgaatccacaccgaaatagccgaaaattcaattcgagctctggccaaattccaacaaaatttgcgaaatccgtttgcagggattgcattaccgcaatcatcgcagtttgcagtttgcagtttgcagtttggagtttgcatcagaggacagaaggccgttgaacatgtggcattaaatgccaattaaatggccaaattgaagcggcgcaaatagctaattgatatatatgcatccgtgtatccgtgtttcaattcgcagttggggattacggagacactaatcgcgccattatgacggacggactgatggttgttat

SEQ ID NO: 33110 - DNA, 258 bp, DROSOPHILA
atgttatgtgctttttgccagccaccgcagaaggagcagcatgagcagcatgagcagcaggagcagaaggagctggatctgggcaggcaaatccataatgcgcccgaaatcccataccacgttcctttggcacctttgtggcctgcggcgagacaacaaaatcattttgccgccgccgaagacgccctcctggcgaagaagtcgcatccagagcaaggacccagatggcaggagccatggaaaggaaggtgtacttga

SEQ ID NO: 33111 - protein, 85 aa, DROSOPHILA
MLCAFCQPPQKEQHEQHEQQEQKELDLGRQIHNAPEIPYHVPLAPLWPAARQQNHFAAAEDALLAKKSHPEQGPRWQEPWKGRCT

SEQ ID NO: 33112 - DNA, 6561 bp, DROSOPHILA
caggagcggcgctccttatttgccaagacattaggcagcgcagcaacaataacaaaaacagaaaccgtcagccggcaggcaggcaggggcaaaaaaaaaaaaaaaatgagcaaggacaacaccgcgtgtttgctgtcagtcgaggagtcgagggatcacctcgagctcaggatcctctgattgacaatcgacaaatttcgtttggcatttatcaatggaaccgcgaggatcgcaaggacctcgagtgtcgacctcctggcgcgatgatcaatcggggaatttgtgtttttacacgcaacttgacggggccaacacggatttggttaagttaatattgttaatgttgttgtacttcagactattataaggacatttttcaagcgaaatggagttacgccctccaggtttccaggagaaatggtaaatgtaaagagacttataggtagaactatctaacttacaggcaatggtgagtttcctactaactggccacatttcctgagcactctatgcatgcatgctttaagcccttttaggccctaatagctctaaaagtgcggtgttcgctaaaattcaaattcgcagccgaaaaaaaaaaaacgccgaaacaagcaataaattcatgttaataacagttgcaacagcaaacagccccaaccccgaagaattttcgatgcccaacggcaactggccataaatatcggccaaatgggttgacagttggcaagaggagttaacgaaataaaaaagcgagcagaaaccccttcgctgccgaaatgtaaactcccgaaatagtaacgaaatgtgatacgaatcaagtgccacgtgtcgccccttcctcgagcagttcaaactcctttatttgcgaacagttctgaattttttcgacggccacaactgttcaactgttcaagatccgaaccgaaactcaaaccgagcgacagatgcgcgtgtctgaaatggtgttacactttcgcccgaggagcggggttaacgtttatcaggtccaacaaatcgtgctaggggagatttcggctcggtggttcctgtggaggcgtgcgtcgagggggcgggcgcagatctcgttaaaccgcaaccgagggcgatcggatctggccgtcaggacatctgtgatcagatattccgttggcggatcacagatctggggccagagatcggtgaggcgggcaggaccgtgaaatgcaattgccatggcgtagcggttctcgcagtccgttacgcgaaattgatgggccaggttgctgtgctccgttcgttgttgctctacctgtcagatgcagtgagagaaatgctgattcttacgaagtatcctcatgactactctaaactacatcaccttattccgcgctgatgattcatgtatatagaatttctttcagtgcaggacaagtaacatccaaagtgtgcctccttcgagaagatgttccaattaagatcagtatgaccagatgttgcgccccaacgatccgatccatcagccagccgtgtgcttgatggccaggaatgtctgtgggagagcatcatctcccacacacagctgcgcccagtggaacctgcaaggtgctgcacttccaaatgggagttcgaaggtttcccgacccgaaatcggatactcggcgaccacttggcatgtgccaaggaaatggacaaacggccagcacttgaaaaccaaaaccagaagtgacccaatatccacttgaatttcactgcgtttagtttcgtttcccgaaattttagcgcccaccttgagtgcccggaattcggaatcggattcgattccctgccctccatcaccatctccatctccatttcggggtgtcaaaggccgtgttagctcgtgcagcctttgacaggagagtccagagaacccacaaagttgcgagtcaatttgtcagcgagcggggcattgaaattgaaaattgccgagcagcctgcacttcgaattgaatgggacttgggactttggaaattcgataccacagctgccgaatgaatgcagcctgcagatacaagatactgggcgttattacgcaaccttttgtggccatttgaagtaaaggtggctctgtggctcagcaggaaaagctttgccaaatgctgccggcgaaatagagatgaaaactgagttttccttttgcacacaaacgcatacggaaaatggcaaacaggatgaaaacgcaattgcaaacgtatgagaagtgaactccatcgaaaccaataataaataatgcagactgaaaatctttaataacgagtttagcattatatagatacatataacatcctgtaagttgtatccttcaagttgcctgaggatacgattttgtttttcgaggcctcaaggcgtttcgatattccttcaaatgcgctatatcatttctgttgcatgtaggtattatcagttgctcatagggctcgaaaaaattgagaattctagttttgtcctggaccaaaaggagcggaacaaacaccttgaggacacgcaagaaaggtaacttttttgtggcctccgtaggttgtttctgtgccaattcaaagacgaacaaaatgccagatctatgaagtgcgatcacgcactcgcgatgctccatgggattggatatcagtattttggccaaacgattggccagctccattagctcggagaactcggctggcctcaaagctctttgtccagctgcatgacgagtatcatctgggaaaaccttagcataaagcagcaggcatgtgtgcaacatggtcattgcgaagtgaatgggatttcgttgaagtgccagttccatggagcatctcatgacgtcgccgaagggagcgtggtactgaaaatggaagttagcttcaatgaaatgccctttgcagagtctttctactttctctaccaacctttacgtaatactcatagaactttgaggctctcatggtgggcacaacacctaggcacaccactttcaagtagctggtgaggattgaacgaatcctctgcagctgatccgagttagtctctagcataagatccgaaggacttagctcaaggaagtgttccatgaggaaaccctccagaatgtccaactcattaccagacggtacgtgcgccactgaacgtatcgagggattcgaactgccacagaggtttccatgcaacacaaacagatcgcaagtatatgaaaagcactggaaataaacaaacgattaacaaatcgtttaacaaatcaatggccatggtactcgcaatcaacattcactcacaggatatgccaggggttcggtgttgctcttgccaaccaaagaaaaggtcacatataggtagtcttctaggttatgatgcagaacatcgcaatactcatccatgtccacgttattaagggccgttccctccaagttttccatgtcccagcataggcagcaaaaacatgccttcagatagagcgagaatgcctccggcggaaggtcatctccgttcggcaacctgcgctgcctaagcaacatcttgaggctgaagagaagcggctccgtcaagtcccatttactgagattgaaatgcccgcttaggactgtaagtaatcttagagtggccagcagtctgttggactcgttgtgcgtacttctcgatgggctcgtgtcctgcgttctgtgccaggccatcttgtagttggttaccgcgctgttgagcaattgcttagttagcggaatgggaatcatgcggtttagaaactccagagttttcactgtgatttgcagcacagtggtgctgcttgtctgatcgaatattatgagctcaaaatgctcaaccagttcattaagctgccccattctattctgctcatggtagtaatcgaagcagaagtatttcggtagttccagaagtctctctatatcttgcaaacgattggcgtacgttcgaagaagttcgggcagaacgggtgccaagcacttggtggccctctcttgggcgccctgcctcggctccctttttagatccttggtatatcttccgggcggtatctcgccagcggtggcttgcttcactcctgccaaaaggattgcaatcaatgaggagcaatgaatgtcgctaagttcgcgggatttaggattctccagcagcaccgctatcatggacttccagtccagaaccaattcgcagttgtcgattaaggagtccaccaaatagtcagcctgttcgtgtccacactcaatgaataactgcagaagatgctttactctttggcaaaatgtttcgccatccaacccgtttcttcgcaatataaacagatctgcggctgcttgagccaaaccccgattcgcggccattattagctgctccagcacccggcaaacgtcgtcagttagaatttctgcggacagtacatggaaatgggtaaggaactgcacggatttctcagctattgcatcctccttgcccaagcaaagttcaactaagatctcccggaattcactggttaatgccacaatctccgagaaaaggacatccttgcggcacagaacggatatattatccaagctgcactgaatcacatcaccagagccatcatttaaagcttcgtagaaaatacgaaggctagttggctgaagatggcaatgtggatatctggcgaaccactggccaagttcggagatacaaaggagacgtatgtcggtcactatgtcccggctgcgagctacgaacatgctgttgaacatttgcatccaaacggtcatcgctatttcatcgtctaaggatttcaaatcgcttaatatggtcattattttcaaacctagaaatgttcataaacttatattatttgcacgttaagttttggtatcagttttggtttctcacctatcatggtggcggtatggcgaaaagtacgaatattagactccgagcaggccatcacaaaattcgtcaactggaccagaaacaattggtaagagtccgagcgaaatttattggcgaccagcagcagagcattcaaaaagctgcccacctggttcacaaagacatcggcgggcttcctaatcagaggatatatgtgggtctgaaagtggggcgggcaggtaaaaatgatatccctataacgctgatttatgtatcccacttacattggaaaaatgcgatgagctgttggagaggatgtcactgtagctgaatggcattgaagtatcatctggaatctgataatgacttccactaacctccaccacaaactgcaagagagcaaccaaggctgctgtggggctgtccaagtaaaattcaccccaatatttggccacgctctcaatgtggctattacgtttatttgtagggcttaaacgttttctggagaggatcatttgcagcaacgacttattcgtcgcatcaccgactgtcccatcgacacagactggctcatcatttggggcaatgctaaatttttcacttcaatgacttgcaacagttatcgacttttgacttacctgcactcttcacgtatctcaaaatccatctgattagaagcttgagagtcattcagaacagcgtcatcaaaagatatatcactcattttcacgcacaaattaaaagagtaaaaatatgctagcacattcgcgtggcacacaattcggaaaaaaggaaactcggtgctgccaacttcgccaattaagtgacagaaaacgaaccattaaccaatgaaccacaactgacataaagcgaacttttgaaatttgaggttatattcagggctgcaaacaattctaaaaattaaacttaaaaattataaaacctaactgaaaagtcacaagatacatacaccaatgcgccaattcagtttttcagatataaattcagatatagtttcttaaaaatcaatacaacacgtgttttttgtcttgtcgactaaattacattttttaaccattttttttttgttgggacacgaataaattaaaaacaggatgtcaacatcttactcagctgtgagggtaattttccagtaaactcaaaataatttgtacaacccaagaaaaaacttgttaaatttctagcctgcttgcagttttcccacatccaccgcaaaataatgaaatccgaggcaaataaagccgccgagattcccatacttggatcgagatcaggtcaggtagccgatctttgagggcacaaaacaattagcctggcccacagaacgatacacaaaaacactgagcaaattgggcagccacttgctcgacctcaaagcgaaagcgccgccaattgaaacggactaacaaggacctcataatcatgcccatgcccatctgatccgttccgttccgatccgatccgatccgagccagaaataaacacaaatattgacgttgcctatcgcacgcgatctccgctcctccttcccacaaatatactcatatatttgtatacatatatgcccaaagatcagagatcagaggacccgaccgctgaccaattcgggatgacttggcaagttggcagcaactcggaattatttcaatctacgctgatgacgcggctccttttgggcggtggcacgataaaaagctggcgat

SEQ ID NO: 33113 - DNA, 2946 bp, DROSOPHILA
atgagtgatatatcttttgatgacgctgttctgaatgactctcaagcttctaatcagatggattttgagatacgtgaagagtgcagaaaacgtttaagccctacaaataaacgtaatagccacattgagagcgtggccaaatattggggtgaattttacttggacagccccacagcagccttggttgctctcttgcagtttgtggtggaggttagtggaagtcattatcagattccagatgatacttcaatgccattcagctacagtgacatcctctccaacagctcatcgcatttttccaatacccacatatatcctctgattaggaagcccgccgatgtctttgtgaaccaggtgggcagctttttgaatgctctgctgctggtcgccaataaatttcgctcggactcttaccaattgtttctggtccagttgacgaattttgtgatggcctgctcggagtctaatattcgtacttttcgccataccgccaccatgataggtttgaaaataatgaccatattaagcgatttgaaatccttagacgatgaaatagcgatgaccgtttggatgcaaatgttcaacagcatgttcgtagctcgcagccgggacatagtgaccgacatacgtctcctttgtatctccgaacttggccagtggttcgccagatatccacattgccatcttcagccaactagccttcgtattttctacgaagctttaaatgatggctctggtgatgtgattcagtgcagcttggataatatatccgttctgtgccgcaaggatgtccttttctcggagattgtggcattaaccagtgaattccgggagatcttagttgaactttgcttgggcaaggaggatgcaatagctgagaaatccgtgcagttccttacccatttccatgtactgtccgcagaaattctaactgacgacgtttgccgggtgctggagcagctaataatggccgcgaatcggggtttggctcaagcagccgcagatctgtttatattgcgaagaaacgggttggatggcgaaacattttgccaaagagtaaagcatcttctgcagttattcattgagtgtggacacgaacaggctgactatttggtggactccttaatcgacaactgcgaattggttctggactggaagtccatgatagcggtgctgctggagaatcctaaatcccgcgaacttagcgacattcattgctcctcattgattgcaatccttttggcaggagtgaagcaagccaccgctggcgagataccgcccggaagatataccaaggatctaaaaagggagccgaggcagggcgcccaagagagggccaccaagtgcttggcacccgttctgcccgaacttcttcgaacgtacgccaatcgtttgcaagatatagagagacttctggaactaccgaaatacttctgcttcgattactaccatgagcagaatagaatggggcagcttaatgaactggttgagcattttgagctcataatattcgatcagacaagcagcaccactgtgctgcaaatcacagtgaaaactctggagtttctaaaccgcatgattcccattccgctaactaagcaattgctcaacagcgcggtaaccaactacaagatggcctggcacagaacgcaggacacgagcccatcgagaagtacgcacaacgagtccaacagactgctggccactctaagattacttacagtcctaagcgggcatttcaatctcagtaaatgggacttgacggagccgcttctcttcagcctcaagatgttgcttaggcagcgcaggttgccgaacggagatgaccttccgccggaggcattctcgctctatctgaaggcatgtttttgctgcctatgctgggacatggaaaacttggagggaacggcccttaataacgtggacatggatgagtattgcgatgttctgcatcataacctagaagactacctatatgtgaccttttctttggttggcaagagcaacaccgaacccctggcatatccttgcttttcatatacttgcgatctgtttgtgttgcatggaaacctctgtggcagttcgaatccctcgatacgttcagtggcgcacgtaccgtctggtaatgagttggacattctggagggtttcctcatggaacacttccttgagctaagtccttcggatcttatgctagagactaactcggatcagctgcagaggattcgttcaatcctcaccagctacttgaaagtggtgtgcctaggtgttgtgcccaccatgagagcctcaaagttctatgagtattacgtaaagtaccacgctcccttcggcgacgtcatgagatgctccatggaactggcacttcaacgaaatcccattcacttcgcaatgaccatgttgcacacatgcctgctgctttatgctaaggttttcccagatgatactcgtcatgcagctggacaaagagctttgaggccagccgagttctccgagctaatggagctggccaatcgtttggccaaaatactgatatccaatcccatggagcatcgcgagctgcacgagctaacacggcctttgacaccccgaaatggagatggagatggtgatggagggcagggaatcgaatccgattccgaattccgggcactcaaggtagagcaacaacgaacggagcacagcaacctggcccatcaatttcgcgtaacggactgcgagaaccgctacgccatggcaattgcatttcacggtcctgcccgcctcaccgatctctggccccagatctgtgatccgccaacggaatatctgatcacagatgtcctgacggccagatccgatcgccctcggttgcggtttaacgagatctgcgcccgccccctcgacgcacgcctccacaggaaccaccgagccgaaatctcccctagcacgatttgttggacctga

SEQ ID NO: 33114 - protein, 981 aa, DROSOPHILA
MSDISFDDAVLNDSQASNQMDFEIREECRKRLSPTNKRNSHIESVAKYWGEFYLDSPTAALVALLQFVVEVSGSHYQIPDDTSMPFSYSDILSNSSSHFSNTHIYPLIRKPADVFVNQVGSFLNALLLVANKFRSDSYQLFLVQLTNFVMACSESNIRTFRHTATMIGLKIMTILSDLKSLDDEIAMTVWMQMFNSMFVARSRDIVTDIRLLCISELGQWFARYPHCHLQPTSLRIFYEALNDGSGDVIQCSLDNISVLCRKDVLFSEIVALTSEFREILVELCLGKEDAIAEKSVQFLTHFHVLSAEILTDDVCRVLEQLIMAANRGLAQAAADLFILRRNGLDGETFCQRVKHLLQLFIECGHEQADYLVDSLIDNCELVLDWKSMIAVLLENPKSRELSDIHCSSLIAILLAGVKQATAGEIPPGRYTKDLKREPRQGAQERATKCLAPVLPELLRTYANRLQDIERLLELPKYFCFDYYHEQNRMGQLNELVEHFELIIFDQTSSTTVLQITVKTLEFLNRMIPIPLTKQLLNSAVTNYKMAWHRTQDTSPSRSTHNESNRLLATLRLLTVLSGHFNLSKWDLTEPLLFSLKMLLRQRRLPNGDDLPPEAFSLYLKACFCCLCWDMENLEGTALNNVDMDEYCDVLHHNLEDYLYVTFSLVGKSNTEPLAYPCFSYTCDLFVLHGNLCGSSNPSIRSVAHVPSGNELDILEGFLMEHFLELSPSDLMLETNSDQLQRIRSILTSYLKVVCLGVVPTMRASKFYEYYVKYHAPFGDVMRCSMELALQRNPIHFAMTMLHTCLLLYAKVFPDDTRHAAGQRALRPAEFSELMELANRLAKILISNPMEHRELHELTRPLTPRNGDGDGDGGQGIESDSEFRALKVEQQRTEHSNLAHQFRVTDCENRYAMAIAFHGPARLTDLWPQICDPPTEYLITDVLTARSDRPRLRFNEICARPLDARLHRNHRAEISPSTICWT

SEQ ID NO: 33115 - DNA, 2934 bp, DROSOPHILA
tagataattcgagcggcgattttaacaaacaaatttaaacagctttaaaattataataagaagagcgcgaatttttaaaaattattttatttcatcatattgctacgaaattggcaaaaaactaccctaatatgtacaatgtaaattcatttctttgatcagaattgatttcggcccgaaaatcgtcttctagcacaacacgcacacatatacgcgttctcgtctcttgtttttaactcacacaagcaagcaaattctatttttagatttcttatgttctcagcgtgagcgagcggaaagagagcaattttggccgtcaccaaaaaagtggctgcatagtgccaaaccaatgtatggccgttacgcatcttgttattctagtgtctttgcccaaactcactcacacacttacacacacacacacaggggcaaatgaggacacgtcggcctggctaattcatgactttaaggacactttggcaaacaatcgaacggccaaggcgaaggaatattcactgtgcaattgattatgcatgagtgttttgtcgtgtgcggtttgtgtgcgtgccaatcaactgggtagaatcaatcaaaatgcaataggattgccctgccaatcaaaggaaaagccgagaaaagcgcttcattcgctcgcagaagtcacctctgccgcccactcccctccagttgcacagctcaagtccaaggtagtattttcggaccacatcaggacaaatagccagtgcccaggtaaccaggacaaacactcaaatgcctggccaagcgtggcgaaggaagcaaacgagacgtgggcttacatacagaaaaactatggtctaactttttctacaatcgatgtccttggtatatccttcaaataacttaatgcgcagtgtatttcattcaaatacattgctgcttccggaacaaggtgtccataggtactagcataaaagtaagtaacccccttttattcgcagtgtaagcgtaagcggcgcatttatttgccaagcgcactttttgcatttgccaaacaagagtgcggctcctgccaggacgaggccttgtcctccgtctgtttgaacacgagcctacactttggacctcgtcctgggtgagtactttgcacctgtgtttgcacttaaatcgagtttgccgttgatgagcagcccgggacaaatatacgcatggcatgggtgctttgggtactttggttactttggttacttggccagtgaccaccggcgattgtaattgcggcacacggcacactcaccacattcacaaagtcctggaacgtcacgtagccgggtcctgtgggcagcttcgccttctttgcccgctccagcagcagctcccgcttgttcataggcacttgggacaggaactccggcgacttgagggcctccaggaattcctcgactgatatttcgccaaaaccctcgggatcgaactgcaaagcgtgaaaagtaattataaataagtataattataagtattcctttttgggttggcttactcaccatgtcaaagagcagtttccatttctgtaagtaaagtgaagaaagaaggaattataataagtaatgttcaggattttcgtattggaactcacatctcttagtagctcccgtcgcagctcggcctcatcgaagtccgagttcagggacgtgtgttccgtatcatagccggcatcattggtgcattgctgcgggtaattagagttagagatacgatctttacaagcaactccggctccttacatagcgcatttgggtgtgcgagagggatccaatggaggcaagggagccggcaatggtggatatgtgctcgatgtcggccagagtctcctgctgactactaccgccggcattttgctggctggttgggatttccagggcccgcgagcttcctcgctcggagccgggccacatcctgctgttcctggctatccagatttggttttgggatcagggcggatcgttgtgttgtggtttggcagtgtttgtagcgattagagttcagctgcggaaaagtaattatcaagtattatgctccgaacttgtctgtccttttattccccaatattgtagaaatttaaataataatttgaaacaaaaaaagtaaatagctgttatatatttttaaaatgtttgttttcgaaattcgccaagtggatccactgtgcagagcttttcaatctctttaactcaaaagctcttttggaggcagttcagtttgaacgacataaattccaccaccgatttggtcgagtgcgctgagatgtcgattcacgcgtgctcacgtttttcgagtggcggttcgagtgccgccgaggttgtgtcgagatgaataaaaaaaataattcattcatttcgttttcttaagaaaagaaattaagattttctgtttgttggggttgggggggcctgtgaaatcagtttgttgcaatttgacgttactagaattgttgcactttccgcgggcccagagagatacttccggataatcataggctgctggttttcaataccatagtctatttcatggccggcaaacaaatttcctttttgcttttgccctttgttttgattgccaagtcaacggtttgttgtcgttttcccttattttccgctgataagaaggttattgatcctgctggaaatataaggcacactgcgcagaatccggctggcaaacaattgttttgcattttgtttacgcctcgtcaattgccggaacaattttgttttcattttgttgaattaaactaggcaattggcattgattgaatggttttgttagcgaatgaatggaatgcgcattcttctccttccattgaaggagaattggcttgattgctaccccccgtgtgttttgctttctatttggttcacaggactttcttgcttgcgcttctctgcttggcctttg

SEQ ID NO: 33116 - DNA, 540 bp, DROSOPHILA
atgtggcccggctccgagcgaggaagctcgcgggccctggaaatcccaaccagccagcaaaatgccggcggtagtagtcagcaggagactctggccgacatcgagcacatatccaccattgccggctcccttgcctccattggatccctctcgcacacccaaatgcgctatcaatgcaccaatgatgccggctatgatacggaacacacgtccctgaactcggacttcgatgaggccgagctgcgacgggagctactaagagataaatggaaactgctctttgacatgttcgatcccgagggttttggcgaaatatcagtcgaggaattcctggaggccctcaagtcgccggagttcctgtcccaagtgcctatgaacaagcgggagctgctgctggagcgggcaaagaaggcgaagctgcccacaggacccggctacgtgacgttccaggactttgtgaatgtgacggaggacaaggcctcgtcctggcaggagccgcactcttgtttggcaaatgcaaaaagtgcgcttggcaaataa

SEQ ID NO: 33117 - protein, 179 aa, DROSOPHILA
MWPGSERGSSRALEIPTSQQNAGGSSQQETLADIEHISTIAGSLASIGSLSHTQMRYQCTNDAGYDTEHTSLNSDFDEAELRRELLRDKWKLLFDMFDPEGFGEISVEEFLEALKSPEFLSQVPMNKRELLLERAKKAKLPTGPGYVTFQDFVNVTEDKASSWQEPHSCLANAKSALGK

SEQ ID NO: 33118 - DNA, 8923 bp, DROSOPHILA
gtgggtgcgacccattgacatcactcacgcagatattgtgtgaatttcgaatttattatcatcgcagagccacagacaagtgcttgtagattggcacttttactttgctttgtaattactgtaaatatactataatataatagattcaaatatatagtatttaatcaaataacgattttatcacattgatatgacggcaatctgttcttgtcaatgctgaaatcgacattaatcagaatttaactttgagttagtcacttcctgttgggatgcgtcaacgcattgcttaattacttgagttttgaataattggcaacgtgaaaatgataaaaattttaatgcatttaggcagcttgctgcaataaagctaagcaaatgtaatgacttttgtgagctgtgtacttgtttgtacatatgtatacatatctatgtgcagttccgtgtgaagtaactcatgtttttctctcttttattttttgcagtttaattgtgcaactacaacaataataacaacaatagcagtagcagcggagtctcagcaattggcacaattggcgataaatcagcagcaaaagaagaaggagaaggaggagcaggcgaagcagtgtgaactttagcagacgcagcggaaaaggaacacaaacaaacgaataatagcggtgcacgtaaaaagggaaaacgaataaatctacgaacaacgaactgcaagcgagagcgagatagcaacagctgtcttattagcattttcgtcgcgggggagtagaagtaaaagtgcactcaaagaacggagagagtgcagtgtgaaagagagagcaagcagttggtcttgcatcttgtgagagaaagaagttaaagcagtgcatctgcaactggagttgccaaagatgtcattgaaaacgaagagaaaggacttgtttggaaaaagaagtgaatgaactacatataataggcggttacaaagagtaactgggaattaagagaggtaactggaagagataaggattacaccgacttcctaagagaacgcaagcagtgcacatagtcgtattctgaatctcgccgacccactctcgagtatcgatttagccttcgctattttcccacttgctatttaagttggcaaccgttgacagttgttagctgcagcgggagacgcgggggcgggccttcagcatgtggccctagacaatagcaacaaccataaaacgcaacaaaaaaagttcaaaaaccgagggtatatctgaagagaggagacggaggaggagccacttggtattcaggcagcgaagcataaccaggcggttgggcttggaccggaaaagcgtcgatgagttgagagcccctgacatacactccactccacttcaccctcttaccctccaaaaacccctccgaactccgtcccgcaatggatgcgtctcccctgtcgccggaacaggctcccatcttggtcacggggaggtcattggaccagcaggtggacgccagttcgcccaaccactcgaactactcgaatctcacgaacagcagcagcagcggcagcagtgccagcagtccttcggcctgctcgtcctcgtcttcctcttcgtcggctccccaatacagtgcggatatccgggcggctgcactgcatccgcagcagccacaacagcagcagagaggatctgcctccggatcgcgatcgagatcaggatcgacgaaaacttgtgagctggacgtgggcgaggagcgtgataccttctcgccggtctccagtccggattgcaacggagccgctgccgtgaatgttctgccctcttcgagtggctctgtggacaacaagatctacgagggaggcagcaagggaaagccaccctccaaggaagagaagcagcgccagaacgaggagatcgtgtgcatggagacctcgacggtgtccaccgaaactggttcctgggagtccatgtaccctgcagcgagcgttgctccgcaagctgaacccgaggaaatggaagccactacggtattcaaaggcatcagtgccagcactttgctgcgcgacctagagaagcgggatcagccgttgtccacctcagggaccagcgcctgcttcatagacgcctcatcgctgagggacgaggatgaggtgttgtccttccccagcctagatggccacggccaggaggaagaagtcgggcaagaggcgactggcgacgaggagccagtagatgagccctcgcccacagaccagctggagcagtttcacaagtcctttgccaggtgcaaaggagtgagactaactcaacaacaacaacagcagcagcagagagagccggagcaggaggatccccctgacgagccggcggaggagcgacatgctcccatgtcggtgccgtacagcttccagcacaatgcccaacacttcagtgtgctgcctctgggcagcagtcccaagttcacccaccaccagcatcagcacaatcagagtcagcagcatcatcccgatctcagctacaccacggactactcctccagcagtccggctccgagtttagtgtggtcagagcagggcaggaaccaccatggcgcctcctcctccacgccgcacaactcgatggtgcacatagagccagcgtcggctgggagcaataactcctccattcacagggactacactctatcttcctcattgtcgcatcacagggattcgggtgcttattgcagtgatgccacggactcgccgctgcccctgccccgcactcccaaaagaagttccaagttcgatgaggcaaatcccattgtttctggcggagcatccattgaggatttccgggagaagcagtgtgaaagtcccagcatcaagagacgcacagacacctgcccgatcgtctcgggcggattcgtgtccctggactttgcacccactcgaccgctggcggatgacgatgacgacgaggaactgggtgaggatccagagatagctggagtggaaatgcgcgtgaagacgggtgttcagaggaagcccgttcccggaattgcctcctgggtggtggacatgagtgactgtcggccggagaggcgaaggagtaccagcagcaccacctccagcttccgggagcgctccgattccaacagttcgcacaagagcggctgtggcttctacgtttccttggatgacatggacagaaagcctcaagagcaacaaaaggcagcagcggtagctccgccttcgcagctgagcaaatcctacacggcacccaagtcatcgggattctttgtggatctttcccagagcgccaaagatgaagaagtggcaccgaagagtcaagaggtggccgagggcaaggaggaaaccaagccagaacccaagaacatattcagtatgttcattgattttggggagcaaaagacaccgcgttcaaatggccgaaaggaaccgttgagtctggctcagagactgtccagctcgttgagttcttccgcttcgagaagaggagacaccgaagtgatgaagtccagcgccagttccacggagaccctgatggccaagagcgccaacctgaaggacgtgtctgcaggagctggtgagagcaaatccttggactacagatgcaacctggagcccccgctcacggtggctgcactgcgtcgactgtcacagcagcatcgccagcagagcgatccctccaagcgccacagctggggcagcaatggtcagccggagcaggcatccggatctggaacgggcaatgattgcaagcgatccatcagcctgactgccaacggagcaactgattcgggagcgggtctaatgagcataattgacaagttgcctattatatctaaggcctcctccctctctatcgatagctccgtgtctccctacgacgattttagtggatccaatcctggaataagcagctgttcggaggaagagcagggtcaagtccagggaaggatcaagaagaggcgaagggatgttcagataaacgagacctacgataaatccagcttggcttcggtaactgagggcattctatccaaggacttgtcgcccgcttccaatacagacacagatgatctcaccttccagcaggatgaacagcttgcaaaggagcaggcggaactggtttcagtgcccctccagctgacgagcagctccaatcgtaccagcagcgtaatggagaccattatcgaggccaaggaaacggcctcgcccaagaagcaggttacactcagcaatggccataccatggaatccttacacgccaccatcgaaaaacagaagcaactactggagacggttaacgagcacggagaacagacgacacagcagccctcccagatcccctcgagcttcgtgaagctgtccgacatggataagcccgtgaagcacgatttgcagtcaccggattcgatgagcaagagcgtgggcaacaaccacaggagttcccagctgggccagagactctacagggatgagaaccgtgcgcgtccccactcctgggccatgacccggtccacgggcaacacattgcagaactttaccaactcggtggacaatataaggagtctctctcggctgtttccaaacttctccaaggagttttccaactcgctgcccaacggtatgacactggagcaggttcagggtcagcaggtggactacatccaaacggatctcagtgcggactcgagtctggcctccagtttcagtagatcgggaatggatgaatcctcgctaagctgcaggcagcccaggcgtttgggggaggatttgctcaagatgttcctgcaggaaattgccacggatatgctggtggaggtgcacggtcggcgtatccgtgcccacaagtgcatcctacgctcccgttgtcagtactttgctgccatgctggcggggcacggatcgcagagcgtggtctccctgcaaggttactcctatgcagccgtgcacttcgcactgtgccacatctattcgggtgcctcgcatccaccggatgggataagtttgatggagctggctgctctggcggacttgctgggactggagggtctcaaggaggtaaccgcacatgctctgaaaaccaactactgccacaacttccacaagccgtgctccggctgcagcgatggcatcctacaggtgctacccgtcgcgttgaaccatgctctggatgatctgtacaggaagtgcctgcgctggacgtgtcgccactacctgaaggtgtggccaactaggcagttcgcccagctgccccccgacatactaggccgatgtcgccagcagatcgtcgcttacatggtgggtattattgtgatagactcttctctaaattaagtggatatctaacctttctctaattctcaccctcagacatcggatacggtgctggacacggtgctcgactgcgaccacctactggcccaactgtcggcctatcgctggggtcacgtctgcgagcaactggttcgggagattttagaggcagcgtacgcctatgtgggcgaccacttcgccagtctgattgccagcgattcgttcctttcgctgggccacgaccgcagcaggcacatcccgcgcttggagactctgctgctgcatacagcagctgagctgactccggagcaggcgtgccgcagctatcagcgtgtaacgcgccttaacaccgtgctgcaagccaaggtcatccatatgccagccagtttgggtcaatcggagttggcgcgggaactgcagggtctgcaagaagagcaattggactggcagccggaatacatacgactggtaggagcactcgtctacgcggtggagcagtgcctcatccgacagtgctcaagggccatgcgcgtaacggcatggcaacgcatggatctggagctacgcaagaagattcagacgctggcccgtctcacagaaccgctggacatgaagcgtcaaaacggcaagccagtgggtaaggccttttcctttggcggaagcacacgcagccaggaccttgtgcagatcaagttggccattcaggcgcagacgaagcgagccaatgctcaagagacactaatgtacaaagccacgcagacacaggacgcggctggtggtgcgggccacgtgcaaactgccgacaggggagtgcaggcgaatcatgagtctcgagaaggaggcagtaagtttaatatttggtatagcatttatgagtaagttcaccatattttttattacccaggcaaactgctcaagtccaactcccgtgcgtatgttccgcatcgcgccagctcccaggtggctacggagcgcaacagcttaaatcttcatcgacgcacacagtcagaggctcccccagtgacccacaagaaaccgattacggttgcagcttctacagtagaatcaaagtctgcccagggaaagccgaacgctgcagcggccaaacttggcgaagtgcgaccccggtacctggaaccgcgtaagccaagggctatggcaccatctgctacaaacggccatggagccggtcccgtgcgcagtgccaccagctcgagcatcccagccaatggtggcaggaaggcaccagccaaaaacctgcacatctcttccagcgacagctctcgaaactcgagtccggctgcacgtagagtccagaatggcacacgcttgggcaacaagtccagcaatctgtctatggacagcttggcatcgccggcacggcgagctaagagcagctctaggggaccacaggagcgatactcctccgaccagaattcgctggcggagagcatgaagagctctgtgatcaccaacaaaacgatctcacacgagtcgctctcgggtagctcgaaactggctagaattcagcagattaatggccattcaaaaggagctgcaacgggaaaaatcaaggcaacgcagcggggctccactgtaggcaacaagtcaacgcgccagctgaagcaacagcacaatgcgatggcctccaacggatccagtcccagttcggtgcacacgaccaagtcagcggccagtcgcctctcctccgtcagcagcacactgtccacgcgggaattgtttaagcagcgatctatttcagtgccagctggtggtacagatggagcgccaaacaagggacgtcacagcttcctatcggccaagtcccgagagatcctggccaagcgggcggagaagaacaagctgcagcagcagcaacagcaacagaagcaaaccgaagctcctgtcgaggagcgcggctcggtccaactgcgctcgtccgctggtcctctgcgctcctcctcacattccgcggtgtcgagcatgctgcagcagcacaatttgcgcaacagtttgccctccaacattcccaccagacgccccaatacgctgcatctgaagaaaaccacagcggcgacaaacggagtgggcggaggccccactaaaaccaccaccaacggaatgtcgaatgggacctacaagtcggcccaggcggttaagcagaaactggacctgctcatcgatgcccagatggagagtgtggtgcccagggagcgtgtggagtccaagctggagcgctccagcaccttttgcaaagacagcgccgatctggacatcagcgaattgcagatagtggagtaatcaaaaaacaaaacaaaaaaagaaagggaagaaaagcaagcgcatcaaatggggtgagcataacgactgaagctccaaataagcatggtaaccatatcgaggcacttatctttccaggtcgtatcaaatatggccccgagcagatgcccaaccggatccagaaccgtacacgtcccataaggcaacactagtcaataatctagcatgcagctgccgttgcagttggcgcatgaaaccattatacaataacgataataacgagatgatgttactaccagcagacaaacgcgataattaatacgttatgacagacatccggaacccaaaaaacaaaaacaaaaacaaaacaagttattgccgtttaacctaacccactcctatattagcttattgcgttagggaagttagcgatgaattgtatgcaaagcggataagacagataaattgcaaaaacgaaacaaaaaaaaaaaaaacaaaaagaaactgaaaatgaaaacaagtatttggtgatattatttagagtgcgctttatgtttacgttaaatgccaagcgacaagtgcttataacccgaactctctactcaaagtacgatccagtggatcgaaggatgctctactatatgctttatgcgctttgcagcctgcatttaaggtccttttctctctatttccgctttattgtcaaagcccgcccaatacaagtctcggtctacatatgagatgtggatgtggatggatgatagccatctctataatttaagcttgaactttttatactgttgtttatttaactcgtactcgtaacaatggcgcattacttcagcaaggcaaccaaggaaacgtctctaacattttatttttaaaattatttataaattttacttatttggtaaatattgaacgaagcgagcgaaagtgaatttttgtaagcaacggcattgatacattgataatgaagtgcaagagtaataaatgtgtgtatttattaaaagttaccatatattaaacatggctttcattttcattcggctgggaggaggaggaatcaactaccaacttatagtgaaatgcttactaaatgaaaacaaattacttattaattagtattaattgggcctcataccaaatgctttgtaaattcttattcttccgttctacatgttatctattagctattttctacaattaaagtatcatacaaagcgcgttccgcattcatttaaattccccacagatggtaattagtattgaatctgggattacaataaatttcgtatagttaagtggcttccagtcatataatccctaataatattcgttcag

SEQ ID NO: 33119 - DNA, 6727 bp, DROSOPHILA
gattacaccgacttcctaagagaacgcaagcagtgcacatagtcgtattctgaatctcgccgacccactctcgagtatcgatttagccttcgctattttcccacttgctatttaagttggcaaccgttgacagttgttagctgcagcgggagacgcgggggcgggccttcagcatgtggccctagacaatagcaacaaccataaaacgcaacaaaaaaagttcaaaaaccgagggtatatctgaagagaggagacggaggaggagccacttggtattcaggcagcgaagcataaccaggcggttgggcttggaccggaaaagcgtcgatgagttgagagcccctgacatacactccactccacttcaccctcttaccctccaaaaacccctccgaactccgtcccgcaatggatgcgtctcccctgtcgccggaacaggctcccatcttggtcacggggaggtcattggaccagcaggtggacgccagttcgcccaaccactcgaactactcgaatctcacgaacagcagcagcagcggcagcagtgccagcagtccttcggcctgctcgtcctcgtcttcctcttcgtcggctccccaatacagtgcggatatccgggcggctgcactgcatccgcagcagccacaacagcagcagagaggatctgcctccggatcgcgatcgagatcaggatcgacgaaaacttgtgagctggacgtgggcgaggagcgtgataccttctcgccggtctccagtccggattgcaacggagccgctgccgtgaatgttctgccctcttcgagtggctctgtggacaacaagatctacgagggaggcagcaagggaaagccaccctccaaggaagagaagcagcgccagaacgaggagatcgtgtgcatggagacctcgacggtgtccaccgaaactggttcctgggagtccatgtaccctgcagcgagcgttgctccgcaagctgaacccgaggaaatggaagccactacggtattcaaaggcatcagtgccagcactttgctgcgcgacctagagaagcgggatcagccgttgtccacctcagggaccagcgcctgcttcatagacgcctcatcgctgagggacgaggatgaggtgttgtccttccccagcctagatggccacggccaggaggaagaagtcgggcaagaggcgactggcgacgaggagccagtagatgagccctcgcccacagaccagctggagcagtttcacaagtcctttgccaggtgcaaaggagtgagactaactcaacaacaacaacagcagcagcagagagagccggagcaggaggatccccctgacgagccggcggaggagcgacatgctcccatgtcggtgccgtacagcttccagcacaatgcccaacacttcagtgtgctgcctctgggcagcagtcccaagttcacccaccaccagcatcagcacaatcagagtcagcagcatcatcccgatctcagctacaccacggactactcctccagcagtccggctccgagtttagtgtggtcagagcagggcaggaaccaccatggcgcctcctcctccacgccgcacaactcgatggtgcacatagagccagcgtcggctgggagcaataactcctccattcacagggactacactctatcttcctcattgtcgcatcacagggattcgggtgcttattgcagtgatgccacggactcgccgctgcccctgccccgcactcccaaaagaagttccaagttcgatgaggcaaatcccattgtttctggcggagcatccattgaggatttccgggagaagcagtgtgaaagtcccagcatcaagagacgcacagacacctgcccgatcgtctcgggcggattcgtgtccctggactttgcacccactcgaccgctggcggatgacgatgacgacgaggaactgggtgaggatccagagatagctggagtggaaatgcgcgtgaagacgggtgttcagaggaagcccgttcccggaattgcctcctgggtggtggacatgagtgactgtcggccggagaggcgaaggagtaccagcagcaccacctccagcttccgggagcgctccgattccaacagttcgcacaagagcggctgtggcttctacgtttccttggatgacatggacagaaagcctcaagagcaacaaaaggcagcagcggtagctccgccttcgcagctgagcaaatcctacacggcacccaagtcatcgggattctttgtggatctttcccagagcgccaaagatgaagaagtggcaccgaagagtcaagaggtggccgagggcaaggaggaaaccaagccagaacccaagaacatattcagtatgttcattgattttggggagcaaaagacaccgcgttcaaatggccgaaaggaaccgttgagtctggctcagagactgtccagctcgttgagttcttccgcttcgagaagaggagacaccgaagtgatgaagtccagcgccagttccacggagaccctgatggccaagagcgccaacctgaaggacgtgtctgcaggagctggtgagagcaaatccttggactacagatgcaacctggagcccccgctcacggtggctgcactgcgtcgactgtcacagcagcatcgccagcagagcgatccctccaagcgccacagctggggcagcaatggtcagccggagcaggcatccggatctggaacgggcaatgattgcaagcgatccatcagcctgactgccaacggagcaactgattcgggagcgggtctaatgagcataattgacaagttgcctattatatctaaggcctcctccctctctatcgatagctccgtgtctccctacgacgattttagtggatccaatcctggaataagcagctgttcggaggaagagcagggtcaagtccagggaaggatcaagaagaggcgaagggatgttcagataaacgagacctacgataaatccagcttggcttcggtaactgagggcattctatccaaggacttgtcgcccgcttccaatacagacacagatgatctcaccttccagcaggatgaacagcttgcaaaggagcaggcggaactggtttcagtgcccctccagctgacgagcagctccaatcgtaccagcagcgtaatggagaccattatcgaggccaaggaaacggcctcgcccaagaagcaggttacactcagcaatggccataccatggaatccttacacgccaccatcgaaaaacagaagcaactactggagacggttaacgagcacggagaacagacgacacagcagccctcccagatcccctcgagcttcgtgaagctgtccgacatggataagcccgtgaagcacgatttgcagtcaccggattcgatgagcaagagcgtgggcaacaaccacaggagttcccagctgggccagagactctacagggatgagaaccgtgcgcgtccccactcctgggccatgacccggtccacgggcaacacattgcagaactttaccaactcggtggacaatataaggagtctctctcggctgtttccaaacttctccaaggagttttccaactcgctgcccaacggtatgacactggagcaggttcagggtcagcaggtggactacatccaaacggatctcagtgcggactcgagtctggcctccagtttcagtagatcgggaatggatgaatcctcgctaagctgcaggcagcccaggcgtttgggggaggatttgctcaagatgttcctgcaggaaattgccacggatatgctggtggaggtgcacggtcggcgtatccgtgcccacaagtgcatcctacgctcccgttgtcagtactttgctgccatgctggcggggcacggatcgcagagcgtggtctccctgcaaggttactcctatgcagccgtgcacttcgcactgtgccacatctattcgggtgcctcgcatccaccggatgggataagtttgatggagctggctgctctggcggacttgctgggactggagggtctcaaggaggtaaccgcacatgctctgaaaaccaactactgccacaacttccacaagccgtgctccggctgcagcgatggcatcctacaggtgctacccgtcgcgttgaaccatgctctggatgatctgtacaggaagtgcctgcgctggacgtgtcgccactacctgaaggtgtggccaactaggcagttcgcccagctgccccccgacatactaggccgatgtcgccagcagatcgtcgcttacatgacatcggatacggtgctggacacggtgctcgactgcgaccacctactggcccaactgtcggcctatcgctggggtcacgtctgcgagcaactggttcgggagattttagaggcagcgtacgcctatgtgggcgaccacttcgccagtctgattgccagcgattcgttcctttcgctgggccacgaccgcagcaggcacatcccgcgcttggagactctgctgctgcatacagcagctgagctgactccggagcaggcgtgccgcagctatcagcgtgtaacgcgccttaacaccgtgctgcaagccaaggtcatccatatgccagccagtttgggtcaatcggagttggcgcgggaactgcagggtctgcaagaagagcaattggactggcagccggaatacatacgactggtaggagcactcgtctacgcggtggagcagtgcctcatccgacagtgctcaagggccatgcgcgtaacggcatggcaacgcatggatctggagctacgcaagaagattcagacgctggcccgtctcacagaaccgctggacatgaagcgtcaaaacggcaagccagtgggtaaggccttttcctttggcggaagcacacgcagccaggaccttgtgcagatcaagttggccattcaggcgcagacgaagcgagccaatgctcaagagacactaatgtacaaagccacgcagacacaggacgcggctggtggtgcgggccacgtgcaaactgccgacaggggagtgcaggcgaatcatgagtctcgagaaggaggcagcaaactgctcaagtccaactcccgtgcgtatgttccgcatcgcgccagctcccaggtggctacggagcgcaacagcttaaatcttcatcgacgcacacagtcagaggctcccccagtgacccacaagaaaccgattacggttgcagcttctacagtagaatcaaagtctgcccagggaaagccgaacgctgcagcggccaaacttggcgaagtgcgaccccggtacctggaaccgcgtaagccaagggctatggcaccatctgctacaaacggccatggagccggtcccgtgcgcagtgccaccagctcgagcatcccagccaatggtggcaggaaggcaccagccaaaaacctgcacatctcttccagcgacagctctcgaaactcgagtccggctgcacgtagagtccagaatggcacacgcttgggcaacaagtccagcaatctgtctatggacagcttggcatcgccggcacggcgagctaagagcagctctaggggaccacaggagcgatactcctccgaccagaattcgctggcggagagcatgaagagctctgtgatcaccaacaaaacgatctcacacgagtcgctctcgggtagctcgaaactggctagaattcagcagattaatggccattcaaaaggagctgcaacgggaaaaatcaaggcaacgcagcggggctccactgtaggcaacaagtcaacgcgccagctgaagcaacagcacaatgcgatggcctccaacggatccagtcccagttcggtgcacacgaccaagtcagcggccagtcgcctctcctccgtcagcagcacactgtccacgcgggaattgtttaagcagcgatctatttcagtgccagctggtggtacagatggagcgccaaacaagggacgtcacagcttcctatcggccaagtcccgagagatcctggccaagcgggcggagaagaacaagctgcagcagcagcaacagcaacagaagcaaaccgaagctcctgtcgaggagcgcggctcggtccaactgcgctcgtccgctggtcctctgcgctcctcctcacattccgcggtgtcgagcatgctgcagcagcacaatttgcgcaacagtttgccctccaacattcccaccagacgccccaatacgctgcatctgaagaaaaccacagcggcgacaaacggagtgggcggaggccccactaaaaccaccaccaacggaatgtcgaatgggacctacaagtcggcccaggcggttaagcagaaactggacctgctcatcgatgcccagatggagagtgtggtgcccagggagcgtgtggagtccaagctggagcgctccagcaccttttgcaaagacagcgccgatctggacatcagcgaattgcagatagtggagtaatcaaaaaacaaaacaaaaaaagaaagggaagaaaagcaagcgcatcaaatggggtcgtatcaaatatggccccgagcagatgcccaaccggatccagaaccgtacacgtcccataaggcaacactagtcaataatctagcatgcagctgccgttgcagttggcgcatgaaaccattatacaataacgataataacgagatgatgttactaccagcagacaaacgcgataattaatacgttatgacagacatccggaacc

SEQ ID NO: 33120 - protein, 2019 aa, DROSOPHILA
MDASPLSPEQAPILVTGRSLDQQVDASSPNHSNYSNLTNSSSSGSSASSPSACSSSSSSSSAPQYSADIRAAALHPQQPQQQQRGSASGSRSRSGSTKTCELDVGEERDTFSPVSSPDCNGAAAVNVLPSSSGSVDNKIYEGGSKGKPPSKEEKQRQNEEIVCMETSTVSTETGSWESMYPAASVAPQAEPEEMEATTVFKGISASTLLRDLEKRDQPLSTSGTSACFIDASSLRDEDEVLSFPSLDGHGQEEEVGQEATGDEEPVDEPSPTDQLEQFHKSFARCKGVRLTQQQQQQQQREPEQEDPPDEPAEERHAPMSVPYSFQHNAQHFSVLPLGSSPKFTHHQHQHNQSQQHHPDLSYTTDYSSSSPAPSLVWSEQGRNHHGASSSTPHNSMVHIEPASAGSNNSSIHRDYTLSSSLSHHRDSGAYCSDATDSPLPLPRTPKRSSKFDEANPIVSGGASIEDFREKQCESPSIKRRTDTCPIVSGGFVSLDFAPTRPLADDDDDEELGEDPEIAGVEMRVKTGVQRKPVPGIASWVVDMSDCRPERRRSTSSTTSSFRERSDSNSSHKSGCGFYVSLDDMDRKPQEQQKAAAVAPPSQLSKSYTAPKSSGFFVDLSQSAKDEEVAPKSQEVAEGKEETKPEPKNIFSMFIDFGEQKTPRSNGRKEPLSLAQRLSSSLSSSASRRGDTEVMKSSASSTETLMAKSANLKDVSAGAGESKSLDYRCNLEPPLTVAALRRLSQQHRQQSDPSKRHSWGSNGQPEQASGSGTGNDCKRSISLTANGATDSGAGLMSIIDKLPIISKASSLSIDSSVSPYDDFSGSNPGISSCSEEEQGQVQGRIKKRRRDVQINETYDKSSLASVTEGILSKDLSPASNTDTDDLTFQQDEQLAKEQAELVSVPLQLTSSSNRTSSVMETIIEAKETASPKKQVTLSNGHTMESLHATIEKQKQLLETVNEHGEQTTQQPSQIPSSFVKLSDMDKPVKHDLQSPDSMSKSVGNNHRSSQLGQRLYRDENRARPHSWAMTRSTGNTLQNFTNSVDNIRSLSRLFPNFSKEFSNSLPNGMTLEQVQGQQVDYIQTDLSADSSLASSFSRSGMDESSLSCRQPRRLGEDLLKMFLQEIATDMLVEVHGRRIRAHKCILRSRCQYFAAMLAGHGSQSVVSLQGYSYAAVHFALCHIYSGASHPPDGISLMELAALADLLGLEGLKEVTAHALKTNYCHNFHKPCSGCSDGILQVLPVALNHALDDLYRKCLRWTCRHYLKVWPTRQFAQLPPDILGRCRQQIVAYMTSDTVLDTVLDCDHLLAQLSAYRWGHVCEQLVREILEAAYAYVGDHFASLIASDSFLSLGHDRSRHIPRLETLLLHTAAELTPEQACRSYQRVTRLNTVLQAKVIHMPASLGQSELARELQGLQEEQLDWQPEYIRLVGALVYAVEQCLIRQCSRAMRVTAWQRMDLELRKKIQTLARLTEPLDMKRQNGKPVGKAFSFGGSTRSQDLVQIKLAIQAQTKRANAQETLMYKATQTQDAAGGAGHVQTADRGVQANHESREGGSKLLKSNSRAYVPHRASSQVATERNSLNLHRRTQSEAPPVTHKKPITVAASTVESKSAQGKPNAAAAKLGEVRPRYLEPRKPRAMAPSATNGHGAGPVRSATSSSIPANGGRKAPAKNLHISSSDSSRNSSPAARRVQNGTRLGNKSSNLSMDSLASPARRAKSSSRGPQERYSSDQNSLAESMKSSVITNKTISHESLSGSSKLARIQQINGHSKGAATGKIKATQRGSTVGNKSTRQLKQQHNAMASNGSSPSSVHTTKSAASRLSSVSSTLSTRELFKQRSISVPAGGTDGAPNKGRHSFLSAKSREILAKRAEKNKLQQQQQQQKQTEAPVEERGSVQLRSSAGPLRSSSHSAVSSMLQQHNLRNSLPSNIPTRRPNTLHLKKTTAATNGVGGGPTKTTTNGMSNGTYKSAQAVKQKLDLLIDAQMESVVPRERVESKLERSSTFCKDSADLDISELQIVE

SEQ ID NO: 33121 - DNA, 3663 bp, DROSOPHILA
aatgagagtgcttctgccgccgccgtctgctcctcggcctcgggttcattatcaaacatcggcggcaccttatgtacaccagctcctcctccgcctacatctatttcgtctattttgtctatttcggtgactttgtcgaggcccggctgcgtcattgttgttgtggcggcggtgggtggatgtggatgtgggtattcgggctcatcttcagacattgctcgataattgggaaagctaacaaatcgttttttaattatgggaaattcctgggacgcctgctcagcgtgtgagctggccacctgtccgcgtcgggtcatggtggtgctcatttctgggaaatggccgtcggaattcttgcggggcaattgcagcagtctgggaaagttcatctgccacggggcgtatacttgatgtatggggaatcttgctgtgcacggtgcgtatacatgatgtgggctgaatagttgagtttcatctaaaattgtgtggttctctgcttctttctggtgcttgaagaaaaacaagggaaatccttggttgctccttgatttcagatgcaagggaaactttcctgtttgcattgtttggtaatatgtctggcagacctgcatgttcctgcttccacccgcgtgattcatgggaaagctgctctgccaagcgattccttggccaaccggaaattgccctgccattccgagcacttccggcgccgccgcctttgaccaacaaaacacggctgactcagctccctgatttgcgatgccatcaacaagccactgcgaattatgaatattattattagctgctgcctgcgacatcaatgtctgctcctctgcttcccccgattctgccggccaatccgcctgctgtgtctttgtcatcatcctgctgacctattgtcgtggccaacacgcgaccaaagcgggcttattcctccgatcacaatcgactatgtatcactcaacacgttgcaagctaaactggcgcaatccgtcggcggatgcaccgtgatccgtctatctcaattcgttcccagtggctgcgcctcgctggcaaccatccgatcattgatcagtctgcaatctatgtaattgcacatgagttgtgcggcgtcaggtgagcataaggatcgaattaacaatgccctgcagatgggtacttatagtggttgttttcaattcaccaaaataaaactgttcaaatcacttggtgctataagataaaaacaagccagctatttgttgttcaagaaagtgtttagtatttataatttataataatgttctctcagctaacgtaaacataattttattatcttctcagtgttaaaatatgtgctattcgtttattaaaaaattccctccactcagcaaaatgtagataatactaatctgctcgacttatctaagccaactgaaataactggacatgattcctatgtagactcatggaccacatggatgaattaactacagggcatatcaatgttgatagatcttgtaaaacaatagaaatcaaagtttggtcaggggaggtcgcgcgtgtttcggatgctgggcagaccgaggagcgctcttgtatatgcacatcggatagggtctgctatatagccgaaatatatatgtcagcttgccaaattggttttttgcgggccacaaaaaaaaaaagaacgacaggcaaagagaccgaataaaaatcagctcgcgtcgcccaccgacaatgctattgtttaaatagaccacagagcacggcgctatttgggtgacgtggggtaatactgggtgtccattcagcaattctaatcccattctgtttcttcctcgcaggcgctgcgtgtcctatcacggacgaccgcccagcgcctcgccagcgacgggcaacaaggtgcagcactacaacgagtacaaggccctgatcacaagcatcttcggagagctgacgccggagaacaagaagcgaatcgaggatcggatcaagaagcagcaggcaaaggccaaggcggatgcgcaatcgaaacccagtactaagccaccagccgctccaccaaagggcggttcgtcgccgccaccaggtaagggcgaatctggaggaaaaaagagatccgattcgtctccatctgcgtctatagctcctacaggtccagcaccccgtaagccactgatcagtctgccaagtagacctccaaggggtggaaagcagcggtccggctcggctccagctcctaatctggttgatgaagattcagctgctcgaaatagggaaccagatgcttctgcatatgatggcgcatcaccgtcagcttggaagagatcgggctctgctccagcaccgagtgtagttcccagggcatcggcctcccgcagtccgtctagaaagtcaccttcaccctctcacgacggcatatctccttctacaagacaagaatccttaagcaaaaagaaatcagggtcggctccagctccgacgccaacttctcgtggaccattccggactgcgccctccaatacagaattcataaagcgcagacctgctaaagattacggcagtagaaatgaaacccaaagcactcccggggagtcggaactggacccaacaaaaccacagccctagtttgaatcctcctttgtaagtccaccaataaagataggtaatagttacagaaagaatataaatataaaactttacttgtaatatcaacaacttgtggaggcgacgcctccattgtcttttgctcagtacttccaaaagtttggattctgttccatgcgacgctggaaattcgtataccaattttgaacgacggagaagggcacaaaggtctcgctcgagatgggcgggatgtctctggctgccactccgaagctggaggcgtagttgaagaagttctccagcattcgctgaccaaattgcttgttgtcgttggcagtggactgaaaattggaaatggggttagatttgaatcgcaattattgcgccaatcaaatcggttggcaactactgatcttcagaacttaccacggctggcgtctgttgggccaccgttagctccggttcgagggaaactccaatctgtgcgatgtgtgagatctcctggctgccgaagaccatcccgtgagcctgggcctccagctcgtgactcttcttcagctgggcgattttgaagatggcggagggcttggtgttgtttatgtgacccagatactgccatgtgggtgctgcgttcgcgtccggccagctgaaatatatcgcagcggaggtgccgacgggcaggggtgatacgccggtgaggaatactaccaggtagttgacggattctatgtcgggcacattcacgagcaacttggtggcgtccacggccacaaaatccgattggggcaggcgtccggagactatcagaccgaatagcgacattttcgagcggtggactattccagaattcgatatgcccgctttgttgggggaggagatgttatggagatgagcaaaaaggaactaccttatcgatgctttctttcctaatggtgtacagcccactacgtttctaacaaaaaaatatattgaagtatattggaatttgttgcttgcatatgttctgacagttgatgcatattccaaaatcctaaaaaaagatttttttttaaattttaaatggaactagttcag

SEQ ID NO: 33122 - DNA, 953 bp, DROSOPHILA
atgcaccgtgatccgtctatctcaattcgttcccagtggctgcgcctcgctggcaaccatccgatcattgatcagtctgcaatctatgtaattgcacatgagttgtgcggcgtcaggcgctgcgtgtcctatcacggacgaccgcccagcgcctcgccagcgacgggcaacaaggtgcagcactacaacgagtacaaggccctgatcacaagcatcttcggagagctgacgccggagaacaagaagcgaatcgaggatcggatcaagaagcagcaggcaaaggccaaggcggatgcgcaatcgaaacccagtactaagccaccagccgctccaccaaagggcggttcgtcgccgccaccaggtaagggcgaatctggaggaaaaaagagatccgattcgtctccatctgcgtctatagctcctacaggtccagcaccccgtaagccactgatcagtctgccaagtagacctccaaggggtggaaagcagcggtccggctcggctccagctcctaatctggttgatgaagattcagctgctcgaaatagggaaccagatgcttctgcatatgatggcgcatcaccgtcagcttggaagagatcgggctctgctccagcaccgagtgtagttcccagggcatcggcctcccgcagtccgtctagaaagtcaccttcaccctctcacgacggcatatctccttctacaagacaagaatccttaagcaaaaagaaatcagggtcggctccagctccgacgccaacttctcgtggaccattccggactgcgccctccaatacagaattcataaagcgcagacctgctaaagattacggcagtagaaatgaaacccaaagcactcccggggagtcggaactggacccaacaaaaccacagccctagtttgaatcctcctttgtaagtccaccaataaagataggtaatagttacagaaa

SEQ ID NO: 33123 - protein, 299 aa, DROSOPHILA
MHRDPSISIRSQWLRLAGNHPIIDQSAIYVIAHELCGVRRCVSYHGRPPSASPATGNKVQHYNEYKALITSIFGELTPENKKRIEDRIKKQQAKAKADAQSKPSTKPPAAPPKGGSSPPPGKGESGGKKRSDSSPSASIAPTGPAPRKPLISLPSRPPRGGKQRSGSAPAPNLVDEDSAARNREPDASAYDGASPSAWKRSGSAPAPSVVPRASASRSPSRKSPSPSHDGISPSTRQESLSKKKSGSAPAPTPTSRGPFRTAPSNTEFIKRRPAKDYGSRNETQSTPGESELDPTKPQP

SEQ ID NO: 33124 - DNA, 2396 bp, DROSOPHILA
atcacatagtggttgtggcccgtcagcacgcagatgcagttgcgcgactgccagttccagatgcgtatggtctgatcgtcggaggcgctcagaatccatgggtattcgtggtggaaagccaccgtgcgcacatagtccaaatgggccaggagggtaaaaatgcatcggcgttgcttgtagttccacaccttgatcttgtagtcgtcgccgccagagacgaagagcggcatctgctggtggaaggccacgcctcgcaccggtccgtcgtgctcgtcgaacttctcgaggagcgtgtgcatccggtagtcccacagctggatgacgccgctgtgcaagctgaccaggatccaggggcgcttagggtggaaggagaggcccttcaccctcgccgacttcgactcgaagttggtcagcatggtggcactttttctgttctgcctgtaggtgtctcaaattggatgcacttctaggtgtcggcttatccgtcaagcgccctttttttgctggttcgagcacttgcctgtatcaaaacatcaagaggtgggtgttagaacaaacccattttattgatacgctacaagtaacacgtaatatactgccaacaattaattttatgaaaaacaccaaccaatcgtcgaaattgtgacacgtcaattatcttcttcttcgcgacccagtcagtgttgccagcgttggcagatgtgcatacactgggaaccataagttttcaaaagtacacacatgaatatgaatgaattatcatgctctccagtcttctttatatagttaaatatacagattttacgtgatatttttgaatatatttaatcttcgtcaataatattcgaaaattgagttggtaaatgtatttctacgaacacttttagtgaccactgtaatcgtagttttacagcactggacaaagtgcattctattcacggtaacttcgctttgtttattttctgtaataccatggaaaatatataaataagtgacaaagatgacactggcacaccgggcgctcttcacttggtttatcgtcctggtcttcctgattcttctgtgtctccgcctggacccacgcaccacctggaattggttcgtcacctttacgccactctggttcttcgatgtgatcattatcatctacgtgatcattaaatttatccgcaagtggcggaacctaacctgcctgacggatctcctgttcctctacaaatggaacattgccggcgtcctgctgaccatcgcctcccaagtgatgatctgcctaacgctggagtacccgcaacagattcccatatacgtgaccgttgccccggtcatcctgctgctgagcaccgccatcttctatgttggcagcaggctgggaaaacgagagggctggatacagtaatattaagcatatattgtaggattaggtgtacataaagtgaaaactcaaaagccgtatttgctttgggtggcccgacgggtctgccggttggccgaccacatggcctgcagctcggcttcgttggccttcgccttgtgcgccaggtaggtgatctggtgcttgcgccgagtccctgccaccggctcctcgtccgtcagcacgccggtcggttggaaggtggtggacgaagccagagccgatcgcatccattcctcgcgatcaggtagcacctgagacccagatatgtcgatcacctgcatctccttggcctccttccgccggcgcttggcatttttgcccaccaatgcgtccatggcctctgcgtttaactgttgctcatggtagcgcttttgtgcaatctgagactgctcttcctgaagtcgggcggcttctgcttcggctgcttccttctcggctacctcctctaggtacttgctactggcttccaccatcttggccgctcgcttggccactagagcgctaatctcgttgctgctcacctcaggcagcttttgctcggaattcagggagaaaaagtctccagtgccatcttcgtcatcatcttcactatcgctggcatttaccagcgaagtgggtttacttataggtttggattttgttgacttcaaagcgtcttttgtctcaggattcttcttgtgcccggccttagggccatctacgccttcggtgttgtgtgcagctcgtcgctgcttaactgtatcgggaacaaaagctggtgctgctcgaggctgcgcaggattattgcttagactggaagcaagagtagtgctggctgatgggtaggctaccgcggatgaagagttcttggagaagttgcgctccgactttgcttggggcagcagactcaacaatcccgatcccttgggtacattgggcttatcaactttgttcttagccctgtcagctttctcctggtctacatctgagaaatctcttagtg

SEQ ID NO: 33125 - DNA, 396 bp, DROSOPHILA
atgacactggcacaccgggcgctcttcacttggtttatcgtcctggtcttcctgattcttctgtgtctccgcctggacccacgcaccacctggaattggttcgtcacctttacgccactctggttcttcgatgtgatcattatcatctacgtgatcattaaatttatccgcaagtggcggaacctaacctgcctgacggatctcctgttcctctacaaatggaacattgccggcgtcctgctgaccatcgcctcccaagtgatgatctgcctaacgctggagtacccgcaacagattcccatatacgtgaccgttgccccggtcatcctgctgctgagcaccgccatcttctatgttggcagcaggctgggaaaacgagagggctggatacagtaa

SEQ ID NO: 33126 - protein, 131 aa, DROSOPHILA
MTLAHRALFTWFIVLVFLILLCLRLDPRTTWNWFVTFTPLWFFDVIIIIYVIIKFIRKWRNLTCLTDLLFLYKWNIAGVLLTIASQVMICLTLEYPQQIPIYVTVAPVILLLSTAIFYVGSRLGKREGWIQ

SEQ ID NO: 33127 - DNA, 4462 bp, DROSOPHILA
tggtgcctgaccagaggtccaagttcgatagcgacgagctcttccgccgattgagtagggagagcgaggttcgctacacaggataccgggaacgtgcaatggaggagcgcaggatgcggtttgtcaacgactgccgcaagggctatgcggagatatcgatggtagcttcaggaactaatctgcagctctacttcaacgccaaccacaatccgtacgcccaggagcaggattgcgatttcgagcgggagcggggcaaagttcatttgcgttctagtttcatcatgaacggggtgtgcgtccgcttccggggctgggtggatctggaccgactggatggcgctgcctgcctggagttcgatgaacaacgagcccagcaggaggatgctcagctgcaggagcagattcaaagctacaaccagcgcatggctgagtccaggagaatctaccacacgccccagactccacccgaggatcaccatcacagaggtgggcctggtctgcctagaggaccaatgggatggtagtgctatatattaccctcatagctttaagtaacatctaagtaaatcaacaataaatatctgaaacccattgatcgtgctcttataatactgagattatgtttaatacactaatggtaatatctgctctcaattactaaaactctcatttcacaaggagtttccgagttttgtgtgtcattcatttggcgaaagccactcatgttcacctaatgattgtttatctgggcctccttaagggttgctagccggggtctttggcctcatttgcgccactttcggaacaaccaccacccgagccgactgcccgaggatggtgaagtgggtccagctgccgttccgccattccgccgtgctctccactctccggggtgggcctgtcgcggctgtggctgcggctgtcctctcttgactctcgatgcggccagagcaccggtcccgtgagcacgtattgattttccgccattccgtttgggatgctgccgaaataaactttgcaactgctctgaatgtgaatctgaatccgaatccgagtcagtctctttccgaactgaaagcggaaaggcgtcgagtgaaaatggaataggtgaagggaacgccgccgcggactaaaaattcataaacttatacataccgcagcgatttgaaaacttgaaaacattcggattgtgtgcctcaatttgctggtggtcgcgtatttttccgcatcgtccgaatcggcacgaaaagctaagagattcgtctaaaattagcgaccggtgtgttttggtagggtgttgtattggctaggggctcccagtgaactccgcccctccgagtatttacccataaccgggccaagatgcctcctgcatccaatacgatcgtgctgaagagcctctccgtgctgctgggcctcttcttcatcttcgtgggcaccctcaagctgacgccgcacattagcaaggatctctacaaggacctggtgagtggaaaatcgatagcgccagagttttaggccttttgtcctggggtacagcccatcgatttttcccacgccccttcgaatctggccttttgaaaactatgtgctcgcccatgggaacgttcttatgtaaatgggcggagacagatttcaagaggcgtcccattatagaacgccattcggaaatatgactgactaatgggcattgaactcgaccccatcaatgccaatcgctgacattcggacatcgcgacgcgctatgatcttcaaaaatatatttcaggaaaaatatatgcttcaatatcgaaatagtctcccaacgaaattccgaaaatttggatttcaaatgattgaggaagcacttttgagctttagctttgcaattatccaaatagattgtgattcatacaaattggacaaacattaatttttcaattttttttgatgaaacttgtgaacaagtaatcttaagactaagatctgaaagagagagaaacctcgaaaatttggcaaactaattattaatcaccttgtttgtaaattgttttgaaaacctccaaacaaattcgaaactaatgatatatagaacagctgttgctctgaattttttgtttacctcttgtaaaaataacgcccagagattttcgttttcattaccataaaaataattcgcataccaaagtaaacatttgcgaacacaagaaccacaatgacgtgttcttttcactcaattcagagtatacaaattggttttatatacataaacaatagggtggcctgagggattattcaaaaaactttatagttttagagataaaagtaaataaataaccaactagatcatccaaaagacacttcagttcaatactttcgaaaaaaatcagtattcagatggcgttttcgaattggcattgcattcgttacgcgccatttcactttcaattttgaagatttctcaatctcgtttttcccgaaggcatggcatttgtatttcggtgtaattacccccgtattaccacaaacactcggggccaacgatgccaacagaaacagatgagtgtgacaacaggggaagcttgcttccatttaaaaataaacccgctgcactgcctcttccgctgggccgccaggcggagcacattcctctgcgggtgtttctgggcatgattaattatatcctcgtattcgatttcctctcgatttcagcgcacagagtacgtgaagtatgccaaagtgttcccactaacggcgctcttcggagtgaagataccctcgaaatggtaccgccgcaccgttggcatcctggagatcgtctgcggcctggccatggcgctgattccctatcgtaagtgtatggacttattaatacggcgcatcagtcggagtaatcactacttacccacagataaggtcaaaaacacggccaacgttacgctgctggtgttgatgctcctgggcatctaccagcactggatggtcagtgatccgttcgagcgctccggtccggcgctggtcttcaccttcatgctgggcggacgcctggtggtctggtaccagaccgcccgcctccaggacgaggccacgacggcagcgcagcctgctgcgaacggcgtaaagcaggactaggtgcctgctaccggtgcatcacgtactcatagtcattcactgatccagctttgttttagcaccttaagttgggctcgagatggcgcgccctgtctgcgggtctcaaattcattcacatcattctagcaaatcgaaattcatgttttcactttggtgccaaattattatcgtatacagaactactatattgtatgcaatggcgagagatattaactaaactgtagacgcgaccagatcaaaccagaatgtaatcaaatcctcttcgtaacgggcacttagtcggaaccatttaaattacgactttagaaacaattttaataaatttgaacaactcatacatatttaaaattaataatccaacgtcagtcaatctgaatttcgttttactttcgtcctcaaacgagcgattagcaggagattatgcggcattatactggtgctctaagctataactgtgccaaggaagcgattcctaaatacgtgtgaatgtggatgtgtacgccctactcggacccggtgctcagcagcttcagggccttctgcaggttctcgatggctgtcttgacgtcgtcgtagttgagggcactgccggcgtacttgcaatacttctgggcggtaatcatttggtcgggagtgatttgcaccccggccacgggcacaatgggctggtaaatggtggccgccgtggccggattaggctgagctgtgggcacgtagggcacaaagccgcccggcttctcctcgtccaccggtggactgggcaatttgttcgggttgttcagcacctcctcggcggtgggagggaccactccggaagttgtcggtgatgatggagctggtggctgtgagtcaggctccggctggtagggcgctggagcagctgctcccgcggcgtcctccggcgatgtgtctgccgaggcgttggcattctccccctcgagctccgcctcatcgtcgtcgtctggcaaggggccgggaatcggtgtctcaccgttcttcaggcaattgtggatgtaggcggccttccacttggcgtacttcctgttgtgcagcgcctcttcgctcagttcaccgaaggtctggagaatgtcgtagagcacaccactggagtagaaggccttaacgacgtttctgcgaagaagcacaatcttatgaatcaggaaaatcgattcagggtatttctacgaagggaacgcactttccgaagttctcctcgcgatcctgtttgtcggcgtacaggaatagtttcaaggcgtagttctcgatgtgtgcctgggcagccacctcgttggtgatggcctcgttctcagcatactgtttcttcatctgctccagccagtccatgatgcct

SEQ ID NO: 33128 - DNA, 1084 bp, DROSOPHILA
ctgccgaaataaactttgcaactgctctgaatgtgaatctgaatccgaatccgagtcagtctctttccgaactgaaagcggaaaggcgtcgagtgaaaatggaataggtgaagggaacgccgccgcggactaaaaattcataaacttatacataccgcagcgatttgaaaacttgaaaacattcggattgtgtgcctcaatttgctggtggtcgcgtatttttccgcatcgtccgaatcggcacgaaaagctaagagattcgtctaaaattagcgaccggtgtgttttggtagggtgttgtattggctaggggctcccagtgaactccgcccctccgagtatttacccataaccgggccaagatgcctcctgcatccaatacgatcgtgctgaagagcctctccgtgctgctgggcctcttcttcatcttcgtgggcaccctcaagctgacgccgcacattagcaaggatctctacaaggacctgcgcacagagtacgtgaagtatgccaaagtgttcccactaacggcgctcttcggagtgaagataccctcgaaatggtaccgccgcaccgttggcatcctggagatcgtctgcggcctggccatggcgctgattccctatcgtaagttcaaaaacacggccaacgttacgctgctggtgttgatgctcctgggcatctaccagcactggatggtcagtgatccgttcgagcgctccggtccggcgctggtcttcaccttcatgctgggcggacgcctggtggtctggtaccagaccgcccgcctccaggacgaggccacgacggcagcgcagcctgctgcgaacggcgtaaagcaggactaggtgcctgctaccggtgcatcacgtactcatagtcattcactgatccagctttgttttagcaccttaactactatattgtatgcaatggcgagagatattaactaaactgtagacgcgaccagatcaaaccagaatgtaatcaaatcctcttcgtaacgggcacttagtcggaaccatttaaattacgactttagaaacaattttaataaatttgaacaactcatacatatttaaaatta

SEQ ID NO: 33129 - protein, 160 aa, DROSOPHILA
MPPASNTIVLKSLSVLLGLFFIFVGTLKLTPHISKDLYKDLRTEYVKYAKVFPLTALFGVKIPSKWYRRTVGILEIVCGLAMALIPYRKFKNTANVTLLVLMLLGIYQHWMVSDPFERSGPALVFTFMLGGRLVVWYQTARLQDEATTAAQPAANGVKQD

SEQ ID NO: 33130 - DNA, 6875 bp, DROSOPHILA
tttatatttttaaataatcttttgaaaactttaattgaaaatcactgaatgaatttagttcaaatgtatgttatatttcttgtgtatttagtaatatcggggtcaccaaacatatcaatggagtttggaagagcctgtggtggatccctgctgagcgacactaatttgaataggggaaatctctgggaaaacctcgaaaagggttaaaggggagtggtcaagcaaccataaaatcaaagcgagaaaatcgagtgttcctgaaatatgcataatccacgccccctttgaagcccagctaggttagcgagtatccactgtacttcccttagtcgggatctcatttaaattggctccaccgattacctcaactcaagcactcactcataaaaatggattctcacctggccaggttgcgagcaacaacaacaagtggtcgtaatcattattgtctttggtagtgctatccaggtagtcgctcagcaggaaaaaggtaaggtaaggtaaggtagggtaacgaaaacaaacgctcacctttggcaacaacaacaacgaaattgattttccctgttccgactgtgaagaattttctgaatcagtgcagccagcaacaacaacgacaacaactagaaccggaatccgtttgaagttgaagcgcgcgcaacacacacgcacacacaggtagcaactccggagtccggactggagttcgttcgaatgtgtgggtgtcggttgcaagccacttcgaacagttcactgaaagaaatcggtacgcactcgtcagaaaactacatttattatagcttgcactgaatattagactcgtagatgaagcctttgataggtataaaaaatattatgatcagttttgggttttctcccatttggttttgctcacaaacccttacgtaaatttctgccagtgtaagttcgatctccaatgttcgaaaagatgtgagtgcgatcgaagaaccgcctctcagttgcgtttgagctgcgagcgtggtttgtcgcttgtcgtgatctccgctctctgcccattcgagaatccgctgcaggttcgattccgcgacgacgtctttgtgttcggagtgtgtgaccgcggtgccttgtttatgttaatccgatatttatatgtatatactggcaaaatagtgcagaagtggcaataaattcggccaattaatcggagctcggttttagaagcgtgagacccgcgagctgaaggcagtggaaaaatgagtgtgcagcataagtgatcgctggaagtggaagctaaagggtcaaaccggttttcggacaacatggagttgccaccagcagcagcagcagcaacaacaacaaatgcgtcggcatccttgcaacgtgtcgcctcggaatccagtcttggtcgggagcgggatcgggagcaagcagctgctccacctggccaactgatgggtcatcactatcattacatccaatatccggcgcatttccagccgcaacaacttcaggagcagccaccccagccccaactgccctgccagtgtccctgctcctgcggccgtgcacctccaccgcccatgcagcccactaatcccggccagaatgcttcaatggccgtggctgtgctggtccaccaacagacgcccagtcagcaggagccggcaaggagttcgccgctcaaagcacagtccgctcagtccctgctcaatcactcttatcaggcgctgcacgaggaccagcatcagcagcaggagcaactccagctggactcctcagccggagccggcagttgcgactgcgatctggagtgcacctgccccgccactggaggaaactcctccctggcccagcacaagaggagcctgctggcggacgccatgctgggagcagacgagattacggtcagcgagtccgacaacaacagcactatgattaaaaagaagaagccccgatccggcggaggagcaggacaactaccgccgaagacacagcccacgagcgacagctgcaatgacatctaccatgatacggagctggacggagcagcaggagctgggacagttggatctcctggctccgggatcaagtcacagattctggacgataatcatcgccctcctctgccgccacgcccaccgcccagacccaggagtaatgccaatggctccataggtgagttattacattgaggtcccgcaggggcaatttctttttttttaagatcttgcagagtaatgtcttgcacaataattgcacttacattctactgaagtcttggcaaatatcaacgacatgatgattatttcaggagaattcttcaccattctttatgtcaaaagatttttatatatgtacatgtatatgtctactatgcagtaactgaatataaggatatgaaagagtatgccaaattcgctcctggtatttccactgatttgccatcagtgctgttggtttgcttccttctcatcgcaacgcaatgaatcacccttccgcatggtcacagatttcgtgtcactgatttgccacccgttgcgagcgcagcttccgcctggtggcggcttcctcatccgctagttctgcgcctgcgccggaggacgctgcgctctcagtgctctccagttctgctggagctggtgcaaaatatttgctcggggggttggagctgtgctagtgtcagtcaggatttcagttgacaccgttcctgtaattgcaacgcacactgtggcgccacctcccagcttctgctctccagtatccagtatccactaaccagcaccagcaccagcacccgtccacgtccaagtgccccactccagtcgtctaagtccgcgcagctgcctgcggagtcacctcatcccacagtcgcatctcagccagcttccacggctgtgtagatatttttctgtttcactgcggagaaaaaagaagaaagagtgaaaagcgaggaaaacgtgttccggaatttcccagctattcggcggctcctggccagaatgtgctcttagattgctgttcagccaattggtggccaccttcaagtgcccgagcgaaccaaaactatccgcatatccagtcaccatgcacggctatccggtgatgcagttcgtgcagtacagcatgcccccgccctgctcctgggtgccaggtcctccgccctcctcggggaacgtggatgcccatcatcgcggctctggttgggattgtactgccccctgtggccactgcaatttgattgattttctactccttacttgcagcccatcgccatggcgcggggatcaagaagtacgtggtctggtgcctcatctgcggtggattcagctgcttgctgggcgtgctcttcttgggcgtctacttcctgctccattcgtacaccatcacggtgggcaacttcgaaacggtgcccacctttgtgcccgccaccctgctcatcctcacaggaatctgcatcatgagcctggccaggcgtcggaatcgctatagctacctggtagggagatatttccatacctctgtcagaagtttcattaattctatgaatcccctacagataaagctgtccggagcctgtggcctggtgtccgccttaacctgtgctctggtcacagtgaccaccactgtgctccacatgagtcgcctgcaggccttgagggaatgcgagtatgctcaaaagacgcgcacgtgcacctgctactcggacctcatcgaatcccaggtggaccgagtggataagggtgagttgtcccacagttcctttcggtccttacgactaatcgctaaccgtcattctctttcagaaggagtgcgccttgtgttcgactccctctcggactgcggcgttgtccatggatccctctattcctgcctgagagctatcttcggcctgtccgtggccggagtgctcatcgccgtcttcagctgcatgttggtgtaccagctactcagtcacgaacgcaagaagatgtactgggagcagctggagctgcgatgcagatccctgtacgccagccaggctcctcctccggccttgggtccaggcaggatgttaaactgcaggtgctgcgagcagtgccacgcccacaggcagttgacactgcctttgcaggccaccgcttatccgtgggacgaggccacggtggccgctgcagcagcagccgcaggaggaggaggcggagagcagcggttctgggccgcccagccgccgggtaacttctactcgccgaatccaggcggcgatgatccggtgggcacttgcaggagtggagaacgggcaggaggagcaggacgcagtagcagcggatggagctggcctcggatgccctggcaacgtaccactcctgacgccggtcgtcgatttcgccaagctgctgccagtccggattcacagtacggatttagttcgtccacggcggtccagggagatggtaaccagatgctgatcgaggaacccgtggtggcggcctacagtggaatgcccccgccaaatgccctgccctacggagtttggggaccgccgccaccctacagcgatcccaacagtccggccagacgtggctactaccagtatctgcagcccactgcgtgtctggttgggaatcagggcactgtcgccgtcactctgacccaggagcaaatgcatccgaccctgcaacatacgcatccccaacagcagcagcaattgcagcagatgcagctgcagcggctccaggtccagtccgccaccttggagcggatggatgggctcagcagtgccggtaacgtgagtaccctagtggctgccactcgctcctccgcctacaaatcaaaggccgagtacgagaacacgccgtctgacagtgatggtggcaatccccgggagagggaacgctgctccaacacgctgcccacgcgaaagctgaagaagcgcttggaggcgggcaccggggccaagagcatcggtccgcagagtaatcctggccagcagcgacccaatgtccagcagttgttcgccaagcaggaccaacagcagcccaccggccaggctaatccccagcaggctcagccccagacggccggggtggagaacagtggctaccaggactcgaacggagccatagccaaggaccaggcggtgggaacggatccggccgagtccgaggtgtacttcgccgacgtgagtagttgctgcaacatgtctgtgaagaatgacagctactatgacaacgcccagcgccaccaggggcaccaccatcatcaccagcatcagcacagtaattgcagccacagcagcgggcagagcaacgccaacgaggactacctggcccagcgcttcggtcgcggcagggagcactccgttcggagtcgtctgcccattccgcaaacgaggcgagaggacgactacgagagctccaacctgaacatgcccacgctgaaggagcagcagcagcaggcgcaacagctgcagaaggagatctcccgccagagcatgtgctccgtggagtcggaggccaagaccgagttcaccgacctctcgccctccacgccctgcggtggcaatctgccgttgccgccgccagcgaatttcgccagtgatccgccgacgggtcaacagtcgcccagcttcgtggcctcgttcccctactcctcggagtcgcagtgcctggaggcgcatcgtcgctccacaaagaacatccacgagctgatgatctccggggtggggggatcctcgaccggcggcggcgactcccactacgaggttatcaacgaccggggcaatccctaccagctgcagcgatcgcagcaggccaagcacaaggccaagtccaagacgcggtcgcgggagcagttggacatctacggcagcggagctgagcgatccgactggtcctcggatgggggtcgcttgtgagaccccgatgaccaggaggtattcgtctagcagcggtttcacccccctcgtattctctaaggatattctctgtggatctgctcggggagcagcggtgggactctccacatccgacttcttctatatcatacgaacaagcatcattcgtacatccaggacagcgctggacacctcccatcactgcctgtagaaccacctttggtttagaatcgtcgcacttgtaatgtttgccatccaagaacggaactctattctattatatgtatgtcctatctccccaactatcgaaagtcctcggggctgcaaaccttgctttaactactttacgcgtatcctttgcatagtttacctagtacatatattacttatcacatatggtagcattgaattgaatgttgacaacttgtagcaatgataatctatggatattatatacaaattatgttatatttacctgcgtatttacatagttgcgtatacacacacccatatacacatacaaatatatgactagttagttaaatgttagagcgccagttaaatttattaaagagtacaccaagtataaccaaaatattttaacaaaaacttcgggttcctttctttttggctaaaccaaagggtaactaaaaattaggatggaagctacacatacatatgtatatatgtacctttaatgatatattcttactcaaagcgttatgatccccaagaatcgaaggaaaaccaggttttatcttaaaaatacaatttggattttaatgactacgtgaacaaggtgatgtgtttctaagactatggctaccggagcactccctcaatttctcactgggccaaccggtgcaggagcatgaagacagcggtgactccgaggcccagactgaccatagaagcgccggcattcttgcgatccgctatgctgccgtgcggaatctcgttctcggagtcatccggctgcggctccggcacagccagctcgtccacggccagcatggtggcc

SEQ ID NO: 33131 - DNA, 4196 bp, DROSOPHILA
tggtttgtcgcttgtcgtgatctccgctctctgcccattcgagaatccgctgcaggttcgattccgcgacgacgtctttgtgttcggagtgtgtgaccgcggtgccttgtttatgttaatccgatatttatatgtatatactggcaaaatagtgcagaagtggcaataaattcggccaattaatcggagctcggttttagaagcgtgagacccgcgagctgaaggcagtggaaaaatgagtgtgcagcataagtgatcgctggaagtggaagctaaagggtcaaaccggttttcggacaacatggagttgccaccagcagcagcagcagcaacaacaacaaatgcgtcggcatccttgcaacgtgtcgcctcggaatccagtcttggtcgggagcgggatcgggagcaagcagctgctccacctggccaactgatgggtcatcactatcattacatccaatatccggcgcatttccagccgcaacaacttcaggagcagccaccccagccccaactgccctgccagtgtccctgctcctgcggccgtgcacctccaccgcccatgcagcccactaatcccggccagaatgcttcaatggccgtggctgtgctggtccaccaacagacgcccagtcagcaggagccggcaaggagttcgccgctcaaagcacagtccgctcagtccctgctcaatcactcttatcaggcgctgcacgaggaccagcatcagcagcaggagcaactccagctggactcctcagccggagccggcagttgcgactgcgatctggagtgcacctgccccgccactggaggaaactcctccctggcccagcacaagaggagcctgctggcggacgccatgctgggagcagacgagattacggtcagcgagtccgacaacaacagcactatgattaaaaagaagaagccccgatccggcggaggagcaggacaactaccgccgaagacacagcccacgagcgacagctgcaatgacatctaccatgatacggagctggacggagcagcaggagctgggacagttggatctcctggctccgggatcaagtcacagattctggacgataatcatcgccctcctctgccgccacgcccaccgcccagacccaggagtaatgccaatggctccatagtaactgaatataaggatatgaaagagtatgccaaattcgctcctggtatttccactgatttgccatcagtgctatttcgtgtcactgatttgccacccgttgcgagcgcagcttccgcctggtggcggcttcctcatccgctagttctgcgcctgcgccggaggacgctgcgctctcagtgctctccagttctgctggagctggtgcaaaatatttgctcggggggttggagctgtgctagtcttctgctctccagtatccagtatccactaaccagcaccagcaccagcacccgtccacgtccaagtgccccactccagtcgtctaagtccgcgcagctgcctgcggagtcacctcatcccacagtcgcatctcagccagcttccacggctgtattgctgttcagccaattggtggccaccttcaagtgcccgagcgaaccaaaactatccgcatatccagtcaccatgcacggctatccggtgatgcagttcgtgcagtacagcatgcccccgccctgctcctgggtgccaggtcctccgccctcctcggggaacgtggatgcccatcatcgcggctctgcccatcgccatggcgcggggatcaagaagtacgtggtctggtgcctcatctgcggtggattcagctgcttgctgggcgtgctcttcttgggcgtctacttcctgctccattcgtacaccatcacggtgggcaacttcgaaacggtgcccacctttgtgcccgccaccctgctcatcctcacaggaatctgcatcatgagcctggccaggcgtcggaatcgctatagctacctgataaagctgtccggagcctgtggcctggtgtccgccttaacctgtgctctggtcacagtgaccaccactgtgctccacatgagtcgcctgcaggccttgagggaatgcgagtatgctcaaaagacgcgcacgtgcacctgctactcggacctcatcgaatcccaggtggaccgagtggataaggaaggagtgcgccttgtgttcgactccctctcggactgcggcgttgtccatggatccctctattcctgcctgagagctatcttcggcctgtccgtggccggagtgctcatcgccgtcttcagctgcatgttggtgtaccagctactcagtcacgaacgcaagaagatgtactgggagcagctggagctgcgatgcagatccctgtacgccagccaggctcctcctccggccttgggtccaggcaggatgttaaactgcaggtgctgcgagcagtgccacgcccacaggcagttgacactgcctttgcaggccaccgcttatccgtgggacgaggccacggtggccgctgcagcagcagccgcaggaggaggaggcggagagcagcggttctgggccgcccagccgccgggtaacttctactcgccgaatccaggcggcgatgatccggtgggcacttgcaggagtggagaacgggcaggaggagcaggacgcagtagcagcggatggagctggcctcggatgccctggcaacgtaccactcctgacgccggtcgtcgatttcgccaagctgctgccagtccggattcacagtacggatttagttcgtccacggcggtccagggagatggtaaccagatgctgatcgaggaacccgtggtggcggcctacagtggaatgcccccgccaaatgccctgccctacggagtttggggaccgccgccaccctacagcgatcccaacagtccggccagacggcactgtcgccgtcactctgacccaggagcaaatgcatccgaccctgcaacatacgcatccccaacagcagcagcaattgcagcagatgcagctgcagcggctccaggtccagtccgccaccttggagcggatggatgggctcagcagtgccggtaacgtgagtaccctagtggctgccactcgctcctccgcctacaaatcaaaggccgagtacgagaacacgccgtctgacagtgatggtggcaatccccgggagagggaacgctgctccaacacgctgcccacgcgaaagctgaagaagcgcttggaggcgggcaccggggccaagagcatcggtccgcagagtaatcctggccagcagcgacccaatgtccagcagttgttcgccaagcaggaccaacagcagcccaccggccaggctaatccccagcaggctcagccccagacggccggggtggagaacagtggctaccaggactcgaacggagccatagccaaggaccaggcggtgggaacggatccggccgagtccgaggtgtacttcgccgacgtgagtagttgctgcaacatgtctgtgaagaatgacagctactatgacaacgcccagcgccaccaggggcaccaccatcatcaccagcatcagcacagtaattgcagccacagcagcgggcagagcaacgccaacgaggactacctggcccagcgcttcggtcgcggcagggagcactccgttcggagtcgtctgcccattccgcaaacgaggcgagaggacgactacgagagctccaacctgaacatgcccacgctgaaggagcagcagcagcaggcgcaacagctgcagaaggagatctcccgccagagcatgtgctccgtggagtcggaggccaagaccgagttcaccgacctctcgccctccacgccctgcggtggcaatctgccgttgccgccgccagcgaatttcgccagtgatccgccgacgggtcaacagtcgcccagcttcgtggcctcgttcccctactcctcggagtcgcagtgcctggaggcgcatcgtcgctccacaaagaacatccacgagctgatgatctccggggtggggggatcctcgaccggcggcggcgactcccactacgaggttatcaacgaccggggcaatccctaccagctgcagcgatcgcagcaggccaagcacaaggccaagtccaagacgcggtcgcgggagcagttggacatctacggcagcggagctgagcgatccgactggtcctcggatgggggtcgcttgtga

SEQ ID NO: 33132 - protein, 921 aa, DROSOPHILA
MELPPAAAAATTTNASASLQRVASESSLGRERDREQAAAPPGQLMGHHYHYIQYPAHFQPQQLQEQPPQPQLPCQCPCSCGRAPPPPMQPTNPGQNASMAVAVLVHQQTPSQQEPARSSPLKAQSAQSLLNHSYQALHEDQHQQQEQLQLDSSAGAGSCDCDLECTCPATGGNSSLAQHKRSLLADAMLGADEITVSESDNNSTMIKKKKPRSGGGAGQLPPKTQPTSDSCNDIYHDTELDGAAGAGTVGSPGSGIKSQILDDNHRPPLPPRPPPRPRSNANGSIVTEYKDMKEYAKFAPGISTDLPSVLFRVTDLPPVASAASAWWRLPHPLVLRLRRRTLRSQCSPVLLELVQNICSGGWSCASLLLSSIQYPLTSTSTSTRPRPSAPLQSSKSAQLPAESPHPTVASQPASTAVLLFSQLVATFKCPSEPKLSAYPVTMHGYPVMQFVQYSMPPPCSWVPGPPPSSGNVDAHHRGSAHRHGAGIKKYVVWCLICGGFSCLLGVLFLGVYFLLHSYTITVGNFETVPTFVPATLLILTGICIMSLARRRNRYSYLIKLSGACGLVSALTCALVTVTTTVLHMSRLQALRECEYAQKTRTCTCYSDLIESQVDRVDKEGVRLVFDSLSDCGVVHGSLYSCLRAIFGLSVAGVLIAVFSCMLVYQLLSHERKKMYWEQLELRCRSLYASQAPPPALGPGRMLNCRCCEQCHAHRQLTLPLQATAYPWDEATVAAAAAAAGGGGGEQRFWAAQPPGNFYSPNPGGDDPVGTCRSGERAGGAGRSSSGWSWPRMPWQRTTPDAGRRFRQAAASPDSQYGFSSSTAVQGDGNQMLIEEPVVAAYSGMPPPNALPYGVWGPPPPYSDPNSPARRHCRRHSDPGANASDPATYASPTAAAIAADAAAAAPGPVRHLGADGWAQQCR

SEQ ID NO: 33133 - DNA, 2830 bp, DROSOPHILA
acgcagtctgcccgtcgacataatgccgggaccctacgacccggccaactttatgctgccccagcagccgttccacaagtgcatgtttccccaggctgctcaactggcaactttccaggcggtgactaatccgtacagctgccggctggatgaggccctggtggtaggcacatctggccagaatgtatcggatctgttgcgcagcacttcgctggactcggcgctggaggcccttcgctgcaccctcacctggggacatgttgctcccactgcaccggacactctagcgtgctacccgtacatcgaaagtgatcccttcatcctgcgcgagtgtccgcacgtttactacgccggcaactgcgagtcgtttgcgaccgagctgcacgagggttccgaaggcaagcgcacccgcctagtctgcgtgcccagttttagcaaaacacagagtgtggccgtcgttgacctggatacgctggattgccgcatggtcaactttagcgtagatgcagaataagaaacttcattaatacaaataatacaccctgttaagtcttgagaatcactggttttattcgctatcctagtgcaccacgggacccagcggctcgcccctaatgttggccaaatccaggcgggagtcgatggtctcgtctatcagtccgatcaccgcgatgttgtccccccggatgatgtgcagtcccagcacgatttgctcgatgccggaggtggtagagaagacgcgctcatggcactcgtctatgatgatattgatggtctggtcgaatcccttgagtgtcccgatgaagttccgtccgtctgccgtaatgatggagactgtgtgattgatatacgactccagaccggacattttagcagtctttccttgataacttctccaaacagaacaaaataaatactaattgtggcaagaggctagcgacgcgctctccgataacgataactgtgccgcaaatcagctgttccggctctggtgctcatgtaatcggtggtcaacattctattttccgaaaaaattaaattaaactgattaaaatgctgcgtcgcattgtccaagtgggtgcccgggagttgagccgagcccaatcgtcaaccgccagcgcggaaaagtgggacctgtacgccggagtgctcgtagagcgtctccctgtggtgtccaagtcccttaatccgctggaaaaacagttccaagacttgctatggcgcgtggagtacgaaaacagcctgaagtctgaccatgaactcaagcatgaacgtgagatcgtccaggcggagctcataaagcagggcaagatccaggtggacttggaggacgcaggatccaagcagacagctcaggacctcaaggacgcctacgtcgaggagctaaaaaagttccagttgggctcccgcaccacgcccgatgaccaggccaacagaaccacctccacggaccgctgtctggatgacacgctctaccttttggtacagcagaagctgggccagcaggagcacctcattctaccgcagggaaagcgtgaggagggagagtccatgcgtcagactgcagaaagagtgctccgcgagagttgcggccaggagctgcaggttcttttctacggcaacgccccagtgggcttccacaaatacaagtatcccagaaaccagcggacggagactgtcggagccaaggtcttcttctacagagcatccctgcggtccggccaggtgcccgaaaatctgaccaagttcgagtggcttcccaaggaggcgctcaatgaaaagctgaccaatacagcctatgcccaaagcgttaaaaagttcttgttgtaatcgtaattgttaaaattgttttgatatctaacaaataaataaaaatacttcagaggaatatctatctactagctgcctttcatttgagaagaatctggtgagatgctgatacttttgccaacttccttctgcaaaatcagattacagactcccctgaatttttaataaaaactccactcatttaacatatttagacatgcagcaatatatttatttttgcaattcacgagttgtaaatatacgtccaatacagaggcaaatatttattgttttgtttttcttttttttttctgctttgaaaaagcttactactttcgtttcgaatacacgtagaaactggaggaaacataaaaggctggttattatgcatttctggtagcaagagtatcttaaatctttttggtatatcagttgtatctatgttcgttacaagttacagacattcaatattgaaaatgtgtgctcgattactggaagctaagctttttatctgcttttcaggcgcaagttgatcaaattactgtgacaatgttctcgattagatatcttcttcggcgaccggacgcgtagccaattctcaaactgaaacgtcaaaatttaagatactttctcattgggctgttgataaataaatgcaaaaactagaaatggttcatagtcatgttgataaatatgtattgcaaggtgctattgttgatttaaggttcattgtggcataggttcttaaataagcattaaactgtttgacttagagactaaattatcgaaaataatggtgtaaatatatatttttgtttgatttttttttgtgttttgttggtttttagaaatatactttaaattgtaagacatatgctcaggcgccactaaataagacaatgcaggctctttagttctggaacagcgttcgcgtgaagtctatgtagtccagggcatccttgatgggctggccggagcgcggttccgagaagggtttcatgcgctgcacgcagtagtcagc

SEQ ID NO: 33134 - DNA, 830 bp, DROSOPHILA
taatcggtggtcaacattctattttccgaaaaaattaaattaaactgattaaaatgctgcgtcgcattgtccaagtgggtgcccgggagttgagccgagcccaatcgtcaaccgccagcgcggaaaagtgggacctgtacgccggagtgctcgtagagcgtctccctgtggtgtccaagtcccttaatccgctggaaaaacagttccaagacttgctatggcgcgtggagtacgaaaacagcctgaagtctgaccatgaactcaagcatgaacgtgagatcgtccaggcggagctcataaagcagggcaagatccaggtggacttggaggacgcaggatccaagcagacagctcaggacctcaaggacgcctacgtcgaggagctaaaaaagttccagttgggctcccgcaccacgcccgatgaccaggccaacagaaccacctccacggaccgctgtctggatgacacgctctaccttttggtacagcagaagctgggccagcaggagcacctcattctaccgcagggaaagcgtgaggagggagagtccatgcgtcagactgcagaaagagtgctccgcgagagttgcggccaggagctgcaggttcttttctacggcaacgccccagtgggcttccacaaatacaagtatcccagaaaccagcggacggagactgtcggagccaaggtcttcttctacagagcatccctgcggtccggccaggtgcccgaaaatctgaccaagttcgagtggcttcccaaggaggcgctcaatgaaaagctgaccaatacagcctatgcccaaagcgttaaaaagttcttgttgtaa

SEQ ID NO: 33135 - protein, 258 aa, DROSOPHILA
MLRRIVQVGARELSRAQSSTASAEKWDLYAGVLVERLPVVSKSLNPLEKQFQDLLWRVEYENSLKSDHELKHEREIVQAELIKQGKIQVDLEDAGSKQTAQDLKDAYVEELKKFQLGSRTTPDDQANRTTSTDRCLDDTLYLLVQQKLGQQEHLILPQGKREEGESMRQTAERVLRESCGQELQVLFYGNAPVGFHKYKYPRNQRTETVGAKVFFYRASLRSGQVPENLTKFEWLPKEALNEKLTNTAYAQSVKKFLL

SEQ ID NO: 33136 - DNA, 3568 bp, DROSOPHILA
gcaggcttactcggaacggacgccggaatcgatgacccaggccattgaccccatggatattatacccaagtcggagtccgaatcggaggtggaacgtctgcagcgggcctccagattcctagcgcgccaggaacagcaccaagcccagcagcaacagcaccagcagcagttgctgcccggtcagcagatcttccccagctacacgcatcctttgccgtcgatgaatgcaccaaatacctcccaacagtcgccttacacaccgggtctgatgagtcgctttagaagtgagagaagtgcttgcaaaagtctgaaatccgaactaaatccttaataattctcttaaagaacgcggcgaacgcatgtccaaggaccaaaaggagctgtacgttaagtttttcgaggacaatccatgcatgctatcaaaccaccgccggcacgatggcctcactgaaccattgtgggcaaaattggcccacatgctgaatagtgttccccaaggcgccgtaaagaacgtagaggactggaagcagacctttgacgcctggcggtaccgcatcttcatgtacacacgctacaactccaagctcagcatgtcggaaacgaccgatccgaagaacttcaagcccctgacagctaccgaccagaaggcgtatgccatgtggaccagccacaagcacataacgccgcaggactacgaaaaaatggacatgttcgtgccgctggacgagaccaccacggcaacgaacacctacgactactaaatcgagatcaaagtgcaaaatataaaactgttaatgtgtactttaactattgctaagaaatagaatactttttaagagaaagaaaccgcgttttttatgttagataagataagacatgaaatatgcaatttcaaattatactatctactaactacaatccataattatttattgcagtctacgatgtcggcctggacaactatgtgctgaatcgccagtgccgctgtacagaccagaaaatgctcaacgattcgccaacgcccgaggaaccaaccaatttgtgccagcccagcaatgtgctagaggccgcgccgactccgctcatgtcgctgccaccctgcgaggacgaggatcacgagcctgagcatgagcacgagcacgaggagagcatgaagtatcggatcgataaggagagcagtggagctgcctccgcagagctgggcttgcccgcctacgaggcctgctcgcccaagatggactacgacacgcaggacgagctgccggactcgccgcactcgcagccgctgccaccaccgcctttcccattgtccacggccttgccgctgccgcctccgcccacctcgcatcaccaacatctgcaacagcagcagcagcagcagcatgaggtgtgtttgaccatgtccggcatgtgtaacgcttttgtgttatatacttttggacctgccttattatttcaggagcgcatccagcaagagtacatcatccagcagcagcagcaacatcagcagattcagcagcaacaacaccacctggctctcctgcagcagcagcagcagcaggagcaacagcagcagattcagcagcaccagggagtcaacatagccataggcaccactgcgacaaacaacattcgacgtaagttactctcttgaattattaccccgatccaattagtcaattgtgttattgtttataagaaactaccaagcaccattgaatctaattttaaagattaataaaatgttcgagatgtggcgatataaatattttactacggcgattaagttttggaaatgtttctaatttgtccgcaatgtcagcaaaccacattccaaatcttatctttagatgactttattctcctatttacttcttcaatttactgcccagttgctgcattgtttcaatgtacagacagaaatattaaaaattatattacatcaacttaattttatgaagaaatatatttaaataatataattgccgttttccattagggctgcattcgcgatgttcataaacaaagcgcacaccaattgagcgcattccaatgttatcaggtgtattaatttgcattaattaataaattttaaaattatttagccgattacggaacaatggtgttaatgagttaatggtgttcatctgtttctcgtccgcagagcgcaaggagcgcatgtccaagcggcagaaggaactgtacgtacacttcctgcagcagcaccagttcatcaacgatcaccgtcgcaatgatcctgcgctggacccatactggctgaagctggccaacctgctgaacgccgtgccgcagggtgccgtgaagcacgtgaccgagtggaagcagaccttcgacaactggcgataccggatcttcctttacgcgcgctacaactctaagctgcaggacgaggaggcgcagaatccgcgaaacttcaagccgctgacccggaccgacaaacaggcctacatcatgtggatccggaacccggacaccgcgccgcccgacctggacaagatgcgcaatgtcttctgcaatctggaggagtcggcggtgcagcaggagtagatagccgtacatccgtcgtagctctaacatttcaaatcttctttgtcctcttttcaatggtttctatcgtgttagtcgtgcgtatgtgtgtcgctgttttttttccctttggggaatgcatttttcttttagtttgttgtcattgttatgcctttttgaatattaaacatgtgttttctgaatgaatcgctaattttagtcggaaatatgcgcgcggatatatttagccactggccgagcaggtcgtttgcccctgctggtgtttggcatatactaaactcaagttctgaactggatatggaaagacatggaatgacaatgagtgcgtagattgcttagctcagttcgcagttctggcaaggatgtcgaattcgaccacttggccttgaaggcgttgatttgagtggcttcaaacaagccagcgaacaaacaaacaaactcctttcagaaccagctccactcgtgtggctccgtatctccatctgggcacccacgcccgtttcgtctaccggtgctgattaattcgctgcccgcggcggtacagcatccatccagcggggcctgttgtacttgtcgctaatccccggccattaattatccgttcaatcatgttcgattcgctcgatgccgccattcaatcgccacttggcagcttggcggggattatttttattgccaagtcccgataataattccttctttcgccgatctgcgaattagttccagtgtttcttgaacctgaaactgaaaaagggagccccaccgattagcatattgttaattaaaataaaaattgtttggcggcggcattggtattgggattattcttttgattaaatggcaatttatcataaattactgcactcaattgcaaagtgcaagtgctgcgggaccattagaaatcttgttttatggcgggccagcacaaatgtgttacataaacaactaacttaaatgagcgtatcagctcgggcgatattacaaatgacttgtaatcgcg

SEQ ID NO: 33137 - DNA, 1041 bp, DROSOPHILA
atgctcaacgattcgccaacgcccgaggaaccaaccaatttgtgccagcccagcaatgtgctagaggccgcgccgactccgctcatgtcgctgccaccctgcgaggacgaggatcacgagcctgagcatgagcacgagcacgaggagagcatgaagtatcggatcgataaggagagcagtggagctgcctccgcagagctgggcttgcccgcctacgaggcctgctcgcccaagatggactacgacacgcaggacgagctgccggactcgccgcactcgcagccgctgccaccaccgcctttcccattgtccacggccttgccgctgccgcctccgcccacctcgcatcaccaacatctgcaacagcagcagcagcagcagcatgaggtgtgtttgaccatgtccggcatgtgtaacgcttttgtgttatatacttttggacctgccttattatttcaggagcgcatccagcaagagtacatcatccagcagcagcagcaacatcagcagattcagcagcaacaacaccacctggctctcctgcagcagcagcagcagcaggagcaacagcagcagattcagcagcaccagggagtcaacatagccataggcaccactgcgacaaacaacattcgacagcgcaaggagcgcatgtccaagcggcagaaggaactgtacgtacacttcctgcagcagcaccagttcatcaacgatcaccgtcgcaatgatcctgcgctggacccatactggctgaagctggccaacctgctgaacgccgtgccgcagggtgccgtgaagcacgtgaccgagtggaagcagaccttcgacaactggcgataccggatcttcctttacgcgcgctacaactctaagctgcaggacgaggaggcgcagaatccgcgaaacttcaagccgctgacccggaccgacaaacaggcctacatcatgtggatccggaacccggacaccgcgccgcccgacctggacaagatgcgcaatgtcttctgcaatctggaggagtcggcggtgcagcaggagtag

SEQ ID NO: 33138 - protein, 346 aa, DROSOPHILA
MLNDSPTPEEPTNLCQPSNVLEAAPTPLMSLPPCEDEDHEPEHEHEHEESMKYRIDKESSGAASAELGLPAYEACSPKMDYDTQDELPDSPHSQPLPPPPFPLSTALPLPPPPTSHHQHLQQQQQQQHEVCLTMSGMCNAFVLYTFGPALLFQERIQQEYIIQQQQQHQQIQQQQHHLALLQQQQQQEQQQQIQQHQGVNIAIGTTATNNIRQRKERMSKRQKELYVHFLQQHQFINDHRRNDPALDPYWLKLANLLNAVPQGAVKHVTEWKQTFDNWRYRIFLYARYNSKLQDEEAQNPRNFKPLTRTDKQAYIMWIRNPDTAPPDLDKMRNVFCNLEESAVQQE

SEQ ID NO: 33139 - DNA, 3546 bp, DROSOPHILA
attcaactcataattattatacatatattggctctcttgctgactttactctacatctttttgataattataagtgctaacgcccattcatacaaccaagaaacgcactgtctgccaactccagctccaaaccaggaccaaagtgctcttggttaaatggcgatgcaaatgagtttgaagtgaaacgttaggaacaatcaaatcggcaatggagcaggggatagatacttgctcaatatacgaagttaacgacggctctaataggtttaattatattggtgttgtgcgcctcttcgaatcgattatttttgtagcttcgaacttatttgaattgtatctaaataattgttgcctcgattccactcggttcgattcgatttgatccgaaccgacttgtttcgcctcggttcgaccgttgatgattaagctttaaatgtgcttagcgaagtaagtgtggaaatggaataaagtgcatggaaattaagcgccaaacaatgtttgttgattcaccacctccaacgaatccgccctcgatactcgtagaggtgggtttgtttgggggcttgtacctgtacgctttcattatcttccccagatacaaaaagaagctcacctttttcaatttcgcgtaggtgggttgccgtgtagatacggatagttacagaagccaaaaactgaatccacttccatgccagaccccttctctgctgctgcttagagagacaatttgtcaccgggcatcgatcaaacatccggacatcccagtggcctggcaacgggcgccattgagacctggatggcgggccataaccgcaagggagcggagtggtgccgctaatgtctggagtgcacatccaagttcattagtcttggatgggtgcggaaaagctacgcgacacgaaatggaaagttttggcgaagtttccagctggtgaatggtcgtaaatcgcagtgcgaaaagctaaagttctaaaaatatcccggcacttgaaggcaatcgatgtgcccgcagctggcagagatgggcgaacgcgagccggagtcggacgaggactgcgaggtctattgtaagtcgttccccgtaggctggtagcagcagcatgtccttactcatggattattccgcagtcctgaagccggtcaacgagtacaacattgtggacaggatcaaggaggccaacaaggagctctttgcgctggacgacgaggcctccaatggcaacggcaaggtgacgaaggtgaagtttgccctgaatctggaggattacgagcccacggagcagcagaaggatctcagtcccagtccgcccgatgagctgctgcagcagttgacgcagctgaagctgaagcccattgcagaggaagaaccagcggctgcagacgagaccaaggtggtagaaacgcctcctccgatggaagaaccccaagtagatgatgaagtggaggaggagatatgcgaggaaatcgtggacttgagtgaggtgccccaacagccagtggtccaggaagccactcccattgaggatgaagacgacttctccggcgtggatgaggcggacctggatgacgatcctccggcgaaggactcttctgttccgggctcccttcaactgagacagggcactttcgaccaggatgactccgaccagaagagtctaaccaatctgctaaccgaatctgattgcgaagaggaggaacgcaccttaaatgaggctcgccagaagctaagggatgcctacaagaatctttacaagaccttggatccgaaacagcaagaaaccattgacaggttgacgggagccgaaactgaagtgcctttgccggcgccagcgcctgtggtggctgcagttgaagccgaagaggaggatgatctgtccatcattgtggccagctatattccagatgattttgagctcaacgagcagagcatttactacaagaaggaggagcccgatgaagtcagggattcgtgcaccacatgtcccaaggcgacttccaagaccttcttcacttcgcgcagttttagctttcgccgtcggcccaagcccacgcccactctatcctctgcctccgcttccacgacgtctccttcggtgcggatgaactacaagatctgctgcgagcaccggcattcgattcagggcaagctacccaggtacacgggctacatgtccgagtacggactgactgcccagcaactgcagcggcgcgaccagcaactgcggcggaagcagcgcttctccatggagcagaccatcaatcgcaacgagcaggagctgaagaagatgcaggacaacgagcgcgccttcaccacctggctgaagaacaagatgcgctatccgatcaacaagacccgcaacatgttcgatgcgcacaaaaggcggggtagtgtggccgccgccggaagtccgcgccagcatccccaagctcatccgcatctgcaccaggagcaggagcagcgcggcggacggcgaaggcggcggcgcgacagcggggaagtggaggtgcacgcctatcggcatctgctcggcagctggaacaagtaggagtaatgtagttcttacattagtttattatattaatgtatcgtattatatttaatttgtaatacaacttttgaagcgtgacaaaaatgagtgacgggggattggggtggcgggtcctttaacagatagacaatggtaacaggagagctagattacgaacggagtgccacacaggcttggcgacaggaacagctccctaatgtcgcgacttcttcgacttgtgcccattgtcgcgactgtcatcccgcgagcgcttgcgatccttgtccttgctgctgctcttgtttccggacgatgaggaggaatgatgcttgtcccggctgttgtacttgtccttcgacgacttcgacgggctttaaaataatcaagggaatttggaaatgtgttaaaagaaatttcacaaataattactcctctgtggttatcaattttgagcaagcgagttatgatgctgttctttttttttctttctttttatcaattttgccagactgaacaatcataaataattcaacataaacccaaacagaaagtggttgtaaacggatggaatttggggtatccctatccaaaacttgccaagccaacaccagaaataaataatatcaacaaaaaataactcttaaaaacgtccaattgcttggttttttgttccaccaaagaagaaaatcaaatttataacgaaacttccagtgtgtaatggtttgtgagtgaaaaatgatatgtgaaatgcacttgcgttaggccgtatggttgggtattaagtgttcggggctttcgataacaaacctagatgagctgccatgtttggagctggaggactttaaatgcgaagaggacgaggaggagttcgacttgtgctttttactgtgcgacgacgatcgagcctcctcgcggtcgcggcgactgtggtggacgtaaaatgttgtagaacgattgatatagataagagaaaggagatctcggataaggtaacccttaatggaaacccgtccatgat

SEQ ID NO: 33140 - DNA, 1485 bp, DROSOPHILA
atgtgcccgcagctggcagagatgggcgaacgcgagccggagtcggacgaggactgcgaggtctatttcctgaagccggtcaacgagtacaacattgtggacaggatcaaggaggccaacaaggagctctttgcgctggacgacgaggcctccaatggcaacggcaaggtgacgaaggtgaagtttgccctgaatctggaggattacgagcccacggagcagcagaaggatctcagtcccagtccgcccgatgagctgctgcagcagttgacgcagctgaagctgaagcccattgcagaggaagaaccagcggctgcagacgagaccaaggtggtagaaacgcctcctccgatggaagaaccccaagtagatgatgaagtggaggaggagatatgcgaggaaatcgtggacttgagtgaggtgccccaacagccagtggtccaggaagccactcccattgaggatgaagacgacttctccggcgtggatgaggcggacctggatgacgatcctccggcgaaggactcttctgttccgggctcccttcaactgagacagggcactttcgaccaggatgactccgaccagaagagtctaaccaatctgctaaccgaatctgattgcgaagaggaggaacgcaccttaaatgaggctcgccagaagctaagggatgcctacaagaatctttacaagaccttggatccgaaacagcaagaaaccattgacaggttgacgggagccgaaactgaagtgcctttgccggcgccagcgcctgtggtggctgcagttgaagccgaagaggaggatgatctgtccatcattgtggccagctatattccagatgattttgagctcaacgagcagagcatttactacaagaaggaggagcccgatgaagtcagggattcgtgcaccacatgtcccaaggcgacttccaagaccttcttcacttcgcgcagttttagctttcgccgtcggcccaagcccacgcccactctatcctctgcctccgcttccacgacgtctccttcggtgcggatgaactacaagatctgctgcgagcaccggcattcgattcagggcaagctacccaggtacacgggctacatgtccgagtacggactgactgcccagcaactgcagcggcgcgaccagcaactgcggcggaagcagcgcttctccatggagcagaccatcaatcgcaacgagcaggagctgaagaagatgcaggacaacgagcgcgccttcaccacctggctgaagaacaagatgcgctatccgatcaacaagacccgcaacatgttcgatgcgcacaaaaggcggggtagtgtggccgccgccggaagtccgcgccagcatccccaagctcatccgcatctgcaccaggagcaggagcagcgcggcggacggcgaaggcggcggcgcgacagcggggaagtggaggtgcacgcctatcggcatctgctcggcagctggaacaagtag

SEQ ID NO: 33141 - protein, 494 aa, DROSOPHILA
MCPQLAEMGEREPESDEDCEVYFLKPVNEYNIVDRIKEANKELFALDDEASNGNGKVTKVKFALNLEDYEPTEQQKDLSPSPPDELLQQLTQLKLKPIAEEEPAAADETKVVETPPPMEEPQVDDEVEEEICEEIVDLSEVPQQPVVQEATPIEDEDDFSGVDEADLDDDPPAKDSSVPGSLQLRQGTFDQDDSDQKSLTNLLTESDCEEEERTLNEARQKLRDAYKNLYKTLDPKQQETIDRLTGAETEVPLPAPAPVVAAVEAEEEDDLSIIVASYIPDDFELNEQSIYYKKEEPDEVRDSCTTCPKATSKTFFTSRSFSFRRRPKPTPTLSSASASTTSPSVRMNYKICCEHRHSIQGKLPRYTGYMSEYGLTAQQLQRRDQQLRRKQRFSMEQTINRNEQELKKMQDNERAFTTWLKNKMRYPINKTRNMFDAHKRRGSVAAAGSPRQHPQAHPHLHQEQEQRGGRRRRRRDSGEVEVHAYRHLLGSWNK

SEQ ID NO: 33142 - DNA, 2687 bp, DROSOPHILA
cgacgctgagtaaataagtcatcattgtcgataaactcgattgtcgtcatcaacggcgacgaggacaactaatttgcggtcataataaaagttaatctactgactccttggccgcttgtcggaattttttttgcttcccatgtctgcaacaaattgctcgcacaaattcaaaagtctatggatgtagaagtccagttcaaataatgtaactaaatgccattactctatatcatcaaactttgtacattattgggaaaagttatttgttgaaaggatcctttacgttaatcaaacatgtgaaacatattttctttgcctatgtaatgcttagcttaaaccagttgagaattataatagaaattgtagtataaaaacaaaataaaatattttgtttccagtataaaattacatattttatattataattaaatgtaaattaaatgtattctaacaatgcgccccactgtgcggcaccgtggaatggcagctcaaatttaataagatcgagccaaattcagttcaaggcagcaagtggcaaaggcaacaaaacaagaaaattaaatttttattgttttcacgcaaataaaatcaaataaaaagcgaacaacaataacgagcaggcaaaggctaaacaggacactcacgcacgcacacacacacacttacgcacgcatacgctctcgcaaggagagcgaaacagagagaggaagagagagagagagcaggatgtacataaggactaagcatcacgtgccgcacagacggcacttctactgggcaggagaagcggaccaaccaacgacgagcaaccccgtaatcgcactcctgggcacccggatgctgcgtcctgcgcctgccaggacattctgccaaccgagttcagttcgaattgagcactcgacgcgaacgcgacaactggcggatacagacgagaactgaatcggtacgtgtacggatactagagactacggaaatatagagcagccagctccgtcgcgttatgtctacggccttcctcgtggacagtctcctgcacgcccagcagacctacacggaaagccagctgaagtccagcctgagcgagatgctcctatcgcgtcggtcggccacgggaacggatgccgcggatccggctgaccagcccaccgagtcctgtggctgctccaagttgcgcggctacaagtgtgataagtgccgcgaaatccgtgccgagagtgtagaaagcatcgaggagatggacgaggacgatggttcctcctcggcggacgaaatagtcgccgatattggcagtgtcgagggcgaggagccgcacatggacctggacgaggagctggaagaggagctggccgacgtggacgagcccgtgtcaatcaaattgcccaaggtggagcccaaggagaccagcatgccgaccgtcggcaacaccatcctcaaggataccaacagcaagcccattctcaagttcagtgtcagcgcgatccttggcgacacccgggaaggagtccgtgtcagaaatggtaagacatggttggcaactagcaattttagcttagtagtatgccttgaggtgctgatgatctttgcttctctttcaatgttgttttcactggaacccctaagattaaattttgtaattaccttgggcccctccaattctgaagtcgatgagatagtttcctccaattaggtttacgccgcgggctgcttcaaagaatgttataaaaaggcttggcaattaatttgtcgtggctaatgccgaataaaaacaaaataccgaacacaattgcaatatgaaaagccaaaagaataacaaatctggcccaaaagtttacgcagactcctcgcgagggtagaacgcaaagtactggtacttcgcagttgctttagtttttacgccgcgactttattgtgtgttggcctaagtcctcggggcgtttcaccgctgatcctgcaggctgtaaaaacacagccaggcctaatcatgtttaaattattgagccaagcccctgagcacaaagccgcataaccagttcgtcccatccacatccgcacttccgcacttccgccaggatctgcatgggatatggtgcgaaggatctgcatgggatatggtgcgaaggatcctctgccgcgtgctgcttacaacgggggatgagaatgagaatgggaatccctatgccagataggacatggaaaaggtcctgggggcgggggacagaaggtaggcgtaaccaattggccatcagtcaatgtaacagctctgccttggccgttttttagttgtattgttctcttgtatttctggggattgtgggatttaattgtcatgtgattatggcatcgcggcttactttccatattaatgagtgggcaggacctttcgatttcccgtattttatcactattttttatgagattttattggcgatattttggggttaaatcgtactgttttttatgatcaaagcgtggcaaaaaatttagaaatggtacgaaatatgactattattaggtattatattagaaccagaatagcataagtaacttttaatgtcttaataacgcagccattaggtatcccctccacacacacacacactttctaacttattctgtccattaatctcctccgcatattccaactaattgccatcacatttcaatcaataatccacttagcacatttt

SEQ ID NO: 33143 - DNA, 543 bp, DROSOPHILA
atgtctacggccttcctcgtggacagtctcctgcacgcccagcagacctacacggaaagccagctgaagtccagcctgagcgagatgctcctatcgcgtcggtcggccacgggaacggatgccgcggatccggctgaccagcccaccgagtcctgtggctgctccaagttgcgcggctacaagtgtgataagtgccgcgaaatccgtgccgagagtgtagaaagcatcgaggagatggacgaggacgatggttcctcctcggcggacgaaatagtcgccgatattggcagtgtcgagggcgaggagccgcacatggacctggacgaggagctggaagaggagctggccgacgtggacgagcccgtgtcaatcaaattgcccaaggtggagcccaaggagaccagcatgccgaccgtcggcaacaccatcctcaaggataccaacagcaagcccattctcaagttcagtgtcagcgcgatccttggcgacacccgggaaggagtccgtgtcagaaatgtcgatgagatagtttcctccaattag

SEQ ID NO: 33144 - protein, 180 aa, DROSOPHILA
MSTAFLVDSLLHAQQTYTESQLKSSLSEMLLSRRSATGTDAADPADQPTESCGCSKLRGYKCDKCREIRAESVESIEEMDEDDGSSSADEIVADIGSVEGEEPHMDLDEELEEELADVDEPVSIKLPKVEPKETSMPTVGNTILKDTNSKPILKFSVSAILGDTREGVRVRNVDEIVSSN

SEQ ID NO: 33145 - DNA, 2679 bp, DROSOPHILA
aatagaccacagagcacggcgctatttgggtgacgtggggtaatactgggtgtccattcagcaattctaatcccattctgtttcttcctcgcaggcgctgcgtgtcctatcacggacgaccgcccagcgcctcgccagcgacgggcaacaaggtgcagcactacaacgagtacaaggccctgatcacaagcatcttcggagagctgacgccggagaacaagaagcgaatcgaggatcggatcaagaagcagcaggcaaaggccaaggcggatgcgcaatcgaaacccagtactaagccaccagccgctccaccaaagggcggttcgtcgccgccaccaggtaagggcgaatctggaggaaaaaagagatccgattcgtctccatctgcgtctatagctcctacaggtccagcaccccgtaagccactgatcagtctgccaagtagacctccaaggggtggaaagcagcggtccggctcggctccagctcctaatctggttgatgaagattcagctgctcgaaatagggaaccagatgcttctgcatatgatggcgcatcaccgtcagcttggaagagatcgggctctgctccagcaccgagtgtagttcccagggcatcggcctcccgcagtccgtctagaaagtcaccttcaccctctcacgacggcatatctccttctacaagacaagaatccttaagcaaaaagaaatcagggtcggctccagctccgacgccaacttctcgtggaccattccggactgcgccctccaatacagaattcataaagcgcagacctgctaaagattacggcagtagaaatgaaacccaaagcactcccggggagtcggaactggacccaacaaaaccacagccctagtttgaatcctcctttgtaagtccaccaataaagataggtaatagttacagaaagaatataaatataaaactttacttgtaatatcaacaacttgtggaggcgacgcctccattgtcttttgctcagtacttccaaaagtttggattctgttccatgcgacgctggaaattcgtataccaattttgaacgacggagaagggcacaaaggtctcgctcgagatgggcgggatgtctctggctgccactccgaagctggaggcgtagttgaagaagttctccagcattcgctgaccaaattgcttgttgtcgttggcagtggactgaaaattggaaatggggttagatttgaatcgcaattattgcgccaatcaaatcggttggcaactactgatcttcagaacttaccacggctggcgtctgttgggccaccgttagctccggttcgagggaaactccaatctgtgcgatgtgtgagatctcctggctgccgaagaccatcccgtgagcctgggcctccagctcgtgactcttcttcagctgggcgattttgaagatggcggagggcttggtgttgtttatgtgacccagatactgccatgtgggtgctgcgttcgcgtccggccagctgaaatatatcgcagcggaggtgccgacgggcaggggtgatacgccggtgaggaatactaccaggtagttgacggattctatgtcgggcacattcacgagcaacttggtggcgtccacggccacaaaatccgattggggcaggcgtccggagactatcagaccgaatagcgacattttcgagcggtggactattccagaattcgatatgcccgctttgttgggggaggagatgttatggagatgagcaaaaaggaactaccttatcgatgctttctttcctaatggtgtacagcccactacgtttctaacaaaaaaatatattgaagtatattggaatttgttgcttgcatatgttctgacagttgatgcatattccaaaatcctaaaaaaagatttttttttaaattttaaatggaactagttcaggcgactgctacttggcttgccattcacagcgatacggcaactccaaacagctgacgctgccatgcgaatgctgatatcgtagcaaaaacacagggacggtgcgaaagaagagggattttattttgttttcgcctggcaattgagtaatggccggactccttcacctgaccaagcagtgcagcatccacctacccgcccacttgggacgcgcgaaatgctacacactcgctaagggaccgggaacacacgtgcaggcaagagtggtgagtgctcggcctctagacccatttcaaggccacctgccagactatctagactagattacggtttcgtaattacgcgtaaatacgcaataaattggcggtttgattgagtggggacagccggcgatcggcggggaaaacagtctgcgtgtgcgttgttttggtccttctccacttccatccgatcaatcttgaattaatgctccacgctatggcttatttcgttgcagcaagcatagagttagaccaaaacagcgcgcacgcacacagacttggaggatcgatcgggtattggggacaatgggtcgcacgcagcgtcgccggcatcagagggccaagaagtctgacgagaattcgggctccctgcacgacctctacgttcatctacactccgttggctggcagaaccacactcacttgtcggcccaatactacgaacagacaggtcgaggactatgctctaaacagaagaccttttctccgga

SEQ ID NO: 33146 - DNA, 594 bp, DROSOPHILA
atgtcgctattcggtctgatagtctccggacgcctgccccaatcggattttgtggccgtggacgccaccaagttgctcgtgaatgtgcccgacatagaatccgtcaactacctggtagtattcctcaccggcgtatcacccctgcccgtcggcacctccgctgcgatatatttcagctggccggacgcgaacgcagcacccacatggcagtatctgggtcacataaacaacaccaagccctccgccatcttcaaaatcgcccagctgaagaagagtcacgagctggaggcccaggctcacgggatggtcttcggcagccaggagatctcacacatcgcacagattggagtttccctcgaaccggagctaacggtggcccaacagacgccagccgtgtccactgccaacgacaacaagcaatttggtcagcgaatgctggagaacttcttcaactacgcctccagcttcggagtggcagccagagacatcccgcccatctcgagcgagacctttgtgcccttctccgtcgttcaaaattggtatacgaatttccagcgtcgcatggaacagaatccaaacttttggaagtactga

SEQ ID NO: 33147 - protein, 197 aa, DROSOPHILA
MSLFGLIVSGRLPQSDFVAVDATKLLVNVPDIESVNYLVVFLTGVSPLPVGTSAAIYFSWPDANAAPTWQYLGHINNTKPSAIFKIAQLKKSHELEAQAHGMVFGSQEISHIAQIGVSLEPELTVAQQTPAVSTANDNKQFGQRMLENFFNYASSFGVAARDIPPISSETFVPFSVVQNWYTNFQRRMEQNPNFWKY

SEQ ID NO: 33148 - DNA, 4149 bp, DROSOPHILA
ccaggacagtactccactcaggtaggcgaacgtggattaaagttatccggtggcgagaagcagcgcgttgccatcgctagggccatactgaagaacacccccattctgatctttgacgaggctacaagcagtctggactcgatcaccgagcatgtgagtgttgaaagcgactaagtgaacttctataaactgacggaatcggacttcttccctttgtagaacattctgcaggctctgacccgcgctacctcaggacgcactagcatttgcattgcccaccgtctctcgacagtcaaggatgcggacgagattctggtgctcgagaacggacgtgtaggtgaacgtggcacccattcggagctgctgaggcagaatggactgtatgcccgcctctgggagacgcagacgcagcagttcgacccgagccgggagatcaatgaggaggtggcagcgaagaagacgcggggcgtggcgtagacgaggctcctagcctatttatgtgtttgttataatgttataaccatccccttcgtttggcaatccctagccactaaattcaccgtagaatcctcctggaccggagattcgctattcataggcttaaagtatcattgtgacgtttgtaaatacagctgtagatatgcgataagagaaattgaacgggatgtggtacaatatggaacatttattatcagttttatcacccatacattcggttatatcgctctggtttccaaggttttgtttcgagatttaattgatttgagcgtatcgttatgtaaatgcaaaataatgtgatattattaaatgcatttcattgatatatagacaaaaccaagaggatttgtgtatatccttcaaatcggaccttcatttcttcaatataaattgttatcctctgatttataggcaatataggttttgaatttgcttaaccagatttaatatcgaatctagatacggctaaaaccgaaatagtgccgatggttagccttctccttcaatctcccccctttacggcctgcggaatgggcacatcgtagagcaagtacattaggcagttgccaatgtggcccaaaaactgctggtagttggtaacccgatgctggaactcctgccacagcggcaggacagaccgctcctcggtatcaggctgttctatcgtgatgccctgctccagcatcgttttgttggtgtatgtgaacagatacgaagctggcttctggccaatggtggtgaccaagtgggtgatgttgctctccagaccgatgctcttgccggctgtcaggaaataggcctccggatcccgctcgttccggtaccgaacatttccctcaagaatggtcagcgtgcagttgataaggtccggcgagatgaagttggtcagagttagtcccgggaaatccgccacgaaaatgacatcggagtagttgttccaggccagcacctcagtctcaatggtgcgcaatttgggccgcatgtggttcagctcgttcagcagaggcagcgaccaggaggtgctctcaaagggcgaccacttggcccggaggagatcctcgcgtggatcgaatgatcgttgctgaaagcgtccgttcatggagcaccagatgtcgaagtagatggaaatgttcctcccaatatgtggctgtttctcttgtaaattctcctcgatgcacctggcatactgcactgccatgtcggcgtacttcgtccagcggtcgtactccgtaaaggcgtatggattcaggttgtgcacttggcggctctcgttgtccaccacctgaatggaggtctgcagcgtgtcgtaggagtgcaccatcatgtcccatgagtagccgtacagcccattcgtccagttgttatagcccttggtgatgaagtgtgagtatggcaggaagagttgcagtccacagtaggcaaggatgaggcccgtgcgcagtctggccaggattcccggcttggaaagctcttcctctggatcttttggatggacgtcctgtattttggaccagttgcctagcctcctcggccagtcgaagctgaagaagagcggcacttcggccagacacacccagggaaacatgcctgatgggtaagttacacaaaattacataattattgatttgtaggattataaatagttaacaggacacttacctattacaaacagtcgggagttcattagatgaaaactgagcatgaaaggagtgaccagtaggcgcgtcttttccagagtcatgaaaaaagcaatggacacgtcgaagaaggcggtgaaccaatgcacgatgagcaggtctatcagctccggatcaatcacttgccggaacggggcaaagacccagtggtaactcagattggacatcgcgtatcccgatagccattccagcgagaatttcttcagacctgcgtacatgtacaggatgaagaactggaatttgattaggaagtagttccagtagggaatacagtgactctttcggggatttagccatctgtccagggagctgaaagttgggaacaggtcgtttatttcgaaataggggattttaaaggtattcagaccagtaggactccgcttgggtgaagagcagcaatgttcccaccaggccgaatagatagctgtggttattccacgtcggtttgtccagcaggaagatgtaccagtagggtatcaggaaggccaggcagctagtcctgaatcgatagcccagcatgatgccccacgcgcccagccacatgcacagatagacgcagcccatcagtggatagtccaatgctcgcatcccgttgaacagtggaaagtggcagtgtagcggctcctgaaaccgcacgtccagctggccgccacctcgctcctctgcgatgtcaatcagcatggctgctccgtagagcagacggaagatgcccagggcagctccatctacgggtctgtttagccagctggtaaagttggtcaggctagtgaagttgctcagatcgtgaccgaggcaatctcgaaagaatgcgttttgaggaaggaaggacttcttggcactcttgtgatttacatctgtggggaattcttccgacgacctaggtgtatctttgtgcggagtagcgtcctctgtggcactgggtttcgtgggcagctttcgcttggagttggccattctgctgaatcttgaatctgtaaagaatgcgaaagaacacgtcctttgcaagtatagtaaacgttatccttacagatctgcccatagatgacccaaagatcaatcccctcgaatggttgtttggtatttaagttttgtagaatttattgaaaaagttgacataaatacatgcatgcatattgttgtatactaaatatataatatatgtgttttacatttcgtttgctgactcttgcgtaaatatctacggttctgttcggatcgctggcgtggagtccacggaaaatattgctgtcggatcggtgtaaaaaaatagatcaattacgaaatgtacatccattatactcggtcagtgagttattattgcaacggatttgcccagcttcgtttcctctagtttcgtctctagtcctgtccgtgtggaacgtgtgtggtaactgtgataactgccatccgggccggcggacatcccaactgggagtgccggccgtcgaaaacgcaaatgcatatatatatatactttcgatctgaatctgaatgggtctagctgctggccagtgtcctgtgcagtggttcgcaaaatgtccaaacgtctttgggaacaggaacaagctttgaaaatgcctcaaactacatacatatacgaatacaatataagccgtcgtctgcttgaatataggttttgatattggttacggttaagtacttaatgtgataggtagtcgcacacgcgtcgtagtagaatctccgtaggtctggtcgatccgtaggatccccacaccccggaagtgagttggaaaatgaagatgaagggagaacctcggtgcctggattgactgggttgaatgtttgattggtaaatggtttaaatacgcgcctgaataaccgctttcggtgtgtgtgtgtgtgtgtgtgtgtgtgtgagtgtctctttaagtacgtttagttggtttccttagttttctcgttttgttttcggtttactttaatttaagtacga

SEQ ID NO: 33149 - DNA, 2019 bp, DROSOPHILA
atggccaactccaagcgaaagctgcccacgaaacccagtgccacagaggacgctactccgcacaaagatacacctaggtcgtcggaagaattccccacagatgtaaatcacaagagtgccaagaagtccttccttcctcaaaacgcattctttcgagattgcctcggtcacgatctgagcaacttcactagcctgaccaactttaccagctggctaaacagacccgtagatggagctgccctgggcatcttccgtctgctctacggagcagccatgctgattgacatcgcagaggagcgaggtggcggccagctggacgtgcggtttcaggagccgctacactgccactttccactgttcaacgggatgcgagcattggactatccactgatgggctgcgtctatctgtgcatgtggctgggcgcgtggggcatcatgctgggctatcgattcaggactagctgcctggccttcctgataccctactggtacatcttcctgctggacaaaccgacgtggaataaccacagctatctattcggcctggtgggaacattgctgctcttcacccaagcggagtcctactgctccctggacagatggctaaatccccgaaagagtcactgtattccctactggaactacttcctaatcaaattccagttcttcatcctgtacatgtacgcaggtctgaagaaattctcgctggaatggctatcgggatacgcgatgtccaatctgagttaccactgggtctttgccccgttccggcaagtgattgatccggagctgatagacctgctcatcgtgcattggttcaccgccttcttcgacgtgtccattgcttttttcatgactctggaaaagacgcgcctactggtcactcctttcatgctcagttttcatctaatgaactcccgactgtttgtaataggcatgtttccctgggtgtgtctggccgaagtgccgctcttcttcagcttcgactggccgaggaggctaggcaactggtccaaaatacaggacgtccatccaaaagatccagaggaagagctttccaagccgggaatcctggccagactgcgcacgggcctcatccttgcctactgtggactgcaactcttcctgccatactcacacttcatcaccaagggctataacaactggacgaatgggctgtacggctactcatgggacatgatggtgcactcctacgacacgctgcagacctccattcaggtggtggacaacgagagccgccaagtgcacaacctgaatccatacgcctttacggagtacgaccgctggacgaagtacgccgacatggcagtgcagtatgccaggtgcatcgaggagaatttacaagagaaacagccacatattgggaggaacatttccatctacttcgacatctggtgctccatgaacggacgctttcagcaacgatcattcgatccacgcgaggatctcctccgggccaagtggtcgccctttgagagcacctcctggtcgctgcctctgctgaacgagctgaaccacatgcggcccaaattgcgcaccattgagactgaggtgctggcctggaacaactactccgatgtcattttcgtggcggatttcccgggactaactctgaccaacttcatctcgccggaccttatcaactgcacgctgaccattcttgagggaaatgttcggtaccggaacgagcgggatccggaggcctatttcctgacagccggcaagagcatcggtctggagagcaacatcacccacttggtcaccaccattggccagaagccagcttcgtatctgttcacatacaccaacaaaacgatgctggagcagggcatcacgatagaacagcctgataccgaggagcggtctgtcctgccgctgtggcaggagttccagcatcgggttaccaactaccagcagtttttgggccacattggcaactgcctaatgtacttgctctacgatgtgcccattccgcaggccgtaaaggggggagattga

SEQ ID NO: 33150 - protein, 672 aa, DROSOPHILA
MANSKRKLPTKPSATEDATPHKDTPRSSEEFPTDVNHKSAKKSFLPQNAFFRDCLGHDLSNFTSLTNFTSWLNRPVDGAALGIFRLLYGAAMLIDIAEERGGGQLDVRFQEPLHCHFPLFNGMRALDYPLMGCVYLCMWLGAWGIMLGYRFRTSCLAFLIPYWYIFLLDKPTWNNHSYLFGLVGTLLLFTQAESYCSLDRWLNPRKSHCIPYWNYFLIKFQFFILYMYAGLKKFSLEWLSGYAMSNLSYHWVFAPFRQVIDPELIDLLIVHWFTAFFDVSIAFFMTLEKTRLLVTPFMLSFHLMNSRLFVIGMFPWVCLAEVPLFFSFDWPRRLGNWSKIQDVHPKDPEEELSKPGILARLRTGLILAYCGLQLFLPYSHFITKGYNNWTNGLYGYSWDMMVHSYDTLQTSIQVVDNESRQVHNLNPYAFTEYDRWTKYADMAVQYARCIEENLQEKQPHIGRNISIYFDIWCSMNGRFQQRSFDPREDLLRAKWSPFESTSWSLPLLNELNHMRPKLRTIETEVLAWNNYSDVIFVADFPGLTLTNFISPDLINCTLTILEGNVRYRNERDPEAYFLTAGKSIGLESNITHLVTTIGQKPASYLFTYTNKTMLEQGITIEQPDTEERSVLPLWQEFQHRVTNYQQFLGHIGNCLMYLLYDVPIPQAVKGGD

SEQ ID NO: 33151 - DNA, 3166 bp, DROSOPHILA
ctggccagtgtcctgtgcagtggttcgcaaaatgtccaaacgtctttgggaacaggaacaagctttgaaaatgcctcaaactacatacatatacgaatacaatataagccgtcgtctgcttgaatataggttttgatattggttacggttaagtacttaatgtgataggtagtcgcacacgcgtcgtagtagaatctccgtaggtctggtcgatccgtaggatccccacaccccggaagtgagttggaaaatgaagatgaagggagaacctcggtgcctggattgactgggttgaatgtttgattggtaaatggtttaaatacgcgcctgaataaccgctttcggtgtgtgtgtgtgtgtgtgtgtgtgtgtgagtgtctctttaagtacgtttagttggtttccttagttttctcgttttgttttcggtttactttaatttaagtacgacagtaatgcataaatgactaatattttttgcttcacatctattttacttgtgagtttgccattaaaatacttttggttttctttatcgatttcatttcgttatttacgcaacgctaaaacattttaaaatgcattttcaaagttaattcaataaatatgctcttggttttccattagataggttctgtaagcttttaaagatctagacaatgttttcgagtgtcgaaaattagcatacaatgggggcacatagttgctcctccgtctgctgctccatcaatcagcccaagtcggcgcactcgggggaatccgcggtgtgctgcagtccgtatagcaacccttgtttgccaggccgcgatgcagttcctcctcttcctcctcctcctgctgctgctgctcgtaatcattcatccgctccctgcgcaggcgcactctctcccttggctacctgctctccagctgctcatcctcctcatcctgctcagcctgtcctatgctcctgcttcaccctcgcccggtcaccgctctcccggctgccgggcccgttcctctagaggcgattctggttgagctgggagcgcggagtgaagggactgaccatcacgccgctgggccagatggcctcgttgaagagctcgttgaagcggtagtccggaatggagatcttgaacttgcagtacgacaactgcgacaggttggcatcgttcttcaccagcttggtgcacttgaccaggttcttgttgatcttcagctcctcggccaggtgatcgatcacgtcctcctcgctggtgttcgtggcgaacttgcccacctgcacccagcgcccgtagtcgcagaccacttgcagtcggtcggagttacaattgtttcctaccacaatgaggttgttctgctgcggatgcttcttcccgtccagtccgccacccaggccgccgccacccacgccggcggccgaggcgcccaatgcctgaagcggctggttgccaaactggaagtactgctggtacatacggccctggatctggttgaccccgttgcacaccttattgaccttttcctcgatggtgtgcagcttggccgcgaaggctcgtggcgactggtttttgcactcgtcgcagtgaaaggatatcatcgagttcttctggatcgcctcgaagaccgcgtcgtcgatgttgacgcacgtgcggtggtaccttctccggcagtcctcgccgctgcacccgatgctcgtggcctccttggcggcgatcgattttttgcactttgggcagttattgttgtcggccatggtgactttggttggttgattggttagttggctggctggttagttggttggtgactatcgatttcgattctgaatccgaacccgagtctgattcaagcaggcggaaaaagagaattcgaactttcaggaaaaaacacacgcacactgtggagtcacacagtgggtatatacactacggccacagcaacaacggcaacagcagcaggcagcagcaataacaacaagcgagaaattcgagcgaaagtcgcctcctctccgctccaccctctctcactcttcttcctgtgtctgcgtccgtgtgtgtgtgtgtgtgtggcgagtgctgtgtgtgtgtgtgcgggaagagtgctgaaatcgggaaagagaaaacacgcagacgaccgaaacttgacaaccgcacgctccgaagtttgcagactgactgtgcgcgagccaccgattgcgtttccgaattcgagaccaggtccgccgattcggattcggaatagaagtcggaatcggatacactcggcacaccgtgcaatcccaacaccacatgcaacccccgataaagctgccacgccaggggtggctttaaccactattctcgccatatgattgaccagccgccgacccgactggcaaccagttttgttctcgccagcactcacccccagtgccactcgattggggctcctctgcacgacagtgttggaaataggggtaagtgcagtgtgtgcagtagaaggattgaaacaccgttacaccagtgattttaaggttatatgtttttttcacattttatacatttgtatatttaactggccagattgatgaaacataatataatcttggatatgatatgttagcataacatttttactgtagtttggcatcgcttttatgctgtataattataaatcgcatattctaaagatttgtattgtatatgatagattgtccttgaatgtggaactagaattccaaaataatactttaaatactaccatgctttcggaagtagcaataactttacttatagtacaaatcgtacgaagagcactacttactttgtgttgttatggccaattaaagcggaaatggggtcaactttacatacaagtcgttatatcaaatccccggcttacagtcacttctgctctgctcacaatcgcttttcaaggcaattaatcaaattcacacccgtaatttgctgcagttggggcagtaattggggccgttatactgctccctgcagcgcgccacccgccgagtgcaactggcaacagttggccgtttcccggatgaactctcacctgcggacgcagcgactgggaaaagggaatcgcgagcaacacggtccgccaactgaggctgtgcgcacgagctgcgtggtatttatacgccactctgctccactcggagatgtgtcccttctgcttttccttt

SEQ ID NO: 33152 - DNA, 1166 bp, DROSOPHILA
cgcacagtcagtctgcaaacttcggagcgtgcggttgtcaagtttcggtcgtctgcgtgttttctctttcccgatttcagcactcttcccgcacacacacacacagcactcgccacacacacacacacacacggacgcagacacaggaagaagagtgagagagggtggagcggagaggaggcgactttcgctcgaatttctcgcttgttgttattgctgctgcctgctgctgttgccgttgttgctgtggccgtagtgtatatacccactgtgtgactccacagtgtgcgtgtgttttttcctgaaagttcgaattctctttttccgcctgcttgaatcagactcgggttcggattcagaatcgaaatcgatagtcaccaaccaactaaccagccagccaactaaccaatcaaccaaccaaagtcaccatggccgacaacaataactgcccaaagtgcaaaaaatcgatcgccgccaaggaggccacgagcatcgggtgcagcggcgaggactgccggagaaggtaccaccgcacgtgcgtcaacatcgacgacgcggtcttcgaggcgatccagaagaactcgatgatatcctttcactgcgacgagtgcaaaaaccagtcgccacgagccttcgcggccaagctgcacaccatcgaggaaaaggtcaataaggtgtgcaacggggtcaaccagatccagggccgtatgtaccagcagtacttccagtttggcaaccagccgcttcaggcattgggcgcctcggccgccggcgtgggtggcggcggcctgggtggcggactggacgggaagaagcatccgcagcagaacaacctcattgtggtaggaaacaattgtaactccgaccgactgcaagtggtctgcgactacgggcgctgggtgcaggtgggcaagttcgccacgaacaccagcgaggaggacgtgatcgatcacctggccgaggagctgaagatcaacaagaacctggtcaagtgcaccaagctggtgaagaacgatgccaacctgtcgcagttgtcgtactgcaagttcaagatctccattccggactaccgcttcaacgagctcttcaacgaggccatctggcccagcggcgtgatggtcagtcccttcactccgcgctcccagctcaaccagaatcgcctctag

SEQ ID NO: 33153 - protein, 245 aa, DROSOPHILA
MADNNNCPKCKKSIAAKEATSIGCSGEDCRRRYHRTCVNIDDAVFEAIQKNSMISFHCDECKNQSPRAFAAKLHTIEEKVNKVCNGVNQIQGRMYQQYFQFGNQPLQALGASAAGVGGGGLGGGLDGKKHPQQNNLIVVGNNCNSDRLQVVCDYGRWVQVGKFATNTSEEDVIDHLAEELKINKNLVKCTKLVKNDANLSQLSYCKFKISIPDYRFNELFNEAIWPSGVMVSPFTPRSQLNQNRL

SEQ ID NO: 33154 - DNA, 3278 bp, DROSOPHILA
actgtcttccactggcgcaggtcgggatgtgggatggtcagtgggcggtggtggcgttggtggtgtaggtagtgggtggtggtgcagctgaactctgtttcgttgtttttgttctagagggttgcgctctcagtgccgcttctctctctctctctctgtttctctctctctctgtcgctcttccgccagagctttttcgccccgtcgtcaatgaaaattcactccactccacggggggattggctggatctggatgatgtgtatgtgtgcgggtaacacttgccacgacagcctttcgcaggaattttctggctcagcgctggaactgctgctgaatagagtgcgaaaatagttgcaactatttttagtacatcggttaatgcttgaaatgggcagctatgggattctaattgggacgtaagaggactatttgggtggcagcaacacgcccagccatgaggcatgtccttcctcatttccgttgcatacccccaggggcacctaagatgtcttcaaaatgcaaaacgttttaaaaataatttcaagtgcccaactggccaacgtgggctcagaagaaaaaatcaatgaaattctgcacgacaagggttttcgctgactttggttgacatttcgtttgatcttcgttttcctaatcaatcagttttagcacttttgatcagaatcactttacttttgctcgggcaacttgagtttacaaaaaccaggcttaactaatattttacgaatttttttacgcagcaccaggaaaattttcacttacgacgtttttggccaactgcgaaaacttgcagctttcctaactgttatgtgtatttggggaaaaagctgcctggatggccagcagcgaatggtgttccagcgagaagcttttccttagcgatttccaagtgccgatggccaaggggtgggaaatttaaaaacaagccgggctttccatcaagaaaaagaaatgctcaaagttctagtaatattacagtttgaagttttaactttgtatttttaaatatatcgtgtaaataattatatcaattgatttgaacaaggtttaaaatgcacagaactattcgtctaaattgatttaaagcggtttcctgaactttgtctgaatccacacgcggtacattttcaagccgcgacagcgattaacttgcagtcttcggtccacaatgagctgctcctcctgcagccccgcttgagtcatcataccccgcagttcttcctccgtgaagaagtacaccatggtgccgtcgcctcgcacgtagaagttgtcctccatacacttgccgctcttgaagcgcagctgtgccaggtcgtatcgtccgtagtcgcggaagaggagcaagccaccgggacgcaggtagcgatagcaattgtccaatacccgctgcattttctttggctcaattgcggacagcacaaaaatcatcacaataatgtcctgtgagttttcctcgaagggcacctgccaatgatccagcgtggcatccatgacaaacacctcgcagcgcttctcgtcgaactgccgttggcttcgcaggatttcaatggcccgggcggagaagtcacatccgaaaaccttgagctgcggttcagagctgtactgtagaaggggtaaaattgtgtttcctactccacagcccagttcgaaaatgctacgtggttgcagtaccgccgaatccgccgccagaggagctagttcggggaactccgtaaacagccagtggcgatccttgaagaagcggttgtcgtgaatgccgtagaaggaatcccaaaacttgggggcgtctgtctgaaatcgctccttctgctccgcttccatctttgaggtcgaattcttggctacagccgccttcgcggccagttcctgctcttcatcccattgcacgtggtccctgtgaatccatgtttagagggattttcatgagtactgaacggcagataagtaccaggcgttaaactcgaacacctctcgcgcgtcggtgagcacccggctgcccgctcccgacggttttttacgctggcgagtgtgttcccaacttttgctggccaatctccggaggatttgccacccatatttaccaagcattgtgcttgaagacgtcgtcagcatccgtgagcaggcgggttccgaactgcggtcgcttttcgttctccgcggcggggttgtcactcatatcggacaggaatgacggtatatatcacctgtttgtgcgatccaaattatatattttggtaaacacgccgccagtgtggccgtgcaccgatccaataaagttaaaccgttagtattttcgaagcggctctcttccgagcgggaaatcggatgtacccgttatcgcccttttttccaaaagcaattgtgaaatatgtgttctatgtgtgtttagtttgtggcgtgttgagtacgcatcgagtttttaccgaaaccccttagagaaaagggaaaaataaagttgaaaattgcgggcaaatgtaatcgtgctgccagaccatcaatagtttattttagggatgtactcgtgactgaataccttggcggatatcgtttcatggttaaaatgcatgatataaaaactggtaaattaaatatgaaacccgtaggtaagtaaaatgaatatgtattgttatgtttgcgacttatatccataattcgaatgaataataagaataagtttttggtgctcgtgccgtgcttttgcttccatcgctacgttttgacttctccactatttcccagtggcaacgccgcgtcagttggtatatcaaaaccgcaaaccaacctttttgttgtattgtgcgttgtttttttcgacggaggcgagaaatttaaacaattagcattcagagtgctaagatacaagagcttattgtgtatacgcagaaggctcgtcgaaggagcgaccaaaagaaacccatccagggtaccgagttccagggattattgtgtgcacgcagcggtctgcagaagcacccatagaaacataccctattcagcgttccatcgagcggacgaatcgcgaaaacccgttaaaatgatgaacgaggcggcacttgccaatatgataccctacgacaccatcggattgtatgaacagccaaagccgcgcttcatcttcaagatgcctcgtgtggtcccggaccagaagtccaagttcgagagcgacgaacttttccggaggctcagtcgggagagcgaggttcggtacacgggctatcgggaacgaagcatcgaggagcggcaggtgcgcttcatgaac

SEQ ID NO: 33155 - DNA, 1224 bp, DROSOPHILA
acggccacactggcggcgtgtttaccaaaatatataatttggatcgcacaaacaggtgatatataccgtcattcctgtccgatatgagtgacaaccccgccgcggagaacgaaaagcgaccgcagttcggaacccgcctgctcacggatgctgacgacgtcttcaagcacaatgcttggtaaatatgggtggcaaatcctccggagattggccagcaaaagttgggaacacactcgccagcgtaaaaaaccgtcgggagcgggcagccgggtgctcaccgacgcgcgagaggtgttcgagtttaacgcctgggaccacgtgcaatgggatgaagagcaggaactggccgcgaaggcggctgtagccaagaattcgacctcaaagatggaagcggagcagaaggagcgatttcagacagacgcccccaagttttgggattccttctacggcattcacgacaaccgcttcttcaaggatcgccactggctgtttacggagttccccgaactagctcctctggcggcggattcggcggtactgcaaccacgtagcattttcgaactgggctgtggagtaggaaacacaattttaccccttctacagtacagctctgaaccgcagctcaaggttttcggatgtgacttctccgcccgggccattgaaatcctgcgaagccaacggcagttcgacgagaagcgctgcgaggtgtttgtcatggatgccacgctggatcattggcaggtgcccttcgaggaaaactcacaggacattattgtgatgatttttgtgctgtccgcaattgagccaaagaaaatgcagcgggtattggacaattgctatcgctacctgcgtcccggtggcttgctcctcttccgcgactacggacgatacgacctggcacagctgcgcttcaagagcggcaagtgtatggaggacaacttctacgtgcgaggcgacggcaccatggtgtacttcttcacggaggaagaactgcggggtatgatgactcaagcggggctgcaggaggagcagctcattgtggaccgaagactgcaagttaatcgctgtcgcggcttgaaaatgtaccgcgtgtggattcagacaaagttcaggaaaccgctttaaatcaatttagacgaatagttctgtgcattttaaaccttgttcaaatcaattgatataattatttacacgatatatttaaaaatacaaagttaaaacttc

SEQ ID NO: 33156 - protein, 246 aa, DROSOPHILA; identical to SEQ ID NO: 27042

SEQ ID NO: 33157 - DNA, 4234 bp, DROSOPHILA
gtaggtgaccacaatcactttggttatggatttgtattgttaaaactctctcctaatgatttaattagttggtacttaccactcgcattgcgataataggctccggcgatgcacctgaagcgctcctgaccagcagtgtcccacctgcaagtagagcacatttcaaaaccaaactgatagcgccttctaggcagttgacccacatttccagactgtagttgtgacccagaatgctgaagttctccagctcaaagtccacgccaatggtggccttgtagttcgactgaaatttgtcgtagcaaaatctgcggatgattgtgtaagttaattaatttagtaatgcctatatgccatgccatgctcaccgattgacgatggccgtcttgcccacggagcagtcgcccacgaagatgaccttgcagggtcgaaacttgggcttgcgaggcgcctctaggtagtagcgcacctgcgccccaaagtcccgctccttgctcagcggagtctgtgcggcactgtaggcgggtggcaggtgccgcaggtgggtgcgaggatcgtgcaggaccaccgtgggcggttggggtaacagcaggttctgccgcagtcgatggggcatggcggacgtctctattccaactaactaagcagctcaaattggggaagccagccacgtcgtcggcgtcatcgcctccgccgcaaaccacaaacttggtcggcttgaacttggtggctatcacatgcccaaggtgccgaaagctaccttacaccccctgctttgcattgcaaatgcaggtgctcgataagagcagctcgggtgtgggttagttccgatagggagaaggccttaagagctgagctttaatattgggctgccattgtatccatatcattaaaccttcaagcccgaaaggaaaacgctttggattggtatttggtggctttatttgtgtcaatcataacactcatacaatggcttatggttataatatcttgattaatctaatcaagcccttgtttgcttcgtcccacctggatagccaaagtagccgacgctcttcacctgcttgcggagatcgggttgcatggagagggccttgaagatggctctcttcagctgcttgtactgaaagtgcggcgggaatggcatgtcctcgaaggacaacatcaacaggttgcccgcctcgtttcccacggccagcgaacggccgcagtgggtgaatctggaaggcgaggagatgcgataggatcattcaaggagaagactctgaactcacttgaaggtggtgtagaagatgtcggcgtctatcaccgtggaggacaccggcttcatggtgctattgcgcaggtcccagatgtccacggtgctgcgactgagcgagaccaggatggtggagtgagtgcggctccagcgggcgcagtgcaccggggacaggtgatgctgaagggtcacgatgggcaacaggattccagccagccagatacgaatgcacctgatggggacgcatgagtgaggatagagaaacccggaacaaaatcgcagttgatctcaccagtcgctgccgcaagtgaggtacatccttggtgaccagggcgagaactccatgcaggcggcgggtccatcgtgcacctgccttagttccaagtgctgcagcgggtagttcgtggagcacttgtacagggtaccctcgtcggtcagcacgtagtatatgtccgactggacaggatcgagcacaatctccagacactgcggatgcctgttggccaggagggaagccgccggaggctgtcgctcgatgggaatcccctctagctcgccctccgcccgctgcaaacgctgctgctcgagtcccagcatattgggactattgatcagccggtacttggtcaccgccccagcctgcgaagtggccaagaagggcgtgatgtgcgggttcctgcacccaacatcgccctcgaagtagatccatttaatggccgttactggctcgaagtatggcgaggacaaacgctgcgatacagctagtggtggcagatcctgtccagaaatatccctaacctccacacctccgttgtgcagtccaatggccagcagttgcggttgggtgggtgaaaactccacggtgaccacaggcacttggtagtggtagcgtcgttccggattcacagggttcttgatgttccacacgtagacccagccggatctgggtaacttgctgaccttgccgtggctgtacaccccgtaggccaccgccatgatgtccccattgctgggacagaagctcatgtcgctcaccgcttgatgaaccttgggatccgacgagggggggctcagtcgccacagcaggcccagtcggtacttgaacttgacgtcctcggccaagggatctggaggagccatgttcctgtacctccgttgctgcggctcgaagacattgctggccaagatgcgcatggtcagcatgagggccagtcgaaagccgggcaggcagttgatccccacgaactgatccaccccgcccacgtggtaggtggttatctccatcttcttcgcgccctgcacctggacactcgtggtggacttctccaggtcggtgtacgtgtcgtacatctcgaagttggacacataggaacccatctgggcggtggtcagccgctcggtgttcaccagcctggacttcatcagcgccgtcatggtttgggtgtccgcatcgacggttctccgcgttttgtccgttcccgagagcagttcgtcgtacttccggttgtcctccatcacctggcgaccctcctccgtgtccgccaaggcggtcatgctgcgccgttcgaatagcaccacgatgggagtctttcggagcagcaccttgatgaagggcgtggctggaggacgggcggagtgggcggagcgggcggaggaagcaggctccttcagataattcggttcctccagagtgggcgacatgggcgtgtccagctgcagcttgtaaagattgatctggcgaataaacatactgtatggcttgatttctttggacattaaggatgataggcactcacccccaaggcaatgtcatccaaggaagctctcatcacgcacttcgttcggtactccggcgtacggagcttatggagttgctgctgctccgctccgggctccttcatcagcggatggtccctaatcatcctgctcagttgctcgaagtccgcggtgcggtaatccttcctcaaaggtcgcgacatccttctcaattaatttgaatgagcgcgtgccgccgatttcccaacttgtttactgcgtgtgcagacatggcaacgcaacaatggtggatacaatatatgggtgccataactaccaagtgctgtagttgcactccgattgcaacacggaattccattagcaggctcacacatgactgcactcattgcgtccataaatatttataactcacatttaaatcgcgcaacaaaagtgcataataagtgggttggtaagcaaaaacgtatatttaaatatgaatgtagttccagttgtgcaatgaagatgaagccaccatagtctaacatcaatttggatcattacctttagtgattccaataatttgcgcggctttctgacctgtcacaagaaaaatcccccaaccggagaaaagcaaaacaaactataaactacaaaatacaaactacaaactaccaacaaatgaaattcgtattcatattccaattagacagtagaagaatagcagacggaaaatagttagatggtatatggtaaaaaggtctttaattccgccacatagccgcataggaaatgggcaaaagatgggatgaggaggagcacttggccatgtgggcgattgagagcagcaagccgtgcagcacactgaacgaaaataagatcgggttaagaatgaaatatgattaggttaagtgctcacagcaaagaaatgtatctacagagaaattatttcaacatgaatcccaaactataaatatgacaatcttaatttgaagatagcttgtaataatcaaagcgattttccgtgtatagaagatatggaagtcgaaaagaagttgtttatgttaatttggctttatgcttcgctacgctgattcgcttgatgaacatatagcaaaaaagagggctgattatgaggacgacgacgacgacgacgacgatgacgatgatgatgagggggcccaaaccgagcgaatatggccaagtgcactatgtcaaacggag

SEQ ID NO: 33158 - DNA, 1969 bp, DROSOPHILA
atgtcgcgacctttgaggaaggattaccgcaccgcggacttcgagcaactgagcaggatgattagggaccatccgctgatgaaggagcccggagcggagcagcagcaactccataagctccgtacgccggagtaccgaacgaagtgcgtgatgagagcttccttggatgacattgccttggggatcaatctttacaagctgcagctggacacgcccatgtcgcccactctggaggaaccgaattatctgaaggagcctgcttcctccgcccgctccgcccactccgcccgtcctccagccacgcccttcatcaaggtgctgctccgaaagactcccatcgtggtgctattcgaacggcgcagcatgaccgccttggcggacacggaggagggtcgccaggtgatggaggacaaccggaagtacgacgaactgctctcgggaacggacaaaacgcggagaaccgtcgatgcggacacccaaaccatgacggcgctgatgaagtccaggctggtgaacaccgagcggctgaccaccgcccagatgggttcctatgtgtccaacttcgagatgtacgacacgtacaccgacctggagaagtccaccacgagtgtccaggtgcagggcgcgaagaagatggagataaccacctaccacgtgggcggggtggatcagttcgtggggatcaactgcctgcccggctttcgactggccctcatgctgaccatgcgcatcttggccagcaatgtcttcgagccgcagcaacggaggtacaggaacatggctcctccagatcccttggccgaggacgtcaagttcaagtaccgactgggcctgctgtggcgactgagccccccctcgtcggatcccaaggttcatcaagcggtgagcgacatgagcttctgtcccagcaatggggacatcatggcggtggcctacggggtgtacagccacggcaaggtcagcaagttacccagatccggctgggtctacgtgtggaacatcaagaaccctgtgaatccggaacgacgctaccactaccaagtgcctgtggtcaccgtggagttttcacccacccaaccgcaactgctggccattggactgcacaacggaggtgtggaggttagggatatttctggacaggatctgccaccactagctgtatcgcagcgtttgtcctcgccatacttcgagccagtaacggccattaaatggatctacttcgagggcgatgttgggtgcaggaacccgcacatcacgcccttcttggccacttcgcaggctggggcggtgaccaagtaccggctgatcaatagtcccaatatgctgggactcgagcagcagcgtttgcagcgggcggagggcgagctagaggggattcccatcgagcgacagcctccggcggcttccctcctggccaacaggcatccgcagtgtctggagattgtgctcgatcctgtccagtcggacatatactacgtgctgaccgacgagggtaccctgtacaagtgctccacgaactacccgctgcagcacttggaactaaggcaggtgcacgatggacccgccgcctgcatggagttctcgccctggtgcattcgtatctggctggctggaatcctgttgcccatcgtgacccttcagcatcacctgtccccgtcgcagcaccgtggacatctgggacctgcgcaatagcaccatgaagccggtgtcctccacggtgatagacgccgacatcttctacaccaccttcaaattcacccactgcggccgttcgctggccgtgggaaacgaggcgggcaacctgttgatgttgtccttcgaggacatgccattcccgccgcactttcagtacaagcagctgaagagagccatcttcaaggccctctccatgcaacccgatctccgcaagcaggtgaagagcgtcggctactttggctatccaggtgggacgaagcaaacaagggcttga

SEQ ID NO: 33159 - protein, 563 aa, DROSOPHILA
MSRPLRKDYRTADFEQLSRMIRDHPLMKEPGAEQQQLHKLRTPEYRTKCVMRASLDDIALGINLYKLQLDTPMSPTLEEPNYLKEPASSARSAHSARPPATPFIKVLLRKTPIVVLFERRSMTALADTEEGRQVMEDNRKYDELLSGTDKTRRTVDADTQTMTALMKSRLVNTERLTTAQMGSYVSNFEMYDTYTDLEKSTTSVQVQGAKKMEITTYHVGGVDQFVGINCLPGFRLALMLTMRILASNVFEPQQRRYRNMAPPDPLAEDVKFKYRLGLLWRLSPPSSDPKVHQAVSDMSFCPSNGDIMAVAYGVYSHGKVSKLPRSGWVYVWNIKNPVNPERRYHYQVPVVTVEFSPTQPQLLAIGLHNGGVEVRDISGQDLPPLAVSQRLSSPYFEPVTAIKWIYFEGDVGCRNPHITPFLATSQAGAVTKYRLINSPNMLGLEQQRLQRAEGELEGIPIERQPPAASLLANRHPQCLEIVLDPVQSDIYYVLTDEGTLYKCSTNYPLQHLELRQVHDGPAACMEFSPWCIRIWLAGILLPIVTLQHHLSPSQHRGHLGPAQ

SEQ ID NO: 33160 - DNA, 2489 bp, DROSOPHILA
tgccaatctggtgctccagtttggatggcatcgctggcagcgattagcctgattgatcaatgggtgttcggcaatggcggattagaaaacccactccaaggtggatgctatctatagtgatcgagatgcgtttaagtatcttctcttgcagactcatgtattgaaccatctgaacaggcatttttgccataacttggccaaaaaatgtccgatggctgaaataatcacagtttcttgcagctaatgatcgatactaactatcctcattccgtttttgcagacatttaaaaattaaattttttccaatttttgactttttgataaggggttacatcactatttttttgaaaaaattgaccaaaaattaaaagttcagttttgaatgcagatcgattttttatgtcaatacgagctcaaaaaggtattacattcaataattgaacaaaaattgcgccaaatatggccaatttggggaatttcctatgaggcaactaggaaaataaggggaaatcctataggaaaatcttagtccaacaatataattataatattatataatatattaagtttggatttttttgcttagcctaattaagtttttgactttgctgggaactattcaagctgcaagtcttctcttcccatattaagttttccattcacttgcttcagccatcgacactcgtttcctttaattgtccactaaaatatgccgcatgccccagtcgagaggcaagcaaatacttcaagtttttcccaagtgcgcgactggagaaggcaagaagttaagtaccacccattcccagccggcttccgaatcctaattaaacaatacaaatgcgaatcggcagcgaaagacaaagacacggattccgggggattggaatttggacgatgctgagtcttgagctgcgtcagcgcatccgtagtgcaaatgcaaatcgccgctggcaggaattttataattaatcggcggggatttgcgcacacgtctctttattcacaaccagccatcccttaggtctacaaagtcgtccagctcctcggcgtaatcctcggcagttccatcgctttggccgtgacgcgagtagtgattgaaaatcatgtctctggccgccggaatcactttgccgctctcgcatccgtgcatgtcctcgtatgtgatttcgccgtgtcccattcctcctatgctgcccatgtcgtagctaccgtgggctccatggccaatgcctcctcctcctcctacgccgcccttggcaatgccaccaccgtgtgtggagaagccaagcactttgtataccgtttgctttacacctccgccgccaccgccaccatgtgatccgtgtagcaccttgtacacggtgtgagtgtggtggtgcgtcttcaccttgaccggcacgtggatgattaggcgtcggtggcccagacgccgcgcctgcactcccgtcgccaccagcagaagcattatggccagcagcttggccgccatggagggaccaccagatgacagctttattttgggtaaatcaatagcgagagcgttgaacaggaattactatttgaaactaaattataggaactaaggtgcaatttccgaaaactgaaatccatttcgtgtttttttttttaggcgttcaaattaataagaactttctgtttgttggcaattttcaatcatttgattgaacacttggtgtgaatgcaaattaaactttaattaaattttaatttagtttaatatgacccgaataagcaattaaaatttgtttttcactctgcttgaatttatatttttttttattaaatcgcacaaaactgtttttaagtagattttaaattggtttgatttactttttcggtttttgtgccgatccaaatggccagcttaacttgactcactttggacatttagcagatgtagatttggctgatgtggctgctgattaagctggttaagcaggtccttaattaatccttcagttcgtccactgccaccgccgagtggcgcgcgttcgctttcagcactgtgtgggccggctggaatcgatggggcttttatatggatgcggtaatcaggttcagtgcaccatgccgcatgtggcgtacttatgggctccccctcacccatcccgtccatcattatcttcctcggcggtggtgtcgattgcattgcagcctccacggagccgcaacatttgcatgtgcagcgccgcagcacagtggcgtccgagttacgtgtgcctaattattgcttacagcttgttgcttgccggcacactgagagaaacaaggttgtttttcaagatatacaatatttaaagtaatgaaggtgtcagtatcttaatttgcttctcagcaatcaatatcttaagaaaagttttcatgcataacaaagttataacattagataagtgagaaccaatcgtgcagtattttctcgcagtgcaggcccaaaagcatggggcgcggtcgctgctcggcgaagcgtt

SEQ ID NO: 33161 - DNA, 489 bp, DROSOPHILA
atggcggccaagctgctggccataatgcttctgctggtggcgacgggagtgcaggcgcggcgtctgggccaccgacgcctaatcatccacgtgccggtcaaggtgaagacgcaccaccacactcacaccgtgtacaaggtgctacacggatcacatggtggcggtggcggcggaggtgtaaagcaaacggtatacaaagtgcttggcttctccacacacggtggtggcattgccaagggcggcgtaggaggaggaggaggcattggccatggagcccacggtagctacgacatgggcagcataggaggaatgggacacggcgaaatcacatacgaggacatgcacggatgcgagagcggcaaagtgattccggcggccagagacatgattttcaatcactactcgcgtcacggccaaagcgatggaactgccgaggattacgccgaggagctggacgactttgtagacctaagggatggctggttgtga

SEQ ID NO: 33162 - protein, 162 aa, DROSOPHILA
MAAKLLAIMLLLVATGVQARRLGHRRLIIHVPVKVKTHHHTHTVYKVLHGSHGGGGGGGVKQTVYKVLGFSTHGGGIAKGGVGGGGGIGHGAHGSYDMGSIGGMGHGEITYEDMHGCESGKVIPAARDMIFNHYSRHGQSDGTAEDYAEELDDFVDLRDGWL

SEQ ID NO: 33163 - DNA, 2261 bp, DROSOPHILA
ctggtggtcactagggatctggggatgggatgtggatggggctgggcctgcgcctggggccctgggtgggtcgttaaagatttgatgatccctccggaagcgtttaatttgttttggcacctcggccaagatccgagagctgaaagataaagctggaagcggatcgaagcgaagcccggccttaattaaaacccaacgaaatcggagtttatttatatgtctggctggcgttttgttaacccattaggcgacaacgtttctgccggacagtaagtatattgcactgcccgttttacagttgtctggcccgcagcgaatagccactggatctggcggggattgggggtcagatcggagatcgggcatcggggagagagtggtccgtctgaggcgctgccatgtttagtggcaattaaaatgtttttatcttattagtgcctcttatctgcggctgccattttaagatatatgcgagggacgtgcgcgaaacgccgaccacaacagttatcgattgtgcagcatgtgtatctatggggcatccatcccattacaggcgtaatggggcaggaggagctggcctggagattgggcctgattgaaaaatttccagagttcttctattccattaaagcgattaacctgaccgctgactcgcgtacttaagctcaattcccacagcctaaatattttccgaggaagcgaatcgtagcagtaatccaatttgaggctcagcggattccagggattagatacaattaaatataaaagttaataggtaaagctctagacttcgtcaaacggatttctgtgacatccaatcttcttcccgtggttatgatgttatgccaagcctgacttctgacctttcttagttggtcctccgagcctggcagttaatcacatggaacaccatccagtccaagcgccttttaagcccgcggtccaggcacaaatcaatcggccaatttgcacgcttcgacatttctcgattgaattattatcacgagagccagagtctggctgccagtatccagggatggcacactggacactggccactggagtctgtagtctggagacccgggttcttgctccatccagagactgacagctgtgcggtggctttgactggtgactgtgaggcggtgaaggcgaggaagcagggcaggtggaaggtggaacccggtccgttgaccacgatcacaatgccccagtggccatgttcatgtcggactctcgctcggatggagcggggcaccatatttgcagcaggcgggccaacaagttgcaaaacaaatttgtcagagtgtttcccatttttggacaggcgttgcagctttggccatgtgatttgtgcaatgcgtcgatgttgccggtgttactggtgttgctgttgcaagtgttgctgctgctgcagttgcaattgcaattggaattggaattggaattgcctttgttgctggggacgctggttccggcgcaatgtggtcattcactaatttggcagccgtttgcgtttaattagagggccgccgcagagctcgacccggagcaacactttcgattttagttccccggagctgtcccgtgatcggtcacgcccccaattcggccctgccacgccctcgccgctccatatgcactgcagataaatataggattcaaattccagcttaaatgctgtctgagaacgtggacttttataaaatgaagtggcaagcaatccctcttagttttccgtaactcaaaatctttgggtgtctacatatgtatgtccaatatcatctagtgcaaacctttgtccaatctgttaagagtgcatgcatttctctgagtgtacctggtgaagatcacgtctcacgtagaggccattaaaggccacagcatcacgatcgagttggagctgggctttccagctggagctggagccgagctgagtgaatgactttgagccggcctgtcgtcacacccccatgtaatcctcgcacgatctctgcgcttgaacctttttgattagggccggggcaacggaaccgccgactgactgacggaggagtccactcccctcggagatctgcctcgcaaaggtcgttaaagtcgcattgctgccgctgggcccgcagattttggcgggtcttggatcttgcctcttggcttttagtcgagggctcagggccttgtcctttctgcgcttcatcagggctgatagttatgatctggagtaccctgccatagagtctgggattactccatttttaaag

SEQ ID NO: 33164 - DNA, 261 bp, DROSOPHILA
atggtgccccgctccatccgagcgagagtccgacatgaacatggccactggggcattgtgatcgtggtcaacggaccgggttccaccttccacctgccctgcttcctcgccttcaccgcctcacagtcaccagtcaaagccaccgcacagctgtcagtctctggatggagcaagaacccgggtctccagactacagactccagtggccagtgtccagtgtgccatccctggatactggcagccagactctggctctcgtga

SEQ ID NO: 33165 - protein, 86 aa, DROSOPHILA
MVPRSIRARVRHEHGHWGIVIVVNGPGSTFHLPCFLAFTASQSPVKATAQLSVSGWSKNPGLQTTDSSGQCPVCHPWILAARLWLS

SEQ ID NO: 33166 - DNA, 4516 bp, DROSOPHILA
tgatgtccgaggccggtcggtgcatccgctccagcttcttggtgtacatggtcgagccttctttggttggaatatcaaagtacagggaatcaatcggatttaattctccgatagttattgttgctaaggcgacttgtgtttgtttgttcgtttccggggaatgacttccggctcgacgaccttggaggacaactactcacaggtgttaaagtttatgtttatttattgatcgatagcgttatcaattcgattgaaaatgacattatagatacagagattaacaacagtttagcaacaataataatagttacaataataattacataacgcctcgctcctccgttcgaatatacaaaattctaaaacacccgaaatgtttgtcaaaaaacagccttaagtttatgtcctactataacttacgcagcatgagggactggaaacggggtgaggggccgttgggtgcgggggcgggatgtgcttgtatagtgtaaagcgcattacagttcacaaagttgtacgtatagaattacaaaacatagatgagcgtgtctctcccacaatagtttcaatatattcgtatcaaagaaattgcacgtgtttgatttgacattatttaaattggcttcttgtgtgtgtttcatgttgtgtctaggtactttaaaaacgttttcatatctcatacgcaacagcttcagatcaagcgtatctcctttggccctaaattaagagaatttagcgatctaattaggtgttataacaaaaagtatacataactattcgctttcgatatcaaagtaaattcagtcatttcagaactgatcgttaagctacgatgggccggcccagaacaggcctgatagttcgtaattattgcgtacctacatacctactggggtaggcgaatatgcgtattaaacattacatagcctaggggcaacagtagtgattgactctagttcgctgcggttgggattcattggtccttcggccgctccactcgctacctctcgaactgcagcacgtagtctttgagcgggcccggcaggttcaggcagttgatgttttgggccagcttgcggttcatcgcctcatagatggcccagcgggatagctgctttagactgcgcggccgacggtagagggacgagatcagggctattagctgctccgtcttcttactgggcacctgtgccacgtaaaagttgtgtagggacttgaggcaattaaagagcggctcgtggtgcatagtcaggtagaagaggtgaatgacgcgtgtatacgtcgcgttcggatcgttcaagatgaactccttcttcgtgatcaggatgatgtagtagaaaagcaggtagcacgagttggtgcgaaacgaactgcgaaaagttgccagctcgttggagaagatggcggtgccgggcgttgtctttccgctgagcactatgttggggtcagccccgtactggattagcgtcagagtcaactcgtagacgcactccatgtcgtggcaggtgcgcacattatgcaccatgtccatcaccgcctgcagaatgtgctgatatgtcttattgcagtccaggccgtgctgaagtagcatcagtaggatgttcttgatgaagtcgaagttggtgcgcttttgagcatcacaattaagcgtaaagttttcgctaaccgtaaacacgagcacgtgcagtggtttaaggttggcgcggtaggagcaattgggattcgctccgtgctgcagcagcatgcggatgcagttcagatagcagacctgaaacaagggattagcttttgcgcaaataaaatggaatgtacgagacagaccttcatggagtgcgtgaaatgatgcaggtgatccttattaattaatggcactagcagaaccataatgggcacagatccatctctccccacgatgttggggtctcctgaaaaatgaggcattgtgtaaactgacaaaacataactgatttaccaaccattctccttgataagcatgcttagcagttcgtagcagacttcccagtctcgcaggtgtcgaaacacacaggccatggcactgttccccgcttggttaatcgattgcttggccccgttctgcaggagaaatcgcactaggtgcaacacatcccacttgctccacttgtcgtagccgtaccgggcttcctcaagggcatagcgcactatcagggcgtgcagtggagtgtttcccaacgagtctggtgcgttgattagctctttgcatcctcgttccagcaggatgcgaagagtggccaacgtgtcttcagcagacttacgagcagcaaaaataactgaaaataatagccatggttattacaacatctgcatcagaatctctctcttcagggaatacgaactcacccacatgcagtagggtcatttgttgggtgcaggtgcgtacagttgtaattgcaccctgatgaatgagtagctcaagaaagcgaccatcatgaagcacggcatggtgaatcgggtaatactcgtccataataagattgatttcctccgaacgggtgaccactagttgctggacgcaattccaggcgccgcgttcgcaggccaagtggagcaggggctttttcacgcggaaggggatccacggctcctccattttttgggtgagcaagcttagaacattgtactgatctccgtcgattgcatagaagagcgcgttctgtagctttgtgtttagccgctcgctgacatcgtccacgttgttgtgccatttgccgctctcctcgcaatttctcgtgtgggcgccaggaaaacacatccgagtgtccacgtcgatacgtgcgccatgccgaagcaataactccacgcactcctcgtagccacgcagggtggcgatgtgcaggggcagggagcagggcgagcggttaacgtccgggcggtggcgatgcagcagccacttagtgagatcgatgtggttgaggccgacgctgcgctgcaggatgttgtatccatagtcgtcatgcatggccaggatattctcgttctttgggatctggatgagcaggctctcgagggtctgcagggaaaccttcggattggcgcgcaggatgtcaaacagtgtctgtatggtctcctcggtggccttggacagctttccgtcgcgatgcgagaggagtgcggatccggatcggaacacctggctcacggagccgcccattgctctggcttctccctttacggccgtctaacactgcacagtcatgctagtatctcctgcgacgcagtttccggggaagatcgctagacggcgaagtgcgtatcacttccgaaaccgtaaaaatcaatacgagccctgaagaaccgcccagatcagcactgaacgacggctggaaggagaaaggctgctccgatggcttcagtcacagaatcccacatccctgtggcgcgttttcaggctagattcagcgcatccgggcatttcaaatttaccacaatcaaaaaaaaactttgggattaaataaagtatattatagtatagggtttcagaggccctatcggcaatcgatatcagttggttgaacttggtatcgttagtcgataggaggatatcaattttgtataaaagcgcgtttatttaaacttaaagtaaaatgcgtaaatgggcatacatttgcaccaccttattcaggagcaaaaaagcaatgaacgcgatttttttccataaaataagttataggctttgcacatacttttcgatttgtgcaatccagctgtacccaatgttaaggcttatcggctatcgattcgaattgaatgtacagtgaatactggaacttagttactataaatgtcaatattaaatataaaaaattattaataataaaatattaacaaaaaaaaatacttcttattcaaaagcgaatacttcttatgttaccaagccaaaaaaactttggttttcctaagaaattttccctaacattaccaacgtgattgaagaaaaactgtttgccttagcctctcctctctgtaacaaattggcgctcaaaagtaaacgagcgtcttggaatataacttagtttgctcctaaaaatatcgacggaatcatgaccaaccgcctggagaccaaatacgagaacctgagcagcattttccggctaaagggacatgactaccaaaagcagttcttccatctgtatgcccaccgcctggccgagatgacgcgtctcctaacgccgctggcccagaagaagtggggcaacaaggagcccatcaaaaaactgtgtgagctgcggggtgaacaggacgtgcactgcatcctgatcggcaccatttttaagcaccaggctcacaagcccagtatcctccgggacatttctgaggagaatcagttagcgccacagccgccaagacagaactactcggatccggaggacaagattgttctggaggatgaactgcagcgggttcgacttcagggcaagctaaatggacagctcttagccactggagttgtgtgcgctgccctcggtggaacagacag

SEQ ID NO: 33167 - DNA, 2342 bp, DROSOPHILA
aaaccctatactataatatactttatttaatcccaaagtttttttttgattgtggtaaatttgaaatgcccggatgcgctgaatctagcctgaaaacgcgccacagggatgtgggattctgtgactgaagccatcggagcagcctttctccttccagccgtcgttcagtgctgatctgggcggttcttcagggctcgtattgatttttacggtttcggaagtgatacgcacttcgccgtctagcgatcttccccggaaactgcgtcgcaggagatactagcatgactgtgcagtgttagacggccgtaaagggagaagccagagcaatgggcggctccgtgagccaggtgttccgatccggatccgcactcctctcgcatcgcgacggaaagctgtccaaggccaccgaggagaccatacagacactgtttgacatcctgcgcgccaatccgaaggtttccctgcagaccctcgagagcctgctcatccagatcccaaagaacgagaatatcctggccatgcatgacgactatggatacaacatcctgcagcgcagcgtcggcctcaaccacatcgatctcactaagtggctgctgcatcgccaccgcccggacgttaaccgctcgccctgctccctgcccctgcacatcgccaccctgcgtggctacgaggagtgcgtggagttattgcttcggcatggcgcacgtatcgacgtggacactcggatgtgttttcctggcgcccacacgagaaattgcgaggagagcggcaaatggcacaacaacgtggacgatgtcagcgagcggctaaacacaaagctacagaacgcgctcttctatgcaatcgacggagatcagtacaatgttctaagcttgctcacccaaaaaatggaggagccgtggatccccttccgcgtgaaaaagcccctgctccacttggcctgcgaacgcggcgcctggaattgcgtccagcaactagtggtcacccgttcggaggaaatcaatcttattatggacgagtattacccgattcaccatgccgtgcttcatgatggtcgctttcttgagctactcattcatcagggtgcaattacaactgtacgcacctgcacccaacaaatgaccctactgcatgtggttatttttgctgctcgtaagtctgctgaagacacgttggccactcttcgcatcctgctggaacgaggatgcaaagagctaatcaacgcaccagactcgttgggaaacactccactgcacgccctgatagtgcgctatgcccttgaggaagcccggtacggctacgacaagtggagcaagtgggatgtgttgcacctagtgcgatttctcctgcagaacggggccaagcaatcgattaaccaagcggggaacagtgccatggcctgtgtgtttcgacacctgcgagactgggaagtctgctacgaactgctaagcatgcttatcaaggagaatggagaccccaacatcgtggggagagatggatctgtgcccattatggttctgctagtgccattaattaataaggatcacctgcatcatttcacgcactccatgaaggtctgctatctgaactgcatccgcatgctgctgcagcacggagcgaatcccaattgctcctaccgcgccaaccttaaaccactgcacgtgctcgtgtttacggttagcgaaaactttacgcttaattgtgatgctcaaaagcgcaccaacttcgacttcatcaagaacatcctactgatgctacttcagcacggcctggactgcaataagacatatcagcacattctgcaggcggtgatggacatggtgcataatgtgcgcacctgccacgacatggagtgcgtctacgagttgactctgacgctaatccagtacggggctgaccccaacatagtgctcagcggaaagacaacgcccggcaccgccatcttctccaacgagctggcaacttttcgcagttcgtttcgcaccaactcgtgctacctgcttttctactacatcatcctgatcacgaagaaggagttcatcttgaacgatccgaacgcgacgtatacacgcgtcattcacctcttctacctgactatgcaccacgagccgctctttaattgcctcaagtccctacacaacttttacgtggcacaggtgcccagtaagaagacggagcagctaatagccctgatctcgtccctctaccgtcggccgcgcagtctaaagcagctatcccgctgggccatctatgaggcgatgaaccgcaagctggcccaaaacatcaactgcctgaacctgccgggcccgctcaaagactacgtgctgcagttcgagaggtag

SEQ ID NO: 33168 - protein, 671 aa, DROSOPHILA
MGGSVSQVFRSGSALLSHRDGKLSKATEETIQTLFDILRANPKVSLQTLESLLIQIPKNENILAMHDDYGYNILQRSVGLNHIDLTKWLLHRHRPDVNRSPCSLPLHIATLRGYEECVELLLRHGARIDVDTRMCFPGAHTRNCEESGKWHNNVDDVSERLNTKLQNALFYAIDGDQYNVLSLLTQKMEEPWIPFRVKKPLLHLACERGAWNCVQQLVVTRSEEINLIMDEYYPIHHAVLHDGRFLELLIHQGAITTVRTCTQQMTLLHVVIFAARKSAEDTLATLRILLERGCKELINAPDSLGNTPLHALIVRYALEEARYGYDKWSKWDVLHLVRFLLQNGAKQSINQAGNSAMACVFRHLRDWEVCYELLSMLIKENGDPNIVGRDGSVPIMVLLVPLINKDHLHHFTHSMKVCYLNCIRMLLQHGANPNCSYRANLKPLHVLVFTVSENFTLNCDAQKRTNFDFIKNILLMLLQHGLDCNKTYQHILQAVMDMVHNVRTCHDMECVYELTLTLIQYGADPNIVLSGKTTPGTAIFSNELATFRSSFRTNSCYLLFYYIILITKKEFILNDPNATYTRVIHLFYLTMHHEPLFNCLKSLHNFYVAQVPSKKTEQLIALISSLYRRPRSLKQLSRWAIYEAMNRKLAQNINCLNLPGPLKDYVLQFER

SEQ ID NO: 33169 - DNA, 2782 bp, DROSOPHILA
acagttgagagagcaattccgcttacccaacgaggatggcgcctaaattgccttttaattgctcgcgggggtcagcaaaagggcaagccggacaaggtgagctgtcaaacggattaacggacccaccactgattggcgctttcttgaacgactttttgtagccgcaggcactcaaaactgggcacaaaaagcagtgccaacaaaacatacggcaattagccgttgcaattagcggtgtcgttgaacggcggcggcttctgggccatcatttaagctgatcagtgatcacagagcggcgtcttaagaccctgaccacggaacgtcagcgacagcaatggaaacaatataattagctcgaattgctaacaaaaacacaatcattcttctgctgcagccaaaaatatttgatttatgcccggctcccgattttgtataggtgtcgttaacccagtttcggtttgtcgacgggtttagtcaaccatatatagagacggttaatttattataattaagcatgaaatacatatttggctgcttgaagagtgagctagcatcggtagtagctgattcgctaagtgtttaatttaataccgtttttcctttggttcaaacaattactcaagctaaaagacctcaagattggtatgcagataatggggatgataagggcagccataaatttctttgaacaaaagcttctacaatagttgtttgtttgtctccgaaaacaaaagggatataattttattcattcattccgcttggcttaaattatagccccaaaatatttacattttaagtctaataaaattgttcgtttacattttatggtgccctcccgaaatcaatttaaatttcaaataagaaattcatttaacaagtcagcgaagtcattgaaagacaattaaacattttgcaatttacggctgcgtaaaacaaggcaaataattcgcttgtcgcttttttgctttaactggccggttttacgccgctggacgccttaaatcacaaatgccacaggctcggctattgccagagcccggattggttgcctgctccggaattccagcgtctggtgcacccgactgttcccggttcgctgctcaacaacggccttgaatccccggttggctcctcgcacctcgtagtgcacactgcgaatgtgtccactgggctccaggtgggagtacgatccggaaacgtagtcaccatggcgctgctctcggtgcaggatgtgcacccgactggccacgtcggagatgtggtactgatgcgagtagtggagctgggaataagacagatgctatgttattctccgatccgtgtcacttaaaagttgtgtcattacagtaaacgatatttgttatacagaaaaacaatgtttgcagtgctaattattatatttatcaggtctgatgagttggtagataaacacacaaggcaataaataaatcggctgaaagtgcaaattaaacaagtagactgaaaaggtgcatatcagttgtggatttcttagatattcattttaagtttattaaatacatcaaaaaaggagcattttgtattactgtgttagttgactaccataaagcttttattaaacacaattcattgtgaaacaggcgccagactcaccctttcctcgtcatgatttctgccgtaatcgctgtaaaactcgatgtgcccagccggaccacgctgcgtatgcgcaatatgcagcagacagaggaccacgaagctgaatccccatccatatgccatgctgaccggacacgtgggcatgagttgctgccgaaattaatttgattagaaacataacgaagtggccgagatgagggggcgcccagtgctgaccggagattggccccggaggagtggtcggggtgaaaatcatttgcactttgctgttacggcagcagttgaaagctcggagcagccacttcctagcggctggagcgatgctgattacatagtcacgttgttaactacatcttcacggtgcacagcagccaaaaacgctggtgtggattagacggtggaccggtggaccggtggtgcatgccacaagttgggcaatcaaagcgaatcaaagaccagcatctttcacacttcgttaggggcaagagacttagtcaaggcaatttagtgtcaaaaagcgagcagtcgataaagacaaaggcccctaacccatggcaatatgcacattatggatcttggcgatctccgacggttggctaacatgccctaacgtgactggccgcccgattggattgctctgacccagagcaggcacctgaacccttttggtgccccaacaccccgatccatgggcttggctttgtcttcgaggcgattgccgtttatgagccgcgagtggcaactttctttctcttgcatcatgatggctaactatttctcatttttggctgtttgaggcacgtttcgctggcaatgcaaagatttgaacagcaggtgacggcatcgccatcgcctctgcccagttttgttcctggtcttcccactcggatgctcggttcataaaaaccaatgcccttttgattggttacagctgtaattgcccttaggtctttgtgaaaggctgccaagccgtagccgccaatcaccggtaaaaaaattaagcacaaaagttccaagaagaatgtttttagttttcttacaatattagtaacaaagggtgcttaaaaaaaagtagtagtattgaaaacataatttatgcgtattgttaatgtaatccgttatatgacttacgcttcatcacttg

SEQ ID NO: 33170 - DNA, 432 bp, DROSOPHILA
atgcccacgtgtccggtcagcatggcatatggatggggattcagcttcgtggtcctctgtctgctgcatattgcgcatacgcagcgtggtccggctgggcacatcgagttttacagcgattacggcagaaatcatgacgaggaaaggctccactactcgcatcagtaccacatctccgacgtggccagtcgggtgcacatcctgcaccgagagcagcgccatggtgactacgtttccggatcgtactcccacctggagcccagtggacacattcgcagtgtgcactacgaggtgcgaggagccaaccggggattcaaggccgttgttgagcagcgaaccgggaacagtcgggtgcaccagacgctggaattccggagcaggcaaccaatccgggctctggcaatagccgagcctgtggcatttgtgatttaa

SEQ ID NO: 33171 - protein, 143 aa, DROSOPHILA
MPTCPVSMAYGWGFSFVVLCLLHIAHTQRGPAGHIEFYSDYGRNHDEERLHYSHQYHISDVASRVHILHREQRHGDYVSGSYSHLEPSGHIRSVHYEVRGANRGFKAVVEQRTGNSRVHQTLEFRSRQPIRALAIAEPVAFVI

SEQ ID NO: 33172 - DNA, 4122 bp, DROSOPHILA
tttatgactgaagtggataacatttcattcagcgtgcaaaagttgattcaactttttgatcttgcaaaacgcagccccataagtatgcagagaaaatcgagactttggtagaacaagcttagtgaattttcaactcatgagttagacgatttttgcaagccaaacttttggtaaaataaaagctctttcttatcatattcagctttttcagcccgttcgccgggtcagccaaagtcaccggaagacaagtttttgaggcacccaattaaatcagcgaaatgggccatgtaaacaaacaaagaaaatgggaccaaaaaacaacttatgtaagttggagttacaaatttgcagaccgtgaaaatgtctggtttttgttggaagaaaaccttaacggaaacgggccacttcgaatattgaatggcaatatatttgcgataatgaaatgcaaagcttttggagcgttcaatttgccatgagacacatcgattgtagcttttccaaatgggtacagcaaacttaattaatggtttgctaagtgcaaattataaagcccacacggaaggcggaatcttgtagatgcatattaattattgtaagtcatctgctcattacaaaagagaagagaaccacaatgagttctaatacaatcattatggatttgtcaatgcaaaaaaaatatatctcttcattttaatatccacaacactaaacaaataaatttttttcaggcatagtatataaattattttttaatttgtcaaagatatctcataggccaaagaaaacgttataaacttttgttcttccacttgaattttttttcgaatctttattttacaaatttgttgcataacttaaataagattaaccttgatgtttcccttttgtagatctcaaaattccttcgcaagctacactgagagaatccaatgaagttccaggtggaggcgtacagctaagcgggcttaagtaactaagaagtgggagctcggagtccgtcctagtagtggcccgcatagggactcgcatagtggccgtagtggccgctgtactgatcatactgtgggatgtactcgtactgctggccctggttgtagtagccatcatcgtagtcgtagtgaatgggtgcagctgccgccggagcatagtgcttggccacttgaagatcgaataaatatagagagtttagcttttgcaagggggagactgacttaaatttatttcgctctgttgtaataatgaccgacaaaaaactaaactgtggtaacagctgttaaccgtttgccattgttggcaagtagctcaactggccaaaataaatacgctaacaattcaatgctgaccaaggcattttctatggccatttctttgcccccttgcaaataaattatttgtgcacgaatttgtcagtcaattggtcacaggtgttgttttcgttttgttttggtttgttttctgtgcttgatttttttttttttcattttatgtttgtcgccgttttgtatgcaagcaagttcgttgcctaagtcttttgttttggctgctgatttcttttgctgtgcgttttgctgataattctcaattaaaactgcaccgcagcacccacaacaattatgaattttcacatgagtatgcaaccatgtattcatttcccaggcccaaagcgttgcgacattgagaaaattatgctaaagtcttgtgaagcaaggggagaagggaaatggccgaataagaaacggcaattttcgtgaaaaatatgctgcggtggctgttgttattttgttgttgttgtttttgaagatgatgcacctgacataatctgtgtgggaaattcgagacggaaagtgcataaacaaagctagatcttagactccgatcggagcagagtgaggtaacccactaaggaggcgtgtcggcggattagtcaaccatatgatgttacacatttccagcccagttttacagcccatgattcagtttagctgcttgactggccatgtatgtgagactaattgcaatttattgaataaaattgccaatgcaactgccacccatgctaaaaatgagatgagattacaatggaattatggtaagttattcagacagttcagaacgttcagtaggctgcatagtaatcagcgtcaaagccaagatcatcatcaccatcatggccgtagtcgtcttcgtctgggcgcaatttgcgatactgattgttcagatagttggcatgccgcctgaacagctttagcatgcgatatgtgttcatgcctgaaaaagcgagcagagaacacgtggagatgggtgggcggaaccccaagaaaaatgactatgaaggagtggggggaaaaagaagaggtgccaccagaggtgaaggccaactataaaggtgctgctaatccgttctctaaagtctttagtctatatcctgtcccaaaagttattcttcactcaccataaggcgccggggaggccaccaccagaggagcgtgggccactggagccacgtgcttcactacctgcggctcgtagtgggtcaggacgggcttgtgggccacaatgggactggccaccacagcctgggcgtgcacagtgggtcccgacttggtcaccacggcattgaagccgtgaatggagtccgccgtgtagtccacagtgcgaatggagccatcgggctcaaccagagagtactgacctgtggataaaaatatagaaatgcccagtctttggataatctacttagatccacttacccttgaccacatctccatctcgcgtctcgtgctgtgacttcacatctcctgtactgtggtcagccacaccgtagttaaaggcatattttggatgatcctgtttaaggaatataaagcaaaaggatttagattaaacattcggattatgaatctctgtatttcaattatacgagagcagtggtatctttgaaatctattactttttttaatatttcataaaacgtttttagcactcttttatggttttcaacacgaatatatatatcacacttcaaaactcacatagtaatccagggcatatcccggtcgcgccacagcaacactggcgaagagagccaacgaaaggataacgaagcacacgaagtttgccattttgtatttgggttttatatttatagcttcaaatgaatttgaaacgaggaaaatatttgctagaaataaacacaaaacagatcgtatccgttaaagaaacaccgcactgcgttggggatattaacttaggtttttcaggagatttacttggagtatttcaacggcactagatacaaacaccaccaagttgcccggaatactgtggcgattctaaaagcaagtttccattaaataagcgcgaaatgtgcgaaagtcgcgagcagcgcagcagacgccggcagaatcgccggcagtgacgtcggcagagagcaggcacaatgccaagactcttggtttctcagtcattcggctgtggcgaatggtgatcggtgatccagtctggtgagccactcttcgccgggcgtctcaaagtgccaagtagatgcccggccatgtgaatgaagttgcagcacggatccatggtatgttgccaaacgcagccgggttccattgaatctaacgaatccaacgaatccaacgaatccgctgaatgggatggcgttgtcttgggttttgttggtcgatctgcgacacatttctcaaatccgttgccaatccgccagcgattgtcaatgaagtcatctggaacaatcacttcttttcagcccagaattatgcgagattaatcattggacttaatcattaatttccttgatttctgcaagaaatgattgtggccaatttaactaacaacttaatgccaaaacctagagcgaaatcgaaataaatcgctgacaagaaccgacaaaatgtaaatcaaacacaaatcgggtcaagttgcaattgcagcacaataaggccctagttattcggcacatgcgaaattctcagtgatctacttcaatgacagtggttaggacaaggtactagtactaccaatagtaacagacactatggccactgcacccgctttggtcttttgtcttttgtcggctaactgcaacttgaaggtcaagcgcat

SEQ ID NO: 33173 - DNA, 690 bp, DROSOPHILA
atggcaaacttcgtgtgcttcgttatcctttcgttggctctcttcgccagtgttgctgtggcgcgaccgggatatgccctggattactatgatcatccaaaatatgcctttaactacggtgtggctgaccacagtacaggagatgtgaagtcacagcacgagacgcgagatggagatgtggtcaagggtcagtactctctggttgagcccgatggctccattcgcactgtggactacacggcggactccattcacggcttcaatgccgtggtgaccaagtcgggacccactgtgcacgcccaggctgtggtggccagtcccattgtggcccacaagcccgtcctgacccactacgagccgcaggtagtgaagcacgtggctccagtggcccacgctcctctggtggtggcctccccggcgccttatggcatgaacacatatcgcatgctaaagctgttcaggcggcatgccaactatctgaacaatcagtatcgcaaattgcgcccagacgaagacgactacggccatgatgtggccaagcactatgctccggcggcagctgcacccattcactacgactacgatgatggctactacaaccagggccagcagtacgagtacatcccacagtatgatcagtacagcggccactacggccactatgcgagtccctatgcgggccactactag

SEQ ID NO: 33174 - protein, 229 aa, DROSOPHILA
MANFVCFVILSLALFASVAVARPGYALDYYDHPKYAFNYGVADHSTGDVKSQHETRDGDVVKGQYSLVEPDGSIRTVDYTADSIHGFNAVVTKSGPTVHAQAVVASPIVAHKPVLTHYEPQVVKHVAPVAHAPLVVASPAPYGMNTYRMLKLFRRHANYLNNQYRKLRPDEDDYGHDVAKHYAPAAAAPIHYDYDDGYYNQGQQYEYIPQYDQYSGHYGHYASPYAGHY

SEQ ID NO: 33175 - DNA, 2893 bp, DROSOPHILA
ccatatgcaaatctatatacaattagcgtcgaaagggggcgtacttcgaaaacaatcaagtggtctaaatacaggtattggcacactttaataagctttttatagttctttgtgggtcgtgcggactgtcattaaaaatcttatagatcaattaaataagatctaagtccgttagctttagaaaggaaaagtacgctgctcagttgtctgtaatgttgttttactaaaattaaatttaatgtaccataattgagcaatatttaaaacataatttttaatagaactgtcaaccaaaggtaatttttacttcctaacccgttttacttggtcaaataaatgtggcataaaaaaccctaaaagctagctaaataaattaccataatagcttccccgtccaagaaatcgttgaatactttaggggctcatgcgatttgctaatcaggaactaaccaaagtactggcaaaagcatttagtggacctcctttgggtccttgaataccataaacatataacatttattcaggaaacttagccacatatcatcaattttgtatgttgtttgttttgttttcaataaatatttttcagtagtatgtattttgggcttaatatctagcaacattttgttggttatcataatttaatgtatttcgaatacaacaagaatcatagataatatttatatattagaactaatatggaaatacttcggtgtgtgcgtgtgtgtgaatgtcggtgtgcagagagcgggtatcagatgtgtgtcagtgtgtgtaagtcgagacattatgtataagtacaatgtaatcgtagtttctaactaaattcctcgcgggtttggtaactaaattagaacggtagacaatacttggcatttgaactttcgtccaacgtttttctttttgtgacaatgcaaattctttgatttttggaaagggtttatttgactttggtttgtttggcttatttggcattgcggatctacagcatttggtttcttcagtaggaattgaagccagcgttgcgtttgcgtcccatgttgcagatcttgaagtggcaaggcgacatatctggagaaatacgaatggttagtacacattctctgggctgaagctatgagttcatgccacacttacattgtttacgaactaatggggtcggaaattaaacacatggaaataaaacgagccaaaaacataaattagtcaatcaatcatgccacacttaaggatcacatcaattttgttatgcggataatagtgggagaaatatcttcttaaagttacaatttaagtatcttaatcactactcacactgaacgttcttcttggtgttgtgatccttgaggggatgtcctggcatcaccttcttgctgggcatattggtcagttcgttaacgacgttgtaccgcagctcctcgccgcctccattatcgccgagcctgtgcagtcgagccagcaggcgggaactgggcgccacctgctcctcgctctcctgggtaaccccgaagtcatcgtagtccacggtgagcaacagatccctcagcgagggccacttcctggcgaaagccggcacccgctgctgcttctgttcctgctgttgctgttgctgttgctggtacttctgcggattggaagtgtggacacatggctaagttttcctcgcacattgacacactaccatgtagggtggcctgctcttaccaactggtcgccgtagtagttgttatcatcgtttccgccccccaagagctcgctgaacaacaactgcgtgttgcgcgctggacgggccatggcgtctcccggtccaatcgccactgacaggagcacaatgacaatggcccagtggacaggcgagcagccacatgtggtgggcgcggacagggcggacatcctcaactgcggagaatcaaaagtcaatcaaaacattaagggggtcacttcggtggctcgaggtgtagatattgctatagcccttagctttaatgccagtcctcaagtttaaacgaaattctaaaatatgtagatactaacaattctaggctcgaataattaggcaacacatgccacaggcacccctactccactttcaggaccttccaggaccctcgagtgcttacgcaaagggtttcctattacaaacaacacaaggtggcaaaaacaaagcgaattgtggctgaggctgggcaaaaatgcgtgaatgctccgtttcgaggggtttcggcccactcgtactttaaataagtcacgttgcagttggccaacaagttggcctgctcaatggaatcggggccgtgttccagttaaaagttttggctttcttttgatgccagttcacggattcaggtcacattgcagtatcatcacttgatgtgcggcggacacgggtcatcagtgggattgggaaggcgatggctatgccctcgtaattgacatttatgaaatattaatgcctaattaagcttcagcccggaaagcgggagtgaccggaatgctaaaggtaagcggcgggctcattatcaaataaggattgagttcatttcggggaggatggtcgctgacttttaaaaatggccagtcatttggggtggttagcaaatgaatgaatggtgcgtcagatgggtggctcgattatgagcagaagaggcagctaagttaaactaatagaagttaaaacaagttggaaagcaaattaagaatgacctttaaaagcggtctattgtaagctattgtaagtatgctgctgcaaatattcagctatgctttttttcaattggacaaattgcgttaaattggcgtttatttggagttataaaagtatatcaaaagcaccttatctggcttcttagtagcattattgccctaaccgcaccatctttcacttaattcgctg

SEQ ID NO: 33176 - DNA, 570 bp, DROSOPHILA
atgtccgccctgtccgcgcccaccacatgtggctgctcgcctgtccactgggccattgtcattgtgctcctgtcagtggcgattggaccgggagacgccatggcccgtccagcgcgcaacacgcagttgttgttcagcgagctcttggggggcggaaacgatgataacaactactacggcgaccagttgaagtaccagcaacagcaacagcaacagcaggaacagaagcagcagcgggtgccggctttcgccaggaagtggccctcgctgagggatctgttgctcaccgtggactacgatgacttcggggttacccaggagagcgaggagcaggtggcgcccagttcccgcctgctggctcgactgcacaggctcggcgataatggaggcggcgaggagctgcggtacaacgtcgttaacgaactgaccaatatgcccagcaagaaggtgatgccaggacatcccctcaaggatcacaacaccaagaagaacgttcagtatatgtcgccttgccacttcaagatctgcaacatgggacgcaaacgcaacgctggcttcaattcctactga

SEQ ID NO: 33177 - protein, 189 aa, DROSOPHILA
MSALSAPTTCGCSPVHWAIVIVLLSVAIGPGDAMARPARNTQLLFSELLGGGNDDNNYYGDQLKYQQQQQQQQEQKQQRVPAFARKWPSLRDLLLTVDYDDFGVTQESEEQVAPSSRLLARLHRLGDNGGGEELRYNVVNELTNMPSKKVMPGHPLKDHNTKKNVQYMSPCHFKICNMGRKRNAGFNSY

SEQ ID NO: 33178 - DNA, 8336 bp, DROSOPHILA
ttcttcggtgatgttctgcgtctgcttcaggaattctattttctttttgctagtgagaaaatacacggcatccgagcaaaacactgagatggtgtccgtcagctcgtagcccagcagccagagctgcagggccatggacttggagtacatgacatcctcttcgacgcccacgatgctcatgatgcagtccagattcctgagcgcgtcatcgtgtccgatgctgggagcctgcgaaagacaaagagtccgatattattatgcagtaatcctcttttccccaaacaacctggtctatgggtaattaatttcaccacatctcccaatctttcattatcgtgacccgtctgcagagtctccacgtgctccccggtgctcctgcggccccaaaaacacgcagatcgccgaccggcggacagactcaccctccattccgtgtagaggcgtttcacgcggcgcacgaacgcctccttgtccagcacaaagctcgacatattgccgccggatttgttactgtgtatgcgttaactccgcttaaaatgcgctaaacgccagaaattgcatttgcaaattccgccggataaaaaaattgcgcggcgaccagatgaagaagaagcagaataagcgtcagctcgacgtgagtgagaccgctctcaaaaataccgtaatataccagttgtcaatgtaaaaatagtgtaaccaagcaacagtacagacacgtctagcagggactcgaaccatatatgaacattttacgcgctaaaaattggtgcactgaaaaaaatgtttaaaactggatttaattaaaaatgtgtctcgccaaaaatacatttttacattaaataaaagactttggcacaggcttcgtttaaatatagctaattttattattgttttcttcagtattatcaacatttgcaattacgtactgtgacggctaatatgtgagttcgttgaacttgattcattggtttttagcaaagtctaagaattcagagctagtttaattctttgtgcccgccggactttcggcctcatccggccgggcaacctgcagatactcctggatatcgtagtcgaacagctcgaagtcgtatctgtggggaggaattttaacttgtaagtatgctaccataatctaaaaatttaaatggatgacccacttgtaatactcgtagagctccagcatttcctggcgtgtcagctgcgcatagaactgctgctggagctcgtgcgtcttgcggcccttgcccatgttgcgccacacgggcgctatcacccgcttgaggccagtcttttcgattagatataattgatcctccgccagcgattcgaacttcagtatcatgtcgaaccggatgaggcagggtgtgcagaacgaggtggccgccacgaagtgcatgtcgatgaagctgccgcgcttcacctggtcgagcagccagtgcacgaattccggaaacgatgggaactttgtgttggccgcacgggcagccagtgacggctattggataaaatacaatgtattagatgcattcgatgcgtatacttgatattgctattgcaacaatatcgtgtatacgcagtgggttacagtcgaaatgcttaccttcttgcggtagttgcgcacaatgctgcgtcccaacttatcgtggaaggagtagggcagggcgaacaccatcttgtcccgataggcactcaacagccgctcgaagggatcgcgtgcgatgataaaggtcaccgagtagttctgtgcctcacgcagctgtcgcccgaaatagaaagagtttaatttaggtttgaggaaggggattaagaactcctttcgagacgcacctcgtcgagggtcaccctgggatagcgctccctggccaggttgagaaggatcttcttggttttgcgcagatagctgggcgagtaaccggccaggacgttgaagttgaacatccaggacgatgaggcagccttaaagacattgcacctgcacggaaaataaatagtaagttaagatcctatttgtcaaatccgaatgacacactaaaatggaatcgttgaagagtgaataaagggcacacccaccagataatgtgatactttttgttgaccaaaaattcccacgtgttcggcgtgtgccacgcgtcgtgacctgtaaataaaacacaagcgatcagaccccaatccatttggcgaatccaaagcgaaggacccacccaggacatccaggccgtaggcggagcacttgtcctttagccgctccctgcgctggtccatccgctgctccacctggagcatttcctgcggcgtgagtgtctgcacggcatgctcggggatgaggggcaggagtgtctggttgctgtcctgtttggagggcaaatatgcgaaaggtgagccacagtgagtccagtacatgggtttctcgaccggaatggggctagagaatggggggtggggtgcccaaatgcctgccaatgcgactcgctaatgcgcaatcaatttggctatctgaattttatttagccgctctgtttacatcattaattatacgagcctgtgacttgaagtgtttgttgtgtgtggtgttgggtgtgtgtggcagttttgttgcgtatgtgcttgtgtatgtttttgttacatggtgtatggtgtatggtgtttgtgcgggttacatatttactttatcaacatagcgccacttgttcttggtcttgcccgttgccacgacggtcaggtccttgttcttgttcttgttcagcagcagcaccggataccggaccaccggatacggaaactggccatgttgctgcggctgctgctgctgctcctgctgttgctgctgcggctgcggctgctgcggcgattgctgctgcacattaaaggcctagaaaatcagttgcagttgcgtttgtggatgaggattttggctggtctgggttgttcgctatttgggttaaaaggcaggcggggttggcatggcgtggcgtatgcgcaatgtacaagcatttcggtcaaggtccaaggtcgccgcccccacgagcattacacattcctcattttacatttcacatgccgagtgaatctcaatctcaatcccaattaaaagccccagacgccagtgtcaactgtcatctggaaaatggccacatgaatcaagtggctgcggctactctgcggataagttggcgtcatcgtggcaggcactttgcatttgactcgcgtatccacttggccacaccgccccatgtgacacactacatatatgtacatgtggcgagtatacccttggcggggggcggggacttccacttagggattgggcggaaaaactcactggtacatgaatgccgggctcagataagattgattaatggtcgtgtggctgggcactggggctgaataatgaatgcgatacttctgcaaatgtttgggctcttttgatgacttgtctaaatatttgtcgaaatgctttcaccctaattgtttggcgcaatttccatatcgattaatatacttgctaatttttagaatttttaaattgaaaaaggaatgattgagaaggaactactctggtaacttgtattattaatttagatagcaatatctaatagcaagagtatttaataatccattagtacaatgaattcctacttaagtggcgctagtagcagcaaaatggtatgcaactgagaaattgggaatgtttgaattgtagactcaattagggtgaacctatggtagtcaggggcttctagagtggacatacgtgtgccgtcagagaaaaatggtacaatagtttagctggaaaacagcacgtcgtatgcgtgtcttaatgtgctttggtttttctggttctgaatgagcatgtgtcatttggctaatgctatgcaaattagcagtgggcaagcgcatattgattgaggtgccagccagtcagccagccgtgaatcgatatcctgcccccccccctcgatgatgactttttcacgatgccacacgcaattaagtgtaatttgtgcgaaacttttcctttttcgcaagccatttgcccaaggccaatggacgatggacgatgggcgccgaagagtctctgatgaccacgccacgaaacttgcaaagttttccacactcgcaaaacttaaagctgttgccaaagattaaatgcaaatattgatattatttggtcttaaagtctccggacttaagtaaaacttctgatgttaatctctgtgactctgtcttctaacttttttgaaaagtgctgaaaagtatgctactcctttggagtatccctagcaacttgcctccttatagtttatataacatattaagctatgaatcaacaattaatggcttataagatccattaaaatttgtatagtttgtatagtttctctctgtgtaagcggcttaggccacgccaaagggttgtgcgggccaaaagaggcgtgtccaaaagggcggtcggccagcttatgtgattataagccaagaacgctttccgtccgtccacgtccgcattcgattgtgtgtgtgtgtgtgtgtgagtgtggaatattccgcctttgtatggcatttgctcaatttcaagcacaaatgggcgataaagccagccaaagcccgccgctaatttcaaattaattcgcacccaatcaagcgcacacataatacccaagcaagccagttcaaatagtgcagtccagttctggagatcccagctagaattcccaagtgcgagagggagcgaaacaaaggaaaaatcactaagcaacttggataaataaatagcggctagatggcatgcgatcgttgctatttatcgtgtatttatggcgatcgctgctaatttgcgtgtaacattttgttctcggctcttgccaaacgcccttcacaccagattgtttattgtattagatgattgccccgattgccggctgattagtttgttgtttcggtgcgcattaaatggcaattcatattaattgcttttttctgctcgtttctggttttttttaaccacctcctccgatggctcgaaaaactgagaaaccgagtcgagcaatcgatggcctgcactgtgtttgttgtcaggcgatgaaagggggcggacggggcggcaactacaagcgagtgtgtctacaggcaggtgcactgagagaaagctatagtggtttattttttaaaaagctgcctgaaaagttaacagcacacgtagttctcaattcaaaagagtctctatttcaattataaatcaattgcagatcttgactggtctttctctcagtgcactggcataagcgcttggttcagcagatgtttgccgggcgggcactcaaagggctacgaatggcaaatgggttttggggcgtctgtgactactgcaccctgcacccactgccactcccaggtggcacttcggcattgtggcaccgtggcacttcgcctgcactcacctcgaatcctcggatcttctgcagctgctcgttccacaccaggtaggccagggagaggggcaggagcagcagggacacggccgtgaagatgagcaaatagcgccggatggcgcgacagtttgccaggctcttgctcaatttcatttaaactcgaatatagctgcataggaactggtgcggactctcccctgcggctccccttggctcttggctttcggcttcctggttgactccaagtgcttctggtctctggtctctgggttctgggttcgattcggttcggttctggattggcggctattgatagtcgtgggacatttcctgctgctacgcggccgcaaagtttgcctgcagttggcgacagattttgtaagttctcatcgctgtcgacggcgtgctggctaattttagtttgatgtgctaaatgttcttagtcgaaaaaaaagcggcggggcacagcgagcaaacatgaaaagaaaaacaaaagcgaaaaccaaaccaaaaatatattcagttagctgggcggatgacactatttgctttatggccgagtggctttcgaccggaattgtgtcactgcaggcggtccaatatttcgggccaacaattgattcgctaacgcttttgttcacttatgctttatgcttttcgattgtgggtgtgtgcttttggagcttctacatttcaacatttttggctgcaagtcatgggggggggggggaggaaggtaagtcgcttattgattttctgctcacttcaaaactccactgcagccggagtttggagtttgtgggaaaaacacccctacataaattactcaactcttcctgttgtcttgttagctctgctcaacttctgcttgtcttgtctccattgttagcatccacttctatttttgccttttatgcaatgcttagtagtgtgatttttaatgtttacagagtctttatttttaatgttccacttttagttgaagcaagctgttgactttccttttgttatttgtgtttgttattgattttctgctcacttcaaactccattccgcaggcctcgcaaagcaaataaaaagagcacccccatttttgtctgtttatgtttataaagtcatgcctgcttattttcatttttgccagcttttactttgctctggctttttcgtttatttgattttcacgtcatttctgctgaccttaaacttcttataaatagtcacattccacgcattcaaatatttgtttgcagggttcttatcacgctataacactcatattttcaaacatgggctatgctctacatacatatgttgccatgctatctttaagcgaaactttaattttcactaaattaaaaaaaaacacttccagcttgcttgtacattcatgctttttgcctcttttcaccattcatgttcagagtttaacttttgtattcagtttcatgattcagtgggggttttattgcactttgggtcatcgagttaattgtttggcaccgtgcacgtaattgtttcttaataattatacacacactcaagcacacagcaaacttggcaaacaaatgctaaatgcggggcgtaagaggcgtatacgtaacgtgctgtcaattgccgtgctttctatgcctgtgccctctctctgcccttccgctctctccactcttccttccgctctcttttcacaacaataaacaacaacaaacacgcggaatgcgggatgagagccactttttagttgttgttagtcaattgtttgccaattgaggaaaagcgcgcaatcaatatcaattctccaggcgtgcttgaataattttcttcttatttattttttctttgtgaataggggggtgtgtggttaaacaacaaacaccaaccgttagcgtcatcaccgcacaacgcacatttcacgagtgaaatcaaaatcaaatgcgaaatgagcacaggctgaaagcagcgacgtcggcagcgcagtggctgcgcagtttcgctttttgccagtctccattctctcttccttctggctctccgctccttgattccttgatttttccttgcgcgctcggtttgttgctatttttccgtgtcttttcggggggttgttgggttggtgtgatttgtttatcggcgggctgggcgggggcggaagttcctcgaattctgggttaacgcagcacaacaatttttgtttatcgctgagcaaaggcgccggtaacggtaaacttgagagcgacgaaatcagtgaatgtgccaagagagagagagagggaggtgagagtgcagtgagtgcgcagagagagaaaatcgttttttagaaaatatatttttgatataatttttaagcagttaaaaatgtttacccatttaaagacatccgttaatcttggtttgaatttcatccgtttgcattgttgcttcttactcacgtaacatatttcaaagcatactttttggattgctaataattaaagaaaatttaatgtacgtaaatagctggaaaagttaaattaataattattttcatgtgcactttttttaagtaatatattctttaatatatacatacctaaaaaccctataacaacaccaaaatttaaaatagattatttaatttatgttcggaaaactatccaaaaatagttttcgatatccaagtttcgttatttatttttgcttttgtcgctgttttacatactttttgcttatacaaatgtttcaccgtaatagtcaacccatgtattattattcaaaataaaataagctatgtttcattgagagattatacgattctgttatcagagccaaatatatttcgttataaaaatatgcgtctgtctagtttttataaaaatttgctagttgaataggtaaatgcaagtgtggaaggcttcgtcacaattc

SEQ ID NO: 33179 - DNA, 1393 bp, DROSOPHILA
cgttgtgcggtgatgacgctaacgcacatcaaactaaaattagccagcacgccgtcgacagcgatgagaacttacaaaatctgtcgccaactgcaggcaaactttgcggccgcgtagcagcaggaaatgtcccacgactatcaatagccgccaatccagaaccgaaccgaatcgaacccagaacccagagaccagagaccagaagcacttggagtcaaccaggaagccgaaagccaagagccaaggggagccgcaggggagagtccgcaccagttcctatgcagctatattcgagtttaaatgaaattgagcaagagcctggcaaactgtcgcgccatccggcgctatttgctcatcttcacggccgtgtccctgctgctcctgcccctctccctggcctacctggtgtggaacgagcagctgcagaagatccgaggattcgaggacagcaaccagacactcctgcccctcatccccgagcatgccgtgcagacactcacgccgcaggaaatgctccaggtggagcagcggatggaccagcgcagggagcggctaaaggacaagtgctccgcctacggcctggatgtcctgggtcacgacgcgtggcacacgccgaacacgtgggaatttttggtcaacaaaaagtatcacattatctggtgcaatgtctttaaggctgcctcatcgtcctggatgttcaacttcaacgtcctggccggttactcgcccagctatctgcgcaaaaccaagaagatccttctcaacctggccagggagcgctatcccagggtgaccctcgacgaggtgcgtctcgaaaggaaactactcggtgacctttatcatcgcacgcgatcccttcgagcggctgttgagtgcctatcgggacaagatggtgttcgccctgccctactccttccacgataagttgggacgcagcattgtgcgcaactaccgcaagaagccgtcactggctgcccgtgcggccaacacaaagttcccatcgtttccggaattcgtgcactggctgctcgaccaggtgaagcgcggcagcttcatcgacatgcacttcgtggcggccacctcgttctgcacaccctgcctcatccggttcgacatgatactgaagttcgaatcgctggcggaggatcaattatatctaatcgaaaagactggcctcaagcgggtgatagcgcccgtgtggcgcaacatgggcaagggccgcaagacgcacgagctccagcagcagttctatgcgcagctgacacgccaggaaatgctggagctctacgagtattacaaatacgacttcgagctgttcgactacgatatccaggagtatctgcaggttgcccggccggatgaggccgaaagtccggcgggcacaaagaattaa

SEQ ID NO: 33180 - protein, 207 aa, DROSOPHILA
MKLSKSLANCRAIRRYLLIFTAVSLLLLPLSLAYLVWNEQLQKIRGFEDSNQTLLPLIPEHAVQTLTPQEMLQVEQRMDQRRERLKDKCSAYGLDVLGHDAWHTPNTWEFLVNKKYHIIWCNVFKAASSSWMFNFNVLAGYSPSYLRKTKKILLNLARERYPRVTLDEVRLERKLLGDLYHRTRSLRAAVECLSGQDGVRPALLLPR

SEQ ID NO: 33181 - DNA, 2147 bp, DROSOPHILA
attgtgaaaagcgaaacgtaaacaaacggagcctgggctccagtctaagccaagttcagatagctgccgtccctctctggcgaatgttcttggccatggttactagttactatttgctagctggctggctgtttgcacacttggctgccttcgactaactaagcctagctggcttggcttgtcttggctcggctcactcggcgtatacgcaatgtcggccattgcatagaacgctacagtctctgtttgaattggaaaactcgagttcgtgtctgtgtgggtttccttgatttacatctgcgcttagttggctgcttagtttagctgttttcgacttttcgttttcaagtctgcctctaaattgttttgatttttttgtttttgttttgtatttttcgggtttatttcttattgcctcttggtttttcctatcggccaaagactcgtttttcaatttttggctgcagttcttggatgaccagtttcgtatacagcattttgcggtattttttcaatctgtcaatttgctagtgtgagtatggtcttgctttcagccaactcaacaggcttctggccaatttggcagttgatattgacttttagttagctaattgagtgtttaataacatttttctttaattcgattttcttgttatttgacgaaggtgataagaatctgtcagtcaaggcatttccttttcgggaaagcttgtccaaatagtatgggaaaattcctaaaatggtgattaactaaaagagttcttatatgtttttcctatttcttaaataaattttccgtaactcttatggattatttaccccatgctaaaattaatgtattaattgtttttgctttcagatacgccttgtttatgcatccatcatttgtattcactcggatgactggcatattttgcgatgtaattaagtgtattgtacttactattgctaatcctaactccatttgatatcagcatggagagcggcgttcccctgtgtgtcacatgggggcgggacctccgtcccgtggcagttgacccctgtgatggctgtgcatgtgtttgctgctgttgctgttgctgctgctgtcgtcgaccacgcccacaggtggcccagtcaaggaggtgatctctagcggtgcgtccatatcgcaggtaatgtttttccaagcccataattcaagtctatcggagatagtaacaataaaagcggttgaggtggattagttcaacggcgactgggggacaaccacatatttatggatggcaattataattaaatggcctgccgtgtcggtcaagtgtttcctggggtcgtttgtctaacctggagacgcgaagaatttctagaatctggcaccgccagccttggcatactcctccttcaaagatttggctgcgattagctgcattttcaagcggacctactgaaaccgcaatgaatcgtgccataaattcagttacaacagtataataatatatgtttttattagcccggtggctgataaatgctccatggcgtaaatacatttgtcactcgctacgtgagtgccgggggaaccctctccgctggcaggtcgtcgttaccttaagccacagacaatatgctaattggccaacagccattagctgccggcacagtttcatttgcttactaattgaaaatgcagaaaatcgaatggaatctatcagtgggtccaggaaaacgtgaagatcacagtttgatcttagtgtattaatcaggcaatgcggaatcaaactcaggtcaatgcacgtgtctaaaatcatattacaagcaacataaaaagtacaaagaacaattatttgtaataataaataataataatagtaattaattattattgataatattgattgttctataatttgaattattgcccaaattgaatagcagccctttggattcccataaacttcccataaatctatttcgctaattgctccatgctgaccaattatttttatgtgttttgttaatcccttgccattatttttcattcgaaaaatgctaaggcatggtaataaataaaataataaaatggaaactatctccgcagcctggaaagtgttatgatcttggccaaaggggaatcgtactcactgcacatgatcaataatcgcggtgac

SEQ ID NO: 33182 - DNA, 147 bp, DROSOPHILA
atggacgcaccgctagagatcacctccttgactgggccacctgtgggcgtggtcgacgacagcagcagcaacagcaacagcagcaaacacatgcacagccatcacaggggtcaactgccacgggacggaggtcccgcccccatgtga

SEQ ID NO: 33183 - protein, 48 aa, DROSOPHILA
MDAPLEITSLTGPPVGVVDDSSSNSNSSKHMHSHHRGQLPRDGGPAPM

SEQ ID NO: 33184 - DNA, 2852 bp, DROSOPHILA
gataatctacactatatttagtttatgaatttggctattgcgttctcttttcggcttactggagtcacagttggcttagtgctgtagtctgtaattaactgagtatgggatttggcccggcattttatggcaccttaattacaagcccgacatgagccgcaaaaaatcctacagatcccactcttctttgtatatatatatgtatatttgttttccaactaaccaagatggttaactggtttacagatcgcagctttcatagtacatctggctctcttttctcttttccgtttggcacttctctccgcttttggcacttaccttaatggaataacccatggctgctgtctggcttatggtttattttcacagttatgtcggcgtctggctttgtatttatttgtcaaaactatttttcacgcgaaccacaaacagaaactcacacaaacaacgtatatctgcgaatttatatgcgagtgtgtgtgtgtatattttgatccactgcaatcggaatattatatggacgaggaaactgtgctacgatggatatttcgaaaccggttaagcggttcgccagttgcctttgctgtttttgcccgtttcatttgcggctcgattgttgtgtttattttggttgaggggcgacctgttggcttttcgatgatttgggagatccgcaattaaatttgcatagccaatcggtataatgactaaaaaaaaaacgtagtttcgatatcggattttcacgcttctctcggcgaactcgaactttttccacacacgcacaccgaacaactgatttcaattcgttgggagagaaaatcggatggtgtgaccgctaatatgccaccagtatataccagttttcgaaagagctttttcaaagctcaacacactaaaaatactggaattaaactacaattcatttattaagctaccaaataacgtacatttttgaacaatattgttcatttttcaagagtaacgcagtctgctttatttaatcctttttgttgtcatcgccttcacactttccttcctccttcttttgttgctccttctttttgatgtcttcttccttcttttggcaccaagctttcagttcatcctcgctcatgtcctggactttcttctccttgggcgaggacttggcctccttcttttcctgctccttctttttgatgtcctcttcctttttctggcaccaagccttcagttcctcctcgctcatgtcctggattttcttctccttgggcgaggacttggcctccttcttttcctgctccttctttttgatgtcctcctcctttttcttgcaccactcctttagctcctcctcactcatctcctggagacacttctcctcggccgaagatttggccttctggattttcttggcttggttggagagtatcgcatcgcactcgctttccagcttcttcatggtctccagttgggcctcgccacactcggattcttcgtcggcttcgatggatgcctgtagtcctccgtccaatcgacgttcgtctcgtaactccacagccgtgaccgtgagttccataaatgagaatcgatgatagccaaagtaagttgggttcttgtagggcagcgctttgcctgctcctggtcccagcttctcatccggtccactgaactggcggaaggaagagggtctcacaaacggcggcacatcgatcccattgtgatcgacactggtcggttggtagccctcatccggtggatcctttggtgggcgaggggtgttcgatggcttgttgctcaacttgggcttatcagacaggcggcgaagaattacaggttttatgaacaatcgaagtggattcttagacattttcgggagcacttttgttttaaagtaaatgtttttaaattttactgttgctcaaaacaggagatgtcattttcagaggttactgtgtaaaattgaaaatatacatctctacatcacgtatacgccctgatatcctaaagctttattctgtaaagtaaaatgtaagctttgtgtggaagtatcgactaactagaaatgttgaattcaatgatgtccaagcttttgccataatatattaggtataaagagtttgatgattgtcgatgaacttttcgggaggttcaaaccgatcagcaaactggttaaggccttcattctggttttattatttccacttaagagtgcacataatattttggcatacatttcggattgctgcactccggtttcccacgttccccgcgaagtcttctgatacggctgattatcgtgcaattatctttccaagattatcagcacggtttacgaacgagaggtgttgagcggcttcgaccgggatccgaaatttagtatccgtccggtgggccaggcactcggttgagtccccaagaaatctggttgggccgggaattcgcaatcacgaaacgatctttgtctctttggcgacttaattgcgtgtgataaaagatttatacgcccgcgagctcaagtagctttatcaaatactcggtcgctactttatcgctatgaagtgagtagtcttcgtattcttctggtttcgagatcgtaaaaaataagctaactgatgcgcaaacacaataaatgacaaaacattagcctcaaccaaatcccggttaagaaattgtatatttttacgacctttaattttgaaccaacatcttttctcgaggaacctccttggcgcttattgtttaacgacccgaacccatttatcaatcaatcaattcacctcaaaaacaacttttaattgctcccccaacagcgacgatataaaaaccgtgacggtttacccaaccacactggaattaacgaccccaac

SEQ ID NO: 33185 - DNA, 852 bp, DROSOPHILA
atgtctaagaatccacttcgattgttcataaaacctgtaattcttcgccgcctgtctgataagcccaagttgagcaacaagccatcgaacacccctcgcccaccaaaggatccaccggatgagggctaccaaccgaccagtgtcgatcacaatgggatcgatgtgccgccgtttgtgagaccctcttccttccgccagttcagtggaccggatgagaagctgggaccaggagcaggcaaagcgctgccctacaagaacccaacttactttggctatcatcgattctcatttatggaactcacggtcacggctgtggagttacgagacgaacgtcgattggacggaggactacaggcatccatcgaagccgacgaagaatccgagtgtggcgaggcccaactggagaccatgaagaagctggaaagcgagtgcgatgcgatactctccaaccaagccaagaaaatccagaaggccaaatcttcggccgaggagaagtgtctccaggagatgagtgaggaggagctaaaggagtggtgcaagaaaaaggaggaggacatcaaaaagaaggagcaggaaaagaaggaggccaagtcctcgcccaaggagaagaaaatccaggacatgagcgaggaggaactgaaggcttggtgccagaaaaaggaagaggacatcaaaaagaaggagcaggaaaagaaggaggccaagtcctcgcccaaggagaagaaagtccaggacatgagcgaggatgaactgaaagcttggtgccaaaagaaggaagaagacatcaaaaagaaggagcaacaaaagaaggaggaaggaaagtgtgaaggcgatgacaacaaaaaggattaa

SEQ ID NO: 33186 - protein, 283 aa, DROSOPHILA
MSKNPLRLFIKPVILRRLSDKPKLSNKPSNTPRPPKDPPDEGYQPTSVDHNGIDVPPFVRPSSFRQFSGPDEKLGPGAGKALPYKNPTYFGYHRFSFMELTVTAVELRDERRLDGGLQASIEADEESECGEAQLETMKKLESECDAILSNQAKKIQKAKSSAEEKCLQEMSEEELKEWCKKKEEDIKKKEQEKKEAKSSPKEKKIQDMSEEELKAWCQKKEEDIKKKEQEKKEAKSSPKEKKVQDMSEDELKAWCQKKEEDIKKKEQQKKEEGKCEGDDNKKD

SEQ ID NO: 33187 - DNA, 3201 bp, DROSOPHILA
ctttgctgaggggcaactctttgcgtttaaagaaatcatcgctctccggtggctgcacttcctcctggtagttaacactcttgatgcgcgccgcccttcgcttggcaatatccagtttctctagtttttgggcagtgttggagcgaaagcggtgggcgcccacctccggatacatttggatgtcaaaggagtgcgtggacatgtcctcctcgtcgtcgctgaggtccagtcccggatagcagatgaagtccacttcctggagtggcgcatccggatgccgggtgttccgctccggtgttgtcccgccccccgtcggcggtgtcttgtgcgcccgtcgccaatgatagtgatctcctccagcgcccgagttaccgaattttcgcaaatagtgtttgggcatgtcatcgctcagcatcaccgtctcgcacattccggtgtcgtccgtggatatgaaggagttgcggatgtgggagagcagccaatgctggttggagtaggtcgccatggtagtaaacaaaagaaaatctctttttcaaaattaatttctatttatctcagcatctcggaaaaatgcactaacgcctttggattatctagagatggaacattgcggttgttactggtcactttttggtggtggtaacgaatagcacgcacaagtcaccgttcccaacagaacataagaggaatacctactacatgaatatacttaaattatgcaattaagataaaggttataccaagtacttattatcaaagtaatattttgaatttacatgcaagtctagttgtagcggtactcgttaaatctggtcttttttcattcaacgcaaacggtcactctaggccaccatatgacttttttctggacgcgaaaaattgccgagttacagaataagttaattatagtgagtttatcgtcgcctgacctgccgtttttcgatgtccacttcttgagaactcccaatcggatagagtcgatgtgctagccaacggcgaaatggcgggcatggaggtagaattcgacgagacggtggccaatcagttcagctgcaagcgctgcgaccgagtaagtgtgtgggaaatgtctcctattacctcaatctaaccactatccattgatgcagaccttcagaagcaagcgggatcagacgttgcatcgacaagaggtgcacaaccacaacaagaccacctacgagtgcaagctgtgcgcgaagagcttctgcaattcggggaacctggatcgtcacatgaaggtgcacaacgatgtgcggcctttcgtgtgtaacatttgctcgaaggccttcgcccaggctgtgaacctgcagcgccactatgcggtgcacagcggggagcggccattcacctgtaacttctgcaacaagtccttcacccagcagagcaacatgaagcgccacaagatgacacacactggcgagaagccgttccgctgccagcgatgcggcaggtacttctcccagctggttaacctcaagaaacacaagcttggccacctcaacgccaagccctaccagtgtaattactgcgagaagggcttcacccagctgtcaaactttaagcgccacttgcagtcgcacataaaggagggcgtcgatgtggacgtgcccgcctctatccaggcggctgccgccctggccagggaacggcttgagtcggagcagaaaccgtgagtacttgccggctgtagaagatcaaggtgccctttgattagttcaacctgttcagacctaccttaagttgcctattcgacaccgattatcgacgggtcatgattagattcggtgctgattagtgtgcttaactgtgctcatttcccttttatgaacaattaatactatatgcatttttgaaggtgtacacgttcccaatcaatacttttatatattaattgactagcctcaaaactatccttgatccttctacatttgcttgttgtgaattttattattgaattaaaacatttcattttcagaagctttttcgaatgcatggtgtgtcgggccatctttgataccttcgctgactatgagaagcacgaagccaagtgccatgaggaccacgaaagggcccagctggaggttaaccagatgtcccacatgcatccagacgactatttgcccatgaagtttgccgtgcccgatctggatacgcacgaaatcataattgagactacacattagaaatggcaataattttaaatgaaataccacgaaaacacacaacccaactcacacctaaacatacaaatagcggcgattccgacggaaagatggaatgtgaagaatattgcattgaatatacagatatgaatatatatgcaggccaacatagttctccattgaattacaccaataaatgcaataaatatgcagataaccaatgcgaatccttcgctatccctgttgctaatcgatccgatctctgttgacattgttgcgtgaatcaggctaacccgtcgatttacggaccctaaagacgttttaactgcaccctttatgatgtgccattttatgagcatatgtatgatattcgctggattttcccgagtcacatcatcaattctctcgttcgcaagtcccaaaacctcacagtgcgtaaattgtcgctttaatgacacatttcgcacagccgtaaaactgtcccttttccagcttgtcaggccaacattcttgcgtcattaatgtgacaaatatgtttgcccaaatagtcacgttaccactcactgttgttcgttaagttcgaagaagaaaggtaaaggaatcgcccgatgggtctataatttatacatgtgatttctcgactatttgattgaaactaattaaaggcacgttcctgacttgtttacccgccagcagtcatggagcaataattgatcgcacagtccttgctatcagcatccaccgctcgctctgaccatgtccttgtggccttcgcagtcatcgtttttgcggcactaaatcaaactatttatacatctgactccccggactactcacacttccgctcgcacagggaaataatatttcatgtccacatcgtcgtcctgccacattttctggctgtgcatgtgtgcgcctggttcaattggcatgcggctgcttaaatggtcactgcttggggcctcggactaataggttcacatttattaagctgcccaatgtcatttgttataaatttatt

SEQ ID NO: 33188 - DNA, 837 bp, DROSOPHILA
atggcgggcatggaggtagaattcgacgagacggtggccaatcagttcagctgcaagcgctgcgaccgaaccttcagaagcaagcgggatcagacgttgcatcgacaagaggtgcacaaccacaacaagaccacctacgagtgcaagctgtgcgcgaagagcttctgcaattcggggaacctggatcgtcacatgaaggtgcacaacgatgtgcggcctttcgtgtgtaacatttgctcgaaggccttcgcccaggctgtgaacctgcagcgccactatgcggtgcacagcggggagcggccattcacctgtaacttctgcaacaagtccttcacccagcagagcaacatgaagcgccacaagatgacacacactggcgagaagccgttccgctgccagcgatgcggcaggtacttctcccagctggttaacctcaagaaacacaagcttggccacctcaacgccaagccctaccagtgtaattactgcgagaagggcttcacccagctgtcaaactttaagcgccacttgcagtcgcacataaaggagggcgtcgatgtggacgtgcccgcctctatccaggcggctgccgccctggccagggaacggcttgagtcggagcagaaaccaagctttttcgaatgcatggtgtgtcgggccatctttgataccttcgctgactatgagaagcacgaagccaagtgccatgaggaccacgaaagggcccagctggaggttaaccagatgtcccacatgcatccagacgactatttgcccatgaagtttgccgtgcccgatctggatacgcacgaaatcataattgagactacacattag

SEQ ID NO: 33189 - protein, 278 aa, DROSOPHILA
MAGMEVEFDETVANQFSCKRCDRTFRSKRDQTLHRQEVHNHNKTTYECKLCAKSFCNSGNLDRHMKVHNDVRPFVCNICSKAFAQAVNLQRHYAVHSGERPFTCNFCNKSFTQQSNMKRHKMTHTGEKPFRCQRCGRYFSQLVNLKKHKLGHLNAKPYQCNYCEKGFTQLSNFKRHLQSHIKEGVDVDVPASIQAAAALARERLESEQKPSFFECMVCRAIFDTFADYEKHEAKCHEDHERAQLEVNQMSHMHPDDYLPMKFAVPDLDTHEIIIETTH

SEQ ID NO: 33190 - DNA, 8469 bp, DROSOPHILA
tgtcgttttttttttgtgtggcacaactaaaaggggctacgggttacgggttaccctgttgcgcaccttttttatggccgttacgtgtcgcgcttgccgaaataaaccagaaacgaaatattcgccataaaatttggacttggaggagccctcgaggtggaggcctcgcctctggtcgcgcatgttgtgtcagcttccataaaaacggagaataaaagacacacttcttatcagattccctgcgctaccaccaactccccccccccccctccttccaccaacagttcaaaacttctaagtaaagtcataaaatatcttgcgttttggtttcaacttgtgtttgttttattaactaaatatttttcagttgtcttccttttttgtttttcacttttcatatatgctacacattaaaaatgttttggtgcttatgtaagacgtatgtaattgtataatcatttatagttacatggttagagtattgttgaatcgtgtaatacaatataaatactgaatcaaaggcaatgccctattataacatacatatctaaagtagataaatcataattgagaataaacagcgaagtcgaatctttgaaaaactatcacacacaaatgcttactttttgtcaagagtttctacgagtacactaggcgtatgtgtaatattgattatgctttgacggttacttaacttatggagtatgcaaagttgagtttatcgtgtatgtatttatacgtatgtatatgattaatactaaactgttttaattgctttacgttacaacgttataagtggcaagacctattagtttaaggggccgaaacttatgtttttccaaaaatttgtataaaaataaatatgcaaaaattctgaaatttcggggacattgtttaaaaagaattttcggaataacaatacatttactaggcagcctactacgaaagtcttaagactgttatgaattgcttgtttacttttaaatttttttttagtattttaggcgctgctggtggacctttccaattgcgacccaatcccacttggacgtgtctcatgcggcatttgttctacttcaatgtactcctcttcatctggatgattctctggttcatcttccactccggctgactcgacggtatccgtttcgtatagctcctgtttgacaatggtgggacttcttaccggactctggccgggtgaagtgttccgtatggatggtacctccacttttgctgctggaggtcgggcctgcggtctcagctcatgacccctttggtggtgctccaactcagctcgaaagaagaatttctccgggcagagattacaatcgtagggtcgagaatgggctccgtgttcgcccatgtggttgagtagtcctccaggtgcggtgaaaactgccgagcagatgtagcaattgaagccacgctgttcggtgccggcaaaggtgtgctccaccaggtgttcctgaagcttctgcgcatgtggcaggatcatcttgcacagattgcagcggttttccacaaacgctgacggcggagctggcagagatgtcgctggctcagagtgcttgccacgttttccatttaggttatgcttacggcagcacttgtcacagagtttggctggaccctcggtggcatctggtaggggttccaagcacagggcacacactggctcctgcagacttccaccactcgaggaggactttgtgtggaatttggcatgcagacttagctcgaattccgaatgcaacgtctggcggcagcaaatgcaggctagtggcaaggaggcaccatcgctaccgtgttcggatagatgagccctaaaggcggccacatcctccaggggttgtccgcagtgcgaacactttccggactgacccaccttcgagtgttggagcttgtgttcggccagaatggctggtgagggaaacacctcgtcgcatatcaagcacttgtgcttacccgtcgaattgtgacagctcttcatgtgctgctccagttctgcccgagacttaaagttgcccgcacagtaggcgcatctcaagctgacgcccgtcttcagattgtgggccaatttgcgatgggagtgtagttccgcctcgctgcgcaagtcctgtcgttcgcacattccgcaactgaaagtggcagtgctggcatttggtggtggtggtggtgcggttgcttgaggagccggtggctgcgagtttccaactccctcatttcccgagggcgatgtggacttggcggcatacatctccatcaaatatcgctgactcaggccgtacattaaagccggatgcggagaggtttgcgccttcagtgcattggtgtccacctgaagagggctgtagaatttgttagccgatggcggtgctccaccagattgagctccacctcctccggaaccggcgccaccagaagctccaccaaataagcccttaaatgccacattgtagtcgatgatgctgctgttgttgtttgtggccgctgctgctgccgccgctgccgccaagggtggtagcaaggcattcacatagagactgcccatgttgggcgagttggcctctttgtccttgacgccgccatgctgactctgcatgtgacgatctagcagaaactccacatggaaggtttccgggcaggaagggcatctaaactggcgtgcatgtgcggccaaatggaagtgcatttccagctcggaagagcaaactgctcggcagaacatgcattgtagcggattagtgggagcactagatgtggcgcccagtgtgggatggccacccaactgatgacgcgtctttacatgaacatgaaactctgcatcggaacggaagagttccagacaggcgctgcagcggagtagcttggtttcctgactgtgcgcacaggccagatgaagctgcatggccatccgactttcacatagctccgagcacaaagaacacttcagcagggttaggacgtgctcggacagtaaatgttgctgcagatcctccgatttggcaaaactctttccgcagctcgagctgcagttgaactctgagcccgtgatgaggaagtgacccaccacatggcgttcgaactccgattgctccggcaaactcattccgcaatgcggacaaaccagctgcatgccctcggcaatgtgactcttcaaatggttcctaaagctctcgaaatccggcaatccagcgttgcactgattgcagaagaatacccccggtggggctgagggcggagctagtggagtctgggcttggggattgggtgtcagtggtcgccgcttgttgttgctcaaatctgttggcagatcgtcctctgcaggtcgcgattcccgttccggacttcccaaatccggtttaattttgggcaagtccaaagccagtcggggactgaaagtgccagcggtggccaggcgattgaagtgctcgtagtaggagttcggactgctcaatcggtccatgtgtgtgcttctcatgtgctgaaaaagtccggcgatattgccaaacttcatggtgcagtactcacagcttagctggaagccttcgccctcctgaactggtgtcttcacagcctgtgtttgtggttgttcgtggacactctgcagatgggcattgagttgttccaggctactgaattccgtgaccttgggacagtagctgcatctaagcaagggagtgggtgtggcggtggtggtagtgcctcccacatgattactcctcgatctcttggggaaatccattctacttgggctactatctgatgccaaagccaaggcatatcttctcttctgcagactaccattgctggacaccgatgccgaggccgaacccgtggaccgcggactatagttgagggcattcggattgccaccggctgccaggatggctgcattcttcttgtgcttttgcatgtgcgaggttagagcagcagctgtattatagcccctgttgcacatgctgcactggaagggcttctgtatgtcatgggttttcatgtggatcttcaagtggtcactagagaaagatgaaatagaggaaatttattgacttagttaataggtcacatattaaaccagactccctcacttacctcctggaaaaagctgcctcgcaatgcggacacttgtagttccgctcgttggtatgcagtttcttatgacgatctcgggatcgcttgtgcttgaagagcttggagcagtattcacatttgaaaggcaggtgttcagcgtggctctgtaatgaatatacacatattcggaaaatcccattagcatgatgataatctgagcaattagccgtaggcccactgggctatttgaaattcttagaagagcaccagacaacaaggcagcgtcaactgtccgtctaccccagttaaaagttgcgatgacaacgatgacgactacgacgacgacttggacgactcctggcttgaatttatagatgcgtcaatctgaatctgaatctgcataccgactgactcgactcggactcaggcccagacgagtaggtgtttcacttgcgactcgtggcttgtggacaaaattcatctaaatgcgcgacgccgcttactgttttttttgttttttttttctttcgcaggttgggctggaaaaggggcaggtgctggggctggggttgggtcttaaactacacccgcaaccggtttgctttttgggttcttttagcggcagccggctttgaactttgagagcggcgaaaaaaaaaattagcccatttgtatgcagccccccagtttggaaagccttaaaattgcacaatatatgatgagttagccgggttagtcgcatccagatccacagagagcgtacaacttctcgtgttggttatggttttttaaactgtcgctccaatcaccatcgccatcaacatcccataagctgaaagaccgaattccgaaccgtaccagcccatccaggcgctaggatcaaagccggatcgcaacatgttagaccccggtggacgataaagatcgctgctcggtagtcctcaacagcagttgcaattgggttaacaagttgctgatgtcatgggcggcggtgttagcagttcaaaaagcatttaagccgaattagaattttcgctcgcggagatgagggggcatgtgggtgaagtgcggtggccacaaaggctcaaagcttcgggttgtcttagatgttgttttagagattgccgaaggagtgttagataaatgatataggtctgcaatttttaaataattcacttgatcctaatttgtttcatttggaagatttcagagaacgtacctttattttacatatattgttcaaaggagaaacgagccttgcgtacatgctagatttgacatttccacttaaacaaccctttacatctaagagctatgccactttcgctttcaattaacaaattgaaatcgcagtttggttcctattcactcgatggaaatgaaaatcaatggaaccaccgcagattgtcaatcaaagtcctgacaccctgagtgcctaaaggtgtcctaagtatttagaagactgtcaccaaaggggcaaatgtcaatcaagagaaaacaccttgctcgaaaatagaataatcgccttaaaaagatgtcaggatggtaattacgaactttcaaagccacccacttgtggtggagaccacccacccactcaccctttctagactggagttccttcgaactttgaacccactcaatttggtaactcacctgtacgtgatgcttcaagtagccgagacgtggaaatgtcttttcgcaaaactggcactggtaggatccgtcgccgcgacttttaatcccctctcctgtcaacttatcaaacttgcttgctgctccagtggctcccccacctgcggtggctcccattttggcttccttattgattttgcgcagcttgttggctattttcagcgcctgttgatgatggtaatgatgatgatggtgatgatggaagtgtggcaaacgttttggcttgggcaaatcctcgccatcagcaccaccattgatcttgccctcagtcggatgatcctcctgaccggcggcggttggagctccgatcaagtggtgtgaattgggcgtcatggtgccgtcagaaatgctaggcgaataactggacgatgtgtgggtgctgtacatatctggaaggagaaaatgaagacacggattagtaccaagaaaataggatcagtgtcacttaggggtaaaacgtcttacatcggtcttacatataaaaatattatgataagagtagaacaaattaggaaattatgtttcaatttattatagagttgcttatttaacgaagaaaggcaattgggaacattgcgttcccaataatggtctttctatcatgggaagcggtttttttatgagactatattccatcttatcgagtgggcggctgtggctgcatcctgtttagcggcgctttggggaccgggacaggaaatcaacgtcgactatcaaatgctggacgcggaattaattcaattaaccgggcaacatttggtgatgaccagacgacaccccattccccatacatgggtatgagctgtaagcgagtctcatgcaaactaattgcgctttgttcttgctgctgttttaattacaggccccagcatccatgagggtcacttgattccccccggattcgggcttctattaacacgcgccaagtgccgatgttcactttccgttttcgacaacttttaattaagcccaattgcgcatgatcttcgcgtctgtatctgtttggataatgctctgggtcgagggatcgtggttgttttacccccccgatcggttgaactgtgatctatctggtctaagttccactctaattgggaaacatcaagctgatgcatcagccacttgattccttcattcgtcttgatctttggggttaaagaaagttgtaagagatttaaagccattcgcatttgattgaaatgttggctatggttaagttaagggggtaagaaagtcaagtgtcaaagcggttaaacggattggagaagattgatgtagatgttctaggatttatggcaaaagttgaaaattatacaattcgtttcgattttcgtggaaattttgaaatatatattttagaatgaataagttttatgatccagatgtaagcaaaatgaaagctgtttatttttactgacatcatataaattgattgattttccgtcggcacattgcacattggatacaagctttttataagctttgctatttacactgtttggttttaaaggaccccaatggtcggacgcctaattaatccatcaagaactataactttttttggaattttcccaaattctttttggatatccttgctatttaccgttattggtgatctccttggtggcctggatcttttcaattaaattctccaaacgcgaactgggaccacgatataacatctttagggccatcatatcatggcatagtattgtcttatttaacttctagttaatttatttaattggatttgaactaaattcgattgaggaggcactttagctgcactttctcgataaacaccaagcactttcagtttaggcccttgctgcaccaaaggatcattatatctctattctgatgtatgggttgccagcgttttttttttctttcaaagcgcgaggcgcgagacgaaggacgtccaattgccgcgagcaccaaaatgtggctaaaatcagagccgcagagccaaaggccgagtgccaaagagcccaacggagaaagacagagagagggagagggagagagagagtgtgaggaagcagacggaaggagagggcgacaactaggcgaactggttttttcgcctctgtgtgcgtgccttttgggattctcggccaacaaatgagaagcaacacacagcgaacgtaatttaaatggcgcccccaccccacccccactaatacacacacgaacgcgcacgcacacgggcgagagtgagaaagcttcgtgtgtatataagcaccacacactgatatcccgaagtaaaagccgaagatgttgcgttcgtgggcgagagcgagatggcgccacatagagtgcgcaaaagagagagggcgaatttgtcgtatctgtgttggagttggtgcccccaccgaacacatagacgctatatagccacatatacaccactacactggtgctggcgaagggcggagcatgggatccaatgggtcgacgcggccagagggttccctgatgggtcaaaggaggggggttgcggatggaagcgggatggcaaatgcgttttatacttaatttatgtgcacataaaaatttaatttacccaaaacgtcaggtgatgatgtgatatttcactacttttggctcgttttccccttttttgtggtttttgttgttcatttttttttggcgagatttgactttgatgaaggaattagctttttgggttaatta

SEQ ID NO: 33191 - DNA, 3873 bp, DROSOPHILA
atgatggccctaaagatgttatatcgtggtcccagttcgcgtttggagaatttaattgaaaagatccaggccaccaaggagatcaccaataacgatatgtacagcacccacacatcgtccagttattcgcctagcatttctgacggcaccatgacgcccaattcacaccacttgatcggagctccaaccgccgccggtcaggaggatcatccgactgagggcaagatcaatggtggtgctgatggcgaggatttgcccaagccaaaacgtttgccacacttccatcatcaccatcatcatcattaccatcatcaacaggcgctgaaaatagccaacaagctgcgcaaaatcaataaggaagccaaaatgggagccaccgcaggtgggggagccactggagcagcaagcaagtttgataagttgacaggagaggggattaaaagtcgcggcgacggatcctaccagtgccagttttgcgaaaagacatttccacgtctcggctacttgaagcatcacgtacaggtgagttaccaaattgagtgggttcaaagttcgaaggaactccagtctagaaagggactaccgagcagcgatctttatcgtccaccggggtctaacatgttgcgatccggctttgatcctagcgcctggatgggctggtacggttcggaattcggtctttcagcttatgggatgttgatggcgatgagccacgctgaacacctgcctttcaaatgtgaatactgctccaagctcttcaagcacaagcgatcccgagatcgtcataagaaactgcataccaacgagcggaactacaagtgtccgcattgcgaggcagctttttccaggagtgaccacttgaagatccacatgaaaacccatgacatacagaagcccttccagtgcagcatgtgcaacaggggctataatacagctgctgctctaacctcgcacatgcaaaagcacaagaagaatgcagccatcctggcagccggtggcaatccgaatgccctcaactatagtccgcggtccacgggttcggcctcggcatcggtgtccagcaatggtagtctgcagaagagaagatatgccttggctttggcatcagatagtagcccaagtagaatggatttccccaagagatcgaggagtaatcatgtgggaggcactaccaccaccgccacacccactcccttgcttagatgcagctactgtcccaaggtcacggaattcagtagcctggaacaactcaatgcccatctgcagagtgtccacgaacaaccacaaacacaggctgtgaagacaccagttcaggagggcgaaggcttccagctaagctgtgagtactgcaccatgaagtttggcaatatcgccggactttttcagcacatgagaagcacacacatggaccgattgagcagtccgaactcctactacgagcacttcaatcgcctggccaccgctggcactttcagtccccgactggctttggacttgcccaaaattaaaccggatttgggaagtccggaacgggaatcgcgacctgcagaggacgatctgccaacagatttgagcaacaacaagcggcgaccactgacacccaatccccaagcccagactccactagctccgccctcagccccaccgggggtattcttctgcaatcagtgcaacgctggattgccggatttcgagagctttaggaaccatttgaagagtcacattgccgagggcatgcagctggtttgtccgcattgcggaatgagtttgccggagcaatcggagttcgaacgccatgtggtgggtcacttcctcatcacgggctcagagttcaactgcagctcgagctgcggaaagagttttgccaaatcggaggatctgcagcaacatttactgtccgagcacgtcctaaccctgctgaagtgttctttgtgctcggagctatgtgaaagtcggatggccatgcagcttcatctggcctgtgcgcacagtcaggaaaccaagctactccgctgcagcgcctgtctggaactcttccgttccgatgcagagtttcatgttcatgtaaagacgcgtcatcagttgggtggccatcccacactgggcgccacatctagtgctcccactaatccgctacaatgcatgttctgccgagcagtttgctcttccgagctggaaatgcacttccatttggccgcacatgcacgccagtttagatgcccttcctgcccggaaaccttccatgtggagtttctgctagatcgtcacatgcagagtcagcatggcggcgtcaaggacaaagaggccaactcgcccaacatgggcagtctctatgtgaatgccttgctaccacccttggcggcagcggcggcagcagcagcggccacaaacaacaacagcagcatcatcgactacaatgtggcatttaagggcttatttggtggagcttctggtggcgccggttccggaggaggtggagctcaatctggtggagcaccgccatcggctaacaaattctacagccctcttcaggtggacaccaatgcactgaaggcgcaaacctctccgcatccggctttaatgtacggcctgagtcagcgatatttgatggagatgtatgccgccaagtccacatcgccctcgggaaatgagggagttggaaactcgcagccaccggctcctcaagcaaccgcaccaccaccaccaccaaatgccagcactgccactttcagttgcggaatgtgcgaacgacaggacttgcgcagcgaggcggaactacactcccatcgcaaattggcccacaatctgaagacgggcgtcagcttgagatgcgcctactgtgcgggcaactttaagtctcgggcagaactggagcagcacatgaagagctgtcacaattcgacgggtaagcacaagtgcttgatatgcgacgaggtgtttccctcaccagccattctggccgaacacaagctccaacactcgaaggtgggtcagtccggaaagtgttcgcactgcggacaacccctggaggatgtggccgcctttagggctcatctatccgaacacggtagcgatggtgcctccttgccactagcctgcatttgctgccgccagacgttgcattcggaattcgagctaagtctgcatgccaaattccacacaaagtcctcctcgagtggtggaagtctgcaggagccagtgtgtgccctgtgcttggaacccctaccagatgccaccgagggtccagccaaactctgtgacaagtgctgccgtaagcataacctaaatggaaaacgtggcaagcactctgagccagcgacatctctgccagctccgccgtcagcgtttgtggaaaaccgctgcaatctgtgcaagatgatcctgccacatgcgcagaagcttcaggaacacctggtggagcacacctttgccggcaccgaacagcgtggcttcaattgctacatctgctcggcagttttcaccgcacctggaggactactcaaccacatgggcgaacacggagcccattctcgaccctacgattgtaatctctgcccggagaaattcttctttcgagctgagttggagcaccaccaaaggggtcatgagctgagaccgcaggcccgacctccagcagcaaaagtggaggtaccatccatacggaacacttcacccggccagagtccggtaagaagtcccaccattgtcaaacaggagctatacgaaacggataccgtcgagtcagccggagtggaagatgaaccagagaatcatccagatgaagaggagtacattgaagtagaacaaatgccgcatgagacacgtccaagtgggattgggtcgcaattggaaaggtccaccagcagcgcctaa

SEQ ID NO: 33192 - protein, 1290 aa, DROSOPHILA
MMALKMLYRGPSSRLENLIEKIQATKEITNNDMYSTHTSSSYSPSISDGTMTPNSHHLIGAPTAAGQEDHPTEGKINGGADGEDLPKPKRLPHFHHHHHHHYHHQQALKIANKLRKINKEAKMGATAGGGATGAASKFDKLTGEGIKSRGDGSYQCQFCEKTFPRLGYLKHHVQVSYQIEWVQSSKELQSRKGLPSSDLYRPPGSNMLRSGFDPSAWMGWYGSEFGLSAYGMLMAMSHAEHLPFKCEYCSKLFKHKRSRDRHKKLHTNERNYKCPHCEAAFSRSDHLKIHMKTHDIQKPFQCSMCNRGYNTAAALTSHMQKHKKNAAILAAGGNPNALNYSPRSTGSASASVSSNGSLQKRRYALALASDSSPSRMDFPKRSRSNHVGGTTTTATPTPLLRCSYCPKVTEFSSLEQLNAHLQSVHEQPQTQAVKTPVQEGEGFQLSCEYCTMKFGNIAGLFQHMRSTHMDRLSSPNSYYEHFNRLATAGTFSPRLALDLPKIKPDLGSPERESRPAEDDLPTDLSNNKRRPLTPNPQAQTPLAPPSAPPGVFFCNQCNAGLPDFESFRNHLKSHIAEGMQLVCPHCGMSLPEQSEFERHVVGHFLITGSEFNCSSSCGKSFAKSEDLQQHLLSEHVLTLLKCSLCSELCESRMAMQLHLACAHSQETKLLRCSACLELFRSDAEFHVHVKTRHQLGGHPTLGATSSAPTNPLQCMFCRAVCSSELEMHFHLAAHARQFRCPSCPETFHVEFLLDRHMQSQHGGVKDKEANSPNMGSLYVNALLPPLAAAAAAAAATNNNSSIIDYNVAFKGLFGGASGGAGSGGGGAQSGGAPPSANKFYSPLQVDTNALKAQTSPHPALMYGLSQRYLMEMYAAKSTSPSGNEGVGNSQPPAPQATAPPPPPNASTATFSCGMCERQDLRSEAELHSHRKLAHNLKTGVSLRCAYCAGNFKSRAELEQHMKSCHNSTGKHKCLICDEVFPSPAILAEHKLQHSKVGQSGKCSHCGQPLEDVAAFRAHLSEHGSDGASLPLACICCRQTLHSEFELSLHAKFHTKSSSSGGSLQEPVCALCLEPLPDATEGPAKLCDKCCRKHNLNGKRGKHSEPATSLPAPPSAFVENRCNLCKMILPHAQKLQEHLVEHTFAGTEQRGFNCYICSAVFTAPGGLLNHMGEHGAHSRPYDCNLCPEKFFFRAELEHHQRGHELRPQARPPAAKVEVPSIRNTSPGQSPVRSPTIVKQELYETDTVESAGVEDEPENHPDEEEYIEVEQMPHETRPSGIGSQLERSTSSA

SEQ ID NO: 33193 - DNA, 3119 bp, DROSOPHILA
aactatttgcatacgagcatggcaaattgtcttcgctgtctcatcttgaactacacgtgcaattaataaatcaaaagggacagcctaagcccagcgtgtcctttcgtccttccgagcggaagtctcgggccaggccaagacaaacaaatgaagtgactggaaccgaaaaactttgccaacttaaggtattcttttctgcaagtgcccggattcgaagttcggcgggccaagagacgggcgttccactgcaactaattgcatttcattgcatacatttaggttgccccaccgaatcctttggctccttgctttcgcttgcagccgcaatcacttcgcacacacaacgtaaaacgtttcaaaattgtgctcaaatagccagtgagatttccttggagctgacaaatgggttgaggtggaaagccaaccacaagtgcctcgagtccttaaagggggagggcaagaggagtcaaggatgccaggaaggatgcgctggccaagtgttgagtgctagctatgcttgcactgggagaacttaaaattgctttgttaacgttttagttgttcaaaaactattcaagttttatggtaaagaaacttagaagactaatacttataaccttcgatcagccttaattagtcttagttttatttacctttacctatttctattttatgttattttcgtaaagtgtagaggaaggataagacagacaagttagcagccgggcaaatttagctccggagcaggaggcaagtagtgaagtcaagtgaagactgagttgtgtgcatgaatgaatgaatgaaagggggcggcaatgggcagcccgttcagaatgctgccgccggcaaggacgttgttcgtggcaggaagagcaaaaagcacaagaaggaagttgtgaaaaaatagcagtcgccacaaaacgaaacaaataacacagaaaaagcattcggaatggcactagagagaaatgtggccaagtgtgagggaacggtagatggttcacaggatggttggatggctggatggctggatggttggatggtcggatggttgaatggttgcggggggtatggcggtgaggtcatgtcgtggccgtagctcatgatgctgccgggtctccatttctggcatctctgtctgtctctcagtctcttcgacagctcgtaaatggcagccaggaaagtgatggcacaagggggaactgggagggagtaggaggatactctggtcccaacttgactccgaatgctggcccgagttcagcttggtgttgattgctgtttggggtttttaaaacgtagttaggctgcccggcagccacaggaccgcagcatatggaaacgacacccgcggcacaggtgtagagcaccctggagtgccatctccggcagccaggataacacccccaacgccaatttcaatggttatggctccagcacgcatgctgtgtattgtcgggactagaaatgtggcaacacacacacacacacacacactcatgggtttgtgacaccaagcgcttacctgagtaaaagctgtccaggctctgcaactcctcatcgtcgtagtcctcatctccgctgagactgagtagctcgtcgtccagctctagatcctccggctcctccgcatccaccgcatcttcttcgtggcctgcagtgaaaaggaaaagcttattttagcctggattgcaaaggggcaaatgcagttgggacttgacctcgacgtcttggatggaaatagcttggtggcaaaacgggcaggagcagcaggatgccctttccggatccccaagtgcaaggaattttgattatgctaagccctagggtgccataattccataccccctccggcaagtaagccccgatgtactgcttccttccccccaatcactagaagttaagagcatgaaagagtaccactacaaactgcgcatgtttcccgtaagagctgccaaaagagagttttctctctggaagagaactccttgttttggtctctcatttcgaaggaacagctgttggcagcacgtgctgcgaatcttggacagcaggaagtgtaattggggagcagggggaaaagtttgtctacagtgccacacaacttggcattactcatacgcaacgtttgacgtgcctcctggtggggtagtgtggggcgcccaatgtctcacgtgagtgagtgtctgacttgggtcgtggcaagtaagccaagatgcaaatcctgagggatatgctaatggggttgcgttacctggaggacagtgggaatagtgtattggtgaatatgaaaaggatagatgaaatgtcaagccattaattggaaaataaataaaattgtgttataccttcatatacatatgaatagaaaccatgttaccaccaaagtcttgagaaagcttaatttctcaagacttagatataataaatgatagccattcactgcaaagttgtttataacttttggaaagtcgatggacagtggctcaatatttctaacttttcactccacctacaaattccaatctttctcagccctcataaaacccaaactgatgtgaaacccttcgacatgaactcatcaatccatcgaccatcaggctttcacagcactagctactttcgcgttttcggcttttactagtttctaatgacaaaatgaaatttcgcgagcactgtagcacttcaccccccccacccatcaaaaaaaaagaaagagtgagatagtgggtgagtgagagggtagatgctgtggcaatgggttctgcaacattctaagcgcttgagaatttccttgatggctcgtcgtttcggcgacgtttcgatgatgtggttctgtggctgtggatctgcttttatgccactttgcatgccagcacataaagcacacagaatgtgtgagaggatagcggaaaaggacgaaagcggaggttggcaggactctaagctgccagtgaagctgggctggaccgccacacgtccaataatccttgtcctgcagctggggaatacttcatcagcggaaacaaaattttacgaatttctctctgcgattccatgtgtgtgtgtgtgtgtatatgagtatttttgggacgagtatgtaatgttgtgtgagttgc

SEQ ID NO: 33194 - DNA, 426 bp, DROSOPHILA
atgagtaatgccaagttgtgccacgaagaagatgcggtggatgcggaggagccggaggatctagagctggacgacgagctactcagtctcagcggagatgaggactacgacgatgaggagttgcagagcctggacagcttttactcagcaatcaacaccaagctgaactcgggccagcattcggagtcaagttgggaccagagtatcctcctactccctcccagttcccccttgtgccatcactttcctggctgccatttacgagctgtcgaagagactgagagacagacagagatgccagaaatggagacccggcagcatcatgagctacggccacgacatgacctcaccgccataccccccgcaaccattcaaccatccgaccatccaaccatccagccatccagccatccaaccatcctgtga

SEQ ID NO: 33195 - protein, 141 aa, DROSOPHILA
MSNAKLCHEEDAVDAEEPEDLELDDELLSLSGDEDYDDEELQSLDSFYSAINTKLNSGQHSESSWDQSILLLPPSSPLCHHFPGCHLRAVEETERQTEMPEMETRQHHELRPRHDLTAIPPATIQPSDHPTIQPSSHPTIL

SEQ ID NO: 33196 - DNA, 2793 bp, DROSOPHILA
ccagaccttgcgaatcgcatccgcatgccaaatacagtcgaactttagtaactggaacgcgatcaaagtgaagtctctgtttcttacttaacttgaatctactacattcttcaataagtgctatatatatttacgaacttcagcgccgaaaaagtactgttgcatacttttaaacagctttgtaagttaattaaattaaatcatttcaaggcatatttaaatgttgtttcatcaaatagtccttttaaaattatagtgccatttagcgatgtacgactgtataggggacgctgggcactgggcgcccgactaggttctagttgatgatgatgttctccatgccgtcgtcttgactcgcgggaattcgccgcccggcctggccagaaacacacagaaaagagcaacaaataatgaaccaccacgtctcggtgtgtgtgtgtgtatgtgtgttactgcttatgagtgtgtgggtactaccatgtgtgtttacgttccatttaaaacatggagcttgttttattattgtcagacagcagcggccataacggccagccagcgctttggccattggaatcgatggctttacacccaagtgccataatccaatgacgcacaggaataccgaatacatggggcatacgctcacagctacatattgcgatacggatgtatggatggggcctcatggagacatcaaagttgatgtgaccaggcagcggctccaatggggatagcccacagatacagggtgtgtatgcttatgtgcatcgctgcctgctttttagcggaaatgttaaaaaaaaaactttttatacattttcgaattgtgtgttcttagaatcactaattgatttataatttttttaaaataatttttaaaattatttttaattatgcgtccaatatactatatttcgtatctagtaaaggatgtttttccatagtaattattccgaaataccatacagcaccctgtatgagcccttcaatgtgattaaccttatccaatttccaggagcattccacacttttaaaccgtcattgtaaagacaccgaaatagaccaaaacctgtggggcaaggactcacgtgtccactggccagtgcccagtgaccagggggagccagtagatgcggatgtggacctgagatggtacaactacgaccacaacaacgtgcaagagcaaaaaccttacatttgctatttatgagactgtcgagagttattagccggacatgtgaacgacccaggggaaagcccaagacgacggcgatggacttgaggcaatgccagaggatgctggctagtttacatacgtgtgtgagctatatccttgtgcacacatacatacatatgtatgtacatacgtacgccagatatacatggatatatctttcggctagaggcaataaaatatgcaaattgaagtcaaacttaccagaggacttgcagtgtccgttggcattggcagcagcatcagatgcaacaacctcatcccgtgggtgttgtagttcttctgatccttcttctgcttcttcttcttttgccactgcagctggggccgctggctcatcagctgttggccagctttgttgctgtgattcattgggcacgagctggggccgctcgccaccccctccctcgggcgccacctcatcggccacctcctcgtcctcgtcctcgccctcattatcctcgttgtcctcgtcgccactgagcagctcctccttgggctccagcagtccggtgttttcctcatcctccttctcgccaactgcaaagaatgcgtacatgtatattataagaaaattgtacccaataatgaagtgtactcattttagtttctttaacaatatttcatgcagaatggtacttgtggtgaaatatttcatagcacacttttaggcaaccaatgaattggtgtatgtgctcgttgatcagattttcgattggtatatcgaatgaaattgtgcacaaatgattacctcgttgctcatataaattaaagttaatcaattgataacacttcgaacactcgcacaaattgctatgtgtcggatgtgggctcagacatcgggtgctatgccaacggctcatgcagattatgccaaagcactccccgggcggccatcgggccaaaaattctatttacacgctccgtgttttattgttccccttaccttgccaatagctcaaaactcagactccttggatggccaggctgggatggctgggatggctattccggcaaagccgccacctgatcgatggcctctgccgggtgccttgtgggtgtcgttgtataccaccccccccccctccaccacctctcaccgccccaaaaagaaaaccataaaccgagtgctctctgcctcaaaagtaattgcaagggtgcaacaacggaaacggaaactgctccaccagaagaacaactccggaaaatggaaatgtgtaacatgtgtaattgcgcaattaaattgaatttttcatacatttctccagttgccagtgatggtcaggagtgggcaagatggatgtcgtggtgtttgagggattctcctggattatggtccagccacaggtgagaaaagcattaatacacgcttggtttggaatacaattcagactactgagttttaatcaaatttgttaattatatacactgaattatgatttatcatttagttattgcttggcaacagttagataattggcaacaattttggataattcaattcactaacctttttaataacttcgatatattaatttaaatgaaatattaaaacttgt

SEQ ID NO: 33197 - DNA, 438 bp, DROSOPHILA
atgtacgcattctttgcagttggcgagaaggaggatgaggaaaacaccggactgctggagcccaaggaggagctgctcagtggcgacgaggacaacgaggataatgagggcgaggacgaggacgaggaggtggccgatgaggtggcgcccgagggagggggtggcgagcggccccagctcgtgcccaatgaatcacagcaacaaagctggccaacagctgatgagccagcggccccagctgcagtggcaaaagaagaagaagcagaagaaggatcagaagaactacaacacccacgggatgaggttgttgcatctgatgctgctgccaatgccaacggacactgcaagtcctctggtccacatccgcatctactggctccccctggtcactgggcactggccagtggacactgtggaatgctcctggaaattggataa

SEQ ID NO: 33198 - protein, 145 aa, DROSOPHILA
MYAFFAVGEKEDEENTGLLEPKEELLSGDEDNEDNEGEDEDEEVADEVAPEGGGGERPQLVPNESQQQSWPTADEPAAPAAVAKEEEAEEGSEELQHPRDEVVASDAAANANGHCKSSGPHPHLLAPPGHWALASGHCGMLLEIG

SEQ ID NO: 33199 - DNA, 4609 bp, DROSOPHILA
tcctgtaataatccgttttgctgtttcctccgtttttgatttcttttttttttgcgggaggacaaccaagtttcctacatctaaatatgtaaatattaggctaataaaagtgtggaaaataaaaaacaaataaaagaaaaacgtgcgaaaattgcgagtgaattgggtggaaaatgtgaaaatcaccttttgcctgcccctcgaatgttaaacctaatgacctgagaatctaattcaattttccttgattacaatccgaattatattcgtattactcacatctggtttcgtatggccgcaattctataactgatttttatggcagccgtctgagttatgggtgtgactatcctatatctaacctaattgcaagctaaataaaaatgtttataggcaataaaagaatactaaaactgcataaaagtcgccaggaataatttgtgaactcatgggaatatatctaggcatatatatatataaatatatatcgaagtcatgtgagactttgtgataatagttgggcccgtattctatttctatagtttttcaaaaacacaacattgaagtatattaacctacaatctattaactggttaatggtcaatcatatatattgattaagtataatcttaagtgtctaccaaaccaattaaatctctgttttgtattccttaagctattggcagtgattgttatcgtcatgtttcatataagaaagttgtagaaaagtaaatgaatgaagggctggcagagtttcacatgatccaacgaaaccactcggaaaattcggtaataaaaattcgttaactataggtatctgttcctaacctaggttgggctacagtgtattgggggtgtatgtgtgggacatttaacaaattgaacagcatcacagtgtacagccattaatttcacatacgattagccgttctaaaacggagttctataacagagtactactatcttcccactaaaattaatcaacaatgtgcccccccattcattctaatttacgggcgatatggtctgtccgaatttcctggccctctggccgaatcccttgctaccatctggacccattggagtgcgcaccaggctctcggcagctcgctgggcaaacgaaccggaacgcgaccgaggagatccgtcgaggaagctaccggttcgggatcttggctggccatcgtagccatcgccgccgccgtgcttgtagttgctcaggaagctaccggtgcgagatcgtggagatccttcgaagccttccgatccaaacgagcagcgacgatcgtatcccgagtccgtggatatacgtcttcctccgatatactgagcattatcatatgccgccagcttgctgctcagctgctggaagttgttggagtaacgacgtggccacacctggtagccaccgcctcctccacccaccagctgatcggtttggatgggctcccgctcgatattgaaatcgttcgacgggcgacgatagaagccactgctctcgctggcattcgagaaggttcgctcgaactgcatggatccgttggagaagcgacgctcctggttctgattattgcccggacagctgccattcgaacacaccgaggtctttctgtaactagtgtctgtcgtctgagcaaagtccgagacccttcgggagcatggacaactctccgaacagttcgaatcgcgacgttggggaactcctcccgtttccgagcaattgctggcccttcgtgacatcgaaggattgacttctggagtgtagttctgctcggagcagttggacagacggcgctgcagactgcttataccagacaccatcggattaccgcctgaattgacagcagaagatataggcgaaacatcgcccaaggcggccgctgtgttggccgaaattgtcgatgtgttgctgtatcgcctgggaccatagccgaaaaaaccattgggacccacctcctggttctggttgccaatgctcccacggggctgataatgctgatacggattggcatggtagctgggccccgtttgttggtagtaactgggctggaagtccgagttgttgcgcttgagtttgaagcgcagatccggtacagtttcgtggccggagaagctgccacctcgactccgctcgtagttggcatcgttgtagtagcgataattctccaccatccgggccaccggagcggcgatctggatgacggctgccttcttgccggtctttttcttgggcgccaccatctcgtagacctgaaaggggccattcagatgacgggcatccctggcggaagaggattctaagtactccactagagcacactccttttgctgcagttctggatacttgttcatgaactgacgcacatccacgggaatggccattccgggcttgagaatgcgtatgagggcaatctctccgcatggcgagaatagatccgataccttttcgatggttagcttgtccagtggcagatcacaggcaacgatcgtgcgagagggcatggtttcatcgaaactgggcagcggttcgattctgcgcaccttggtgcccacatcattcagctcgatcttgcgggacttgcgacgcactgcatctccaaccaccttccactccctggtcagttggcgcaccctcttgaagctggacaccagtttaaggctgacgaaaccctccttgttgcgtcgcacatgtttcagcaggaatgcatccttcaggatgctctcattggagaagtagaactccacggcatcggtgatttcggctgccagttcctcgctgggaatgagtgagggatctagtgtgtctatctcattgggtccttggggctcagtatcctgttcctggtgtaccggcacttcctgctccttctcttgcggcggctccacctccttttccttcttcatggtgaggaacgaacgatgggttctcttggcctccagaacgggtgagttggctggtgcgaccgccggaggtggagaagcatccagagtgaagttaggatgtagatagatgttatccatctggtgcttacggaacttctccaaattcgcctcactcaagacggccggtggcgtagtctggcgctcggttaggtccacctcggctatgatgtgattgtccacggccaggggcttcagctcatcaccctcttccgacgattcatccgagtccccaatggaggaacccatgcccacatccaccagttggtggtcagtgggcgacatgggcggagcagagggtgaagtatcctccgaggtgctgccattgctgctgcccagctgagagtccatcgattccatttggtggagcagcgcctgggccgagcgtctggcatgcatgcggagcagcttgcagggcagcgatgaggacaacggcaccaccgcctgggaactgcagctcggctgctcatcatccagctcctccatctccttggtcttgtccattgaagcaggcgaatccggtgctttcatcacaggcacagcggtgagaatgggcgctaggatcggagtggggtccacgggactcacaaggaacgtgtgaccctctgcaccggcatgtggagccttcacctcgtacacctgctccgccttatccctgggactgctcatggttacaacgaacgaccttggctgatgctctgagatgtttcttgggcactccagcaaaagcgaaaagctgtctttccttctttcggctttactctcaatagttgctggccaagccaagtgtaattctttccaatttctccgctccctttctccttctccttctctctctctctctctcgttcactttcactttcaagttcagtggggaaaagctcgctgcgggagctgcaccttacatcggatgggcccgattagccaagatgtgcatctgggtaacctgaaacccaaactgaagcgttcattgaacgtcagctgttgctggttggtaatgttggtgttgctggtgtagttagttgcagcagttgctggtgtttttttataccgtcgtttgcgtaatatcgcctgcaacgtgcttggaatttgtttggggcgtttggtcgcctgggtttttgttttatttctttttctaggccgcgcttgacaccgattcgccaaaaagttaataaataaaagttcaattaacaattttgtctgcgttttgggtaattttcgagttcaagttgttgctgctgcttgtttcagcttgttggttgttagttgttgttgcccgtttcctatgtatttccgtaaggctattcggttgaacttgtgtaaactttctgtttcgcacgcgactaaattgagttcatgcaacgctgcaacgcggagatcgactgaaattgcaaattgatttgaggtcggttaaataccctctgctttcgtttcaattttttttctttctgcctcttttttcgtgtttacagcagcaggcggccggcggcagcgacgtcgacagcggcagcgacgccagcgtcggcgacagcggcgttattgagcggtccaagtacgcacgataacaacgaaatgccaatagcaacaacaacagtgcgcagcgagagctgcgacgtcggcagcgataacttattggcaacacacacgaaacttgttgcgttgccaacaa

SEQ ID NO: 33200 - DNA, 2609 bp, DROSOPHILA
atgagcagtcccagggataaggcggagcaggtgtacgaggtgaaggctccacatgccggtgcagagggtcacacgttccttgtgagtcccgtggaccccactccgatcctagcgcccattctcaccgctgtgcctgtgatgaaagcaccggattcgcctgcttcaatggacaagaccaaggagatggaggagctggatgatgagcagccgagctgcagttcccaggcggtggtgccgttgtcctcatcgctgccctgcaagctgctccgcatgcatgccagacgctcggcccaggcgctgctccaccaaatggaatcgatggactctcagctgggcagcagcaatggcagcacctcggaggatacttcaccctctgctccgcccatgtcgcccactgaccaccaactggtggatgtgggcatgggttcctccattggggactcggatgaatcgtcggaagagggtgatgagctgaagcccctggccgtggacaatcacatcatagccgaggtggacctaaccgagcgccagactacgccaccggccgtcttgagtgaggcgaatttggagaagttccgtaagcaccagatggataacatctatctacatcctaacttcactctggatgcttctccacctccggcggtcgcaccagccaactcacccgttctggaggccaagagaacccatcgttcgttcctcaccatgaagaaggaaaaggaggtggagccgccgcaagagaaggagcaggaagtgccggtacaccaggaacaggatactgagccccaaggacccaatgagatagacacactagatccctcactcattcccagcgaggaactggcagccgaaatcaccgatgccgtggagttctacttctccaatgagagcatcctgaaggatgcattcctgctgaaacatgtgcgacgcaacaaggagggtttcgtcagccttaaactggtgtccagcttcaagagggtgcgccaactgaccagggagtggaaggtggttggagatgcagtgcgtcgcaagtcccgcaagatcgagctgaatgatgtgggcaccaaggtgcgcagaatcgaaccgctgcccagtttcgatgaaaccatgccctctcgcacgatcgttgcctgtgatctgccactggacaagctaaccatcgaaaaggtatcggatctattctcgccatgcggagagattgccctcatacgcattctcaagcccggaatggccattcccgtggatgtgcgtcagttcatgaacaagtatccagaactgcagcaaaaggagtgtgctctagtggagtacttagaatcctcttccgccagggatgcccgtcatctgaatggcccctttcaggtctacgagatggtggcgcccaagaaaaagaccggcaagaaggcagccgtcatccagatcgccgctccggtggcccggatggtggagaattatcgctactacaacgatgccaactacgagcggagtcgaggtggcagcttctccggccacgaaactgtaccggatctgcgcttcaaactcaagcgcaacaactcggacttccagcccagttactaccaacaaacggggcccagctaccatgccaatccgtatcagcattatcagccccgtgggagcattggcaaccagaaccaggaggtgggtcccaatggttttttcggctatggtcccaggcgatacagcaacacatcgacaatttcggccaacacagcggccgccttgggcgatgtttcgcctatatcttctgctgtcaattcaggcggtaatccgatggtgtctggtataagcagtctgcagcgccgtctgtccaactgctccgagcagaactacactccagaagtcaatccttcgatgtcacgaagggccagcaattgctcggaaacgggaggagttccccaacgtcgcgattcgaactgttcggagagttgtccatgctcccgaagggtctcggactttgctcagacgacagacactagttacagaaagacctcggtgtgttcgaatggcagctgtccgggcaataatcagaaccaggagcgtcgcttctccaacggatccatgcagttcgagcgaaccttctcgaatgccagcgagagcagtggcttctatcgtcgcccgtcgaacgatttcaatatcgagcgggagcccatccaaaccgatcagctggtgggtggaggaggcggtggctaccaggtgtggccacgtcgttactccaacaacttccagcagctgagcagcaagctggcggcatatgataatgctcagtatatcggaggaagacgtatatccacggactcgggatacgatcgtcgctgctcgtttggatcggaaggcttcgaaggatctccacgatctcgcaccggtagcttcctgagcaactacaagcacggcggcggcgatggctacgatggccagccaagatcccgaaccggtagcttcctcgacggatctcctcggtcgcgttccggttcgtttgcccagcgagctgccgagagcctggtgcgcactccaatgggtccagatggtagcaagggattcggccagagggccaggaaattcggacagaccatatcgcccgtaaattagaatga

SEQ ID NO: 33201 - protein, 867 aa, DROSOPHILA
MSSPRDKAEQVYEVKAPHAGAEGHTFLVSPVDPTPILAPILTAVPVMKAPDSPASMDKTKEMEELDDEQPSCSSQAVVPLSSSLPCKLLRMHARRSAQALLHQMESMDSQLGSSNGSTSEDTSPSAPPMSPTDHQLVDVGMGSSIGDSDESSEEGDELKPLAVDNHIIAEVDLTERQTTPPAVLSEANLEKFRKHQMDNIYLHPNFTLDASPPPAVAPANSPVLEAKRTHRSFLTMKKEKEVEPPQEKEQEVPVHQEQDTEPQGPNEIDTLDPSLIPSEELAAEITDAVEFYFSNESILKDAFLLKHVRRNKEGFVSLKLVSSFKRVRQLTREWKVVGDAVRRKSRKIELNDVGTKVRRIEPLPSFDETMPSRTIVACDLPLDKLTIEKVSDLFSPCGEIALIRILKPGMAIPVDVRQFMNKYPELQQKECALVEYLESSSARDARHLNGPFQVYEMVAPKKKTGKKAAVIQIAAPVARMVENYRYYNDANYERSRGGSFSGHETVPDLRFKLKRNNSDFQPSYYQQTGPSYHANPYQHYQPRGSIGNQNQEVGPNGFFGYGPRRYSNTSTISANTAAALGDVSPISSAVNSGGNPMVSGISSLQRRLSNCSEQNYTPEVNPSMSRRASNCSETGGVPQRRDSNCSESCPCSRRVSDFAQTTDTSYRKTSVCSNGSCPGNNQNQERRFSNGSMQFERTFSNASESSGFYRRPSNDFNIEREPIQTDQLVGGGGGGYQVWPRRYSNNFQQLSSKLAAYDNAQYIGGRRISTDSGYDRRCSFGSEGFEGSPRSRTGSFLSNYKHGGGDGYDGQPRSRTGSFLDGSPRSRSGSFAQRAAESLVRTPMGPDGSKGFGQRARKFGQTISPVN

SEQ ID NO: 33202 - DNA, 2572 bp, DROSOPHILA
aaaaatatgtcgtcctgctcatcggagcttagtgattggtcgttgtcattctcattgaggagggcatgggtcgagaacttatcgttctttgctgctttaaaaccttttttatcgttggggagcattttgcaatataagtattttcctatcctttaaatggtcaatatcttatcttatgatatgataagtctttacttacttatttaacacacaaaagcaagtggtttctggcacaatgctagtagagatatacaaatgtaacactttgcgaacgaacactaagttccagggttacttttcgcagtgtaagcatgcatgacagctagtggttgggtatgggcactcaacaattacttagcacctcggtgtcaagggggtctcgtctttcagcattctcattaattacacgccgcactaattaggctgttacagaatagcgaaaggattacccggagtatcacctggttgccggtcctatgattcattcagctttagccggcgctaatctgccatccgtaatgctttcgccaaatttacggcaatacttctggtatttccccagttgtcttgtcacgcacgagcgctgttcaaataaaatcgagtggaatcgagtccagtcatcacagtcagtcaacctttgtggctcccagccttcggcagacccattgaaccaacaaacaatggcagacgacccgacttcattacaagcccattaaaagcgggccgaaatttggctatataaagcgaccggcggagtggtagaaaaattttatttatttcacggcaccacagtgaatcactacaccataaatatgcataaatatataatttgttttggttttttactaattattctggaatgttcgttggcgtcatttaactgctcagcaccgccgaatttcaataactttgtaagaggaattaatcgtcgaagagtgcatgtaatataaactcaatcttgtaggatatcaacacttgctgtcgcactccggaattggatatgggtgatgtgccccagaagtgccacaaatatgtgagtggcttaaagtcggcgaactccaagtatcccagctatgctcatctggtaagtattttcaactgaatatagagataacatacctttaactttcgtatctaaaacagtgctatcctgattgcatttatcgcgagacgggtgccatggtcaatggaaagattaaagtgaacagagttaagcagtacttggaagagcacgttcatcggcgggatcaggaaattgtttctcacatagtgcaatccttcgaatcctgtctgtcgaacggtgcgtatgcgtgatgccattgacacttcaaattacattatgcctattcaatttcagttaaaggtcacatgaagtcattgaacattgagtcgtacaaagtgctgccccatggctgttccccctttgccggaatcatatacagctgtgtgaatgccgagacttttctcaattgcccccagcaaatgtggaaaaacgagaaaccctgtaatttggccaagcaattcgccgagcagtgcaatccactgcctcatgttccgttgcccagcagctgatgctacatatagattgatttatccaatgtaaacaacacacatttaaagtaaaagtttcgtccattaagtttaatctgtcgctagccttttgaatggcattcatatccgacctcgatttgttgaccattagccagcaaattgaccatgacaaccgagtgcgagtactttttgtcggcgttttattgggctttatgatcatacaaagttcgattggacaacagttgtcaactaagctgcaatgaaccagttaacctttgtatgctgccttttgttgtggtccgggtctcaggctgcgttccaggactttgtgattggacctgaagtaatataatccttggtactgcttcttgattacaataaaaacgcatacgtacttgtagtcctatgaaggtggtaacgatgtcgtcccgtttggtcaagaattatcggatgaggtggatgaggatataatggtgtcattccaggatgtacagcatgatggaatagtggataccaatctactgatgaaagctataatgcagcatgccaaacgtttgggcatgagcctggatgaacttggtgagcaatcgtactttggattttggtggtaatgcagttttataatatgtattttacagctagcttaaatgtgcagtcagaagatgaggaatctatgaaccaacttgggtgctcagctgagcaagacgtcttcggatacccagaaaagcccacttggcgggacgtactctttaactgagcccaataaattccatcactcagtgatcaaagcagctgactatgtgtgatttatttaagtttaatagtcccatctattacatgtcatcgcagcgaatgctgtattccctggcctcattgcaggtggcactcttgctccacacgctttccgggcaattacggtagacatatcgatgggcacacaggccatacattatcgccatcgagccacattttccggtgatgggaacacggcgacgtttcattgccttaatgagcaccttct

SEQ ID NO: 33203 - DNA, 456 bp, DROSOPHILA
atgggtgatgtgccccagaagtgccacaaatatgtgagtggcttaaagtcggcgaactccaagtatcccagctatgctcatctgtgctatcctgattgcatttatcgcgagacgggtgccatggtcaatggaaagattaaagtgaacagagttaagcagtacttggaagagcacgttcatcggcgggatcaggaaattgtttctcacatagtgcaatccttcgaatcctgtctgtcgaacgttaaaggtcacatgaagtcattgaacattgagtcgtacaaagtgctgccccatggctgttccccctttgccggaatcatatacagctgtgtgaatgccgagacttttctcaattgcccccagcaaatgtggaaaaacgagaaaccctgtaatttggccaagcaattcgccgagcagtgcaatccactgcctcatgttccgttgcccagcagctga

SEQ ID NO: 33204 - protein, 151 aa, DROSOPHILA
MGDVPQKCHKYVSGLKSANSKYPSYAHLCYPDCIYRETGAMVNGKIKVNRVKQYLEEHVHRRDQEIVSHIVQSFESCLSNVKGHMKSLNIESYKVLPHGCSPFAGIIYSCVNAETFLNCPQQMWKNEKPCNLAKQFAEQCNPLPHVPLPSS

SEQ ID NO: 33205 - DNA, 6973 bp, DROSOPHILA
ccatcaaacaaatacaatgttcatatattattttattatatgcctttaaaggcgatgactagaaccacgtgatggtttcgaacagttcatgttctgcaatcgggccatttcgcaagattcagtgccggaccagctggatgatggacaatggttgaagacatatctctgggcacaaattccatagaaaagtgagaatggagagcattgttctgtttttctttggggccgtgacctcctgttgctaatcatctcttgcacagaatccgaacagcccattaaaccattgaaataggcttcttcaaagtcctgattaccgaaaagcttctccagcatgagtcgggcattgtcaggatgaatagctccgtccacaactgtgttggtcttattgaaaatgcattcatagaggcactataacaaaaaaaactggcttactagatgcattataggtattagctctgacttacgggtgaaattctgggagcaccaactggcatatatttaccacactggcttttgaactggtcaaacctaaatgtgggatagacacagcagtccttgacaatctaaaagaataagttgtaaccaatatatcgatcgatcgttaagtatgattccttgaagctcacattgaaatcctgtctgcgagtacagtccacatcgattggatcacagccagccatcgctagcaatgagcagatcagcagggctatatgccgggccatttttttagtcagtctgagcttcgtctggcaccgtcggcttactttataactccagttccgtgacgatccactaattaatcgagcacagcaaaaacacattttaaacgacggtctcgtgagcgaaaatgtgcagtcatcgggatggactcatagcgggtcaaagtccaaacaaaattccgattgggggctcggcataagccagacaattgcaattagacaagcttatcggcttaaatgcaatcattttaaccagacaaacaaatctaggtaatccctaattaatgatccgatatgaacttggcgatcatcagtgtgagaaaacaggccatgagcagattggatccttctgaatctatatgcccacacccgttgtccgttagttcctcatcctttcccttaagtgcattcgtcttttcgtccaatttctttgtgcaacttgacagcaatttttgcagactattgcacttcggatcatctatccagttctcacggggacagttggcggttaggtataccatggtacactgtgcatgaagcatggcatatggcagacaggttgaggaagccatgcccatcttatccgccacctggttggagtagagcagcagaaagtcggcgtgtctggagcccagagcttcgcaagtctcgtgagctgccttaaaagcggccccgtatttatcataaccattcaaggggctgtagaggctggtgatcatcaggtagagctccggttttttgatcttgttatcctgatcaaggaggtcccagtgcctatacagacattcatagcggcactgcgaaaagattctcttttagctcattaacaggtctccacttaagttactcacaggaccatagtcatcccaaaacggtgtgcaattgctgccaacaaaggggaacttatccagaaaggatttgccacaacagtagaccaacttatgtgtatttagaagttctgtacatttctgcaatcctcccatatcattggatacactataaaccagcaaaggaagccacaagaaacccagtagatgcagcaccgaagacattttgaaattgcctccctataaagcagggcaagaattaaacgtaaaattttgaaaaaacaattttttggccgccagatgaagtaattttcaaagcaaagcactcatagctttagtgggttaatgtgcggggatagttgatcttttcatgtcatctctttgatagccgcacgcaaacatatttctccgcaataaaattgtatcattcggcggttgtagctttagttatgcggacagggcgtatacttgttgctttgatttttctaggtttaataattccctttcgggctgcaaagtgcagggcagcgcccaaatctgtgcaagtaagtgatatatcttatatacttatatttttctcgatgcaaaatgcattatttgcagaatgtacacgtttgttgctcagcacccctgcctaactggggagttttcaacagagagtgtcataaatcggccattcaagcaagtgtaagtattaataggatatctaaaagcaaagttaatttagcaaacttcctcatcaagtgccgtttagattgcgatttcaatgccagctcggttctgcagggaaatcgattgatccaagcgaaagttcgacccatgttggagcgcgccttttccaacgaacccaccatcgatgcatatgagtccaactttgccaaatgttcaacggtggtcaggagcaaataccaggagctatctccgctgagtcgtcaaagcgacgcctgtgacagacacgccctcttctacagcctttgtgcgtatgctcgcttgattttcacctgtccggacaaaatgtggcaaagaaataacaggatgtgccaggaggccaaggcctatgcgaaaaaatgtccttggccagcgctaaaaatgtttatgaggaatacctaaaagaagttaatacaaatgccagttatagtaatgatatctggggcttagtgcattttgtttttatttttcacaggttgcgtgatcatgtcgagaacactatgctcacattgcactcgatagcctccgcagttgccattccgaccatccaattctgcgatgtagtaacgcttaggtaattcctcataccgagagctgctgggactgaacattacatgtattaagctgcctagcacaccattgagatctcccaattggtagctatttgcctcacaaatcagtcttaataaacagctgtcgcctgcgcctaatccatgcctgaaaagtatatgcagatatatcagctgaagatgccagaaatcttggaatttctcttacaattcgaaccgatggttgattatataatagaacttagtgcgtgagagtagtgacctactctggcgatctctgcccacagattcacccatgccatccaagggaaatccctgaaagaagtccttgtagtcatcctcatccacttctggcggtggctttggctttgacttgtgctttttcttatgcttatgcttgggcttatttttctgtggcttgataacagaaccgggcttaggcttactcttcttctttttcttatcatgatgatgtggatggtgtttgtgtttgtgcttattaccagagttttgatcatcatcgtaatagtcatcgtaaacgaaatcatcattctgatgatggccatggtgatcactcagtaaactttcatcattcgtgccatttccatgtcgctgaataggaaaatatgtttatgattagagtttgacctctatagaaatctaattaaaatcttaccaaaaacggtggtttctgtttccacgatcttggtaaatcgtaggacacttcaaaattataggacaaaaaggctttttcaaaccgtaagtccaaaggcaaagcgatggccacaaaaagctgagcagggcataaataatagattttattctgcactttttataaatatcaaagataaaaacttaccgaagatgctccacccgtacaccaaacaaatttttcctgtgagttcctgaaaaaaccaaaaatcagaagaactaggaatgttccacgaccatccattgtagccaaccaccctcattcaactgaagagtcagttttggaaagccaaagtgaaaacctttctttctagctagaagtgatgatccaattaatgatttctagtttcaagcagcgaaagttgctaattgaaaagccagtaagtcaattcaggccaaatggtatgttctagtaacagatttaggaatattttatctatattttattgcgttctatgtgcttgaaaatatcttcaaaaggttctgatataagctcaagaatactttcgccacaacctggttcgtagacatggcagtgaccgttccaaccatcgtgctccgcttggtaatagcgcagtggtaaatcttcagactccgatgagctgggactttaaaatttaaaaagttatattgggtcattaagaggatgccttcataatacctgaataaaacgtgcatcaaactgcccagtacgccgttgaattcatccaattgagcagcacttgtctcacaaatcagtcgaagcaggcaagattcacctcgaaaaccacttctagaatacttagctaacttagtatagtcacaattccataagtaataactaacctttttagtttatctacgaaaatgcgatagatattggaacgtgtgagcaaggatctaacttttcgttcttggggaagaacttcggtgatttcctccacttcttcactacctgcctcattttcctccttcactgtgcagttttggcaaccagcggccaatttgcgatccgtttccgtatcggtttcatctacaacttcctccgactctatgggaccattttgctggaatttgagcgatgggtaaataaccaaacattactcccattctggttgaactgttaattgtgccataaaggcgtgttaattgtcaacaaatgtggcgttttatagccgtaaacaaacctaaaatgaaacttacaaatattgtccatttctcccagtttgcgggtaaattgtagttggcctcaaaattgtacgagacaaacacatttcgatgcggcaactcgaggggaacggcaatagcggcgaagatctaaaaacaatatgatagtagtactttttcggctaaataaattcttgaagaactcacaccgtgggtgctggaagctgtaaaggccacaaaggagttggttaagtcgaggtaaacggttaaaaggaaaaccaggccaagaaagtaactagtgaaattcattttcccgacccagagacagacgatagaccaccacgatgctcagacagcaactgaattgcaatctactcgaaacactcgcaacaagtgcgtggcaaacgccaagcaagtggctgctaatttgataggtaaacccccagaaagatacttggtttggttcttggtcaacactccagtttatttgcgccctcgtcggcttacaatatcgcttaaagactgttccagtgacacggaaaccaggtccaagatgttgtgatcacaacttttggtatacgtggagcactcctgctgctctcgaccatcccattcggcctggtaatactcattgggcaggtgctcatccttggaactgctgggactataattaaatgagaagtttgaatgatcttcgggctttcttaaaaaagtgattccaactgacctgaatataatgtgaacgaggctgcctaaaaatccattaacttcacccagttgtgaagcatttgtatcgcatatcaagcgcagcaaacagggttcagctggaaaccctgacctaaaatatgtaaatttaccgattaaatattttaatatatatatgtgacaccgaccttcttaatttatcccttagcattgcataaaataccgagcgactcatcagagttagaccacgtttttcgcgcgaagcagctttagttgagttattatttgatgaggtgctatttatatttccctctattttccaatctgtgcaattctggcagtgtcgcccttcggcctcacgtccagttgtcggatatgtgagatagctgtcctcaaagtcctgacccatctataaatgttgacgaacacggcgttcaaacaaaagactcaagaagcgaacttcgataagaaacccaccaaaatcggtggatatttgtacacgtgttccggttgatagtaattaaactcgtagttataggacagaaagacattgcgatgtggcaagccaatcggcaccgatatggccatgaatatctacgaagtaaaaattttagtttttagacaatagctcactatcacttgagttgaaattaccccatactcggagtttgtggtgaaaagcagcgcagacttaaccaaattgaagttatttattatggcacagagaaaaagaaagggtgcaaatatcaaagttctgtacatggtattgataaatttctaaaatatccaatggtaaataatatccgatgttcgactgtgagcgttttaaaaccaactgccggccgccttggttaaaagtcgacaagaaaggtgcgtttccaagaagctgttaattaaaacgacgaattggaaatctatgtcgggtcgaattggtttaatgcagatcaaaccataagcgcctgatttactatccagtttatggtcttccatttcgtctatccagagtttccctaagaacatcgtgcaatggccttgatatcaaatccaatacattctcttcacattggctagcataaaatgagcagtcgccatgacgaaggccatcccattcagcttggtagtagtctttgtcgagattctcgtcattagagctgctgggtctgcaagaggaaaccccagtgatttagtgtggtgctaaaaatatctttcgcttttcaaagttagcacgcagggtctgagctttcattatcatatgcagatcgtgaaaagattttatactcacgtgaacaagatatgcactatgctgcccaagagtccattgacttcgccaagcgttgaggaattcgtttcgcaaatcaagcggaggagacaggactccgcagggtatcctgatctgtaaggaatgccattagtagtaggtcatatagttttttaaataaaaccaacctttccaatttatccttgagcattatgtagaaattagttcgactcatgatcggtaaagttcgtttttgggttgaactattatcatccacagaacgaaaggatctgctactactactatcatctccaccagtggtgttatacg

SEQ ID NO: 33206 - DNA, 1920 bp, DROSOPHILA
atggccatatcggtgccgattggcttgccacatcgcaatgtctttctgtcctataactacgagtttaattactatcaaccggaacacgtgtacaaatatccaccgattttgatgggtcaggactttgaggacagctatctcacatatccgacaactggacgtgaggccgaagggcgacactgccagaattgcacagattggaaaatagagggaaatataaatagcacctcatcaaataataactcaactaaagctgcttcgcgcgaaaaacgtggtctaactctgatgagtcgctcggtattttatgcaatgctaagggataaattaagaagtcccagcagttccaaggatgagcacctgcccaatgagtattaccaggccgaatgggatggtcgagagcagcaggagtgctccacgtataccaaaagttgtgatcacaacatcttggacctggtttccgtgtcactggaacagtctttaagcgatattatcttcgccgctattgccgttcccctcgagttgccgcatcgaaatgtgtttgtctcgtacaattttgaggccaactacaatttacccgcaaactgggagaaatggacaatatttcaaaatggtcccatagagtcggaggaagttgtagatgaaaccgatacggaaacggatcgcaaattggccgctggttgccaaaactgcacagtgaaggaggaaaatgaggcaggtagtgaagaagtggaggaaatcaccgaagttcttccccaagaacgaaaagttagatccttgctcacacgttccaatatctatcgcattttcgtagataaactaaaaagtcccagctcatcggagtctgaagatttaccactgcgctattaccaagcggagcacgatggttggaacggtcactgccatgtctacgaaccagtgtcctacgatttaccaagatcgtggaaacagaaaccaccgtttttgcgacatggaaatggcacgaatgatgaaagtttactgagtgatcaccatggccatcatcagaatgatgatttcgtttacgatgactattacgatgatgatcaaaactctggtaataagcacaaacacaaacaccatccacatcatcatgataagaaaaagaagaagagtaagcctaagcccggttctgttatcaagccacagaaaaataagcccaagcataagcataagaaaaagcacaagtcaaagccaaagccaccgccagaagtggatgaggatgactacaaggacttctttcagggatttcccttggatggcatgggtgaatctgtgggcagagatcgccagatcccagcagctctcggtatgaggaattacctaagcgttactacatcgcagaattggatggtcggaatggcaactgcggaggctatcgagtgcaattgccgctatgaatgtctgtataggcactgggacctccttgatcaggataacaagatcaaaaaaccggagctctacctgatgatcaccagcctctacagccccttgaatggttatgataaatacggggccgcttttaaggcagctcacgagacttgcgaagctctgggctccagacacgccgactttctgctgctctactccaaccaggtggcggataagatgggcatggcttcctcaacctgtctgccatatgccatgcttcatgcacagtgtaccatggtatacctaaccgccaactgtccccgtgagaactggatagatgatccgaagtgcaatagtctgcaaaaattgctgtcaagttgcacaaagaaattggacgaaaagacgaatgcacttaagggaaaggatgaggaactaacggacaacgggtgtgggcatatagattcagaaggatccaatctgctcatggcctgttttctcacactgatgatcgccaagttcatatcggatcattaa

SEQ ID NO: 33207 - protein, 639 aa, DROSOPHILA
MAISVPIGLPHRNVFLSYNYEFNYYQPEHVYKYPPILMGQDFEDSYLTYPTTGREAEGRHCQNCTDWKIEGNINSTSSNNNSTKAASREKRGLTLMSRSVFYAMLRDKLRSPSSSKDEHLPNEYYQAEWDGREQQECSTYTKSCDHNILDLVSVSLEQSLSDIIFAAIAVPLELPHRNVFVSYNFEANYNLPANWEKWTIFQNGPIESEEVVDETDTETDRKLAAGCQNCTVKEENEAGSEEVEEITEVLPQERKVRSLLTRSNIYRIFVDKLKSPSSSESEDLPLRYYQAEHDGWNGHCHVYEPVSYDLPRSWKQKPPFLRHGNGTNDESLLSDHHGHHQNDDFVYDDYYDDDQNSGNKHKHKHHPHHHDKKKKKSKPKPGSVIKPQKNKPKHKHKKKHKSKPKPPPEVDEDDYKDFFQGFPLDGMGESVGRDRQIPAALGMRNYLSVTTSQNWMVGMATAEAIECNCRYECLYRHWDLLDQDNKIKKPELYLMITSLYSPLNGYDKYGAAFKAAHETCEALGSRHADFLLLYSNQVADKMGMASSTCLPYAMLHAQCTMVYLTANCPRENWIDDPKCNSLQKLLSSCTKKLDEKTNALKGKDEELTDNGCGHIDSEGSNLLMACFLTLMIAKFISDH

SEQ ID NO: 33208 - DNA, 2582 bp, DROSOPHILA
acttgcagctgcaccttgggcttgccctcaggagatatcttttgagctgcatattaaaaattaagaggttaccaaaactggtgaagaaggctttgaggaacaacccactcttgatatccgcataacgatgggagactgttaccgtgtcccggtgttccgccatccaggccacacgctcattcattacgtagagcgtgccgtcgcccttcttgtaccgcacctcgcccatctggagcagcacgtcctcactgctggtggtcatcttgttctacgcccggcgctcagcagtcgaagtcccagtcgcagatccacgctcgccgtctcacatgagagccttcgaaaggacgagaagggggacgccagaagattcctgcaacctgaaagagcatgaaatgcgatctaagaagcatcttcggctggcggaaaagtgccgcctggtgtttgcgtatgtcgcctgcgccggcgatacttttccccatttcgcggtcggcaaaacgcacaatcccacgttatttgcacgatattactggaaactcaacgcacctcagtcaggctagggatgtaagaatacatcgatgtatcgagaatcgatgtaccgtgcccataattttcgatgttttttgttgatatcgatgctttgctgaaccagctgtttaattatacaccgttcacacaaccgcgttttggttccatgtgaattatttaaatcgttctagatttaaataaaagtttttgtgtgtgttcttttttatttcttttactcctattttcagtcagtttcttcttattatcatatatcatcgtatatttatttatttgtatatgctgatacttatcattgaatgaatcatatcttaaagcttataaatgaaaaaataaatggtttatacatgtagttattaagttatttaaaatctgcccaataaaggcgcttaagagatttatttagtgcaatctgtgtttattggcctagaattttataccactaacttaactaacttcagtgccttgtgcgctccacagttcgcccccgatcgagtagctcccggaaggttttgacctcgtgtcggggtatgctctcccggtacttgggctgcatcagcccgtagatgaagtccagctccgtctcctcgtcgtgtcgtccctccggcaacttggctaggagcgctcgctgcttgcagatgaatgagtcgatcacttcgtcgtaggactgcttcgtctcgaagatctccatgtatatctggtaggaaggtttagtgggcgagaagtgatcgcgcagcagctgcagggcatccgaccaggtcttggcatcccggcgcacacccttccaccacaccacggcaatgctcttgaagagcagcggcaaaccctttagcgcatccttgtcgctgatgccctccacctctttatacgtctccacggcattgatgaactcgtccacggcatcgtgatcccgctggccactgaatctcaccgtgcagttgctaaagctacccttggatggcggttcctctttgattggccccagcgatttaatggtttctatgaatatgcgaaactgttcgtcggacatctgcgtcattttgttgccggtttcttgggtttgtttgggtttaaaaaatgagtaaacaagcgcccgaaatagaccagctcaattccgatttcaagccccaatcgttagacggttggggggcaactggcaatttcgcttgttgtgaaatgaaaagccacattgctctcctccctctctctttctccgtaagtaaaagctttttcgagtttcgaaaaatatccaacactctctctctcttcaacatttttgaataattggagagcacagtttgtggcggttcctccgcaaggaggccaccacgtggaaggaagccatcgctctcatccgcgaacacttctcgcccaccaagcccgcctaccagatctacatggacttcttccaaaacaagcaggacgaccatgaccccattgacaccttcgtcatccagaagcgagcgctgctggcccagctgcccagcggtcgccacgacgaggaaacggaactggatcttctgttcggtctgctgaacatcaagtaccgcaagcacatctcccgccacagtgtccataccttcaaggatctcctggaacagggccgcatcatcgagcacaacaaccaggaggacgaggaacagcttgccacagcaaagaacacccgtggctccaagcgcaccacccgctgcacctactgcagtttccgggggcacaccttcgacaactgccgtaagcgccagaaggatcggcaggaggagcagcacgaggagtaggcgacaaaaagaacatcaaatacccaacaggcagcagccaacgtcattgatgaccttatcgctgctgccgcccacccaaacagaacttttcgtagcctcgccagccgatcgacgtcagagagagcccaacaaccggagagctggagatggggagcagccacatcaacagcagcaacagcagccacatctcttcatactcttcatactcactggcaatcggcgtgccggtaagcctcgactagcttctgaaatccacaaatccac

SEQ ID NO: 33209 - DNA, 582 bp, DROSOPHILA
atgacgcagatgtccgacgaacagtttcgcatattcatagaaaccattaaatcgctggggccaatcaaagaggaaccgccatccaagggtagctttagcaactgcacggtgagattcagtggccagcgggatcacgatgccgtggacgagttcatcaatgccgtggagacgtataaagaggtggagggcatcagcgacaaggatgcgctaaagggtttgccgctgctcttcaagagcattgccgtggtgtggtggaagggtgtgcgccgggatgccaagacctggtcggatgccctgcagctgctgcgcgatcacttctcgcccactaaaccttcctaccagatatacatggagatcttcgagacgaagcagtcctacgacgaagtgatcgactcattcatctgcaagcagcgagcgctcctagccaagttgccggagggacgacacgacgaggagacggagctggacttcatctacgggctgatgcagcccaagtaccgggagagcataccccgacacgaggtcaaaaccttccgggagctactcgatcgggggcgaactgtggagcgcacaaggcactga

SEQ ID NO: 33210 - protein, 193 aa, DROSOPHILA
MTQMSDEQFRIFIETIKSLGPIKEEPPSKGSFSNCTVRFSGQRDHDAVDEFINAVETYKEVEGISDKDALKGLPLLFKSIAVVWWKGVRRDAKTWSDALQLLRDHFSPTKPSYQIYMEIFETKQSYDEVIDSFICKQRALLAKLPEGRHDEETELDFIYGLMQPKYRESIPRHEVKTFRELLDRGRTVERTRH

SEQ ID NO: 33211 - DNA, 2841 bp, DROSOPHILA
aggcagcagccaacgtcattgatgaccttatcgctgctgccgcccacccaaacagaacttttcgtagcctcgccagccgatcgacgtcagagagagcccaacaaccggagagctggagatggggagcagccacatcaacagcagcaacagcagccacatctcttcatactcttcatactcactggcaatcggcgtgccggtaagcctcgactagcttctgaaatccacaaatccacgctgtttgtattgctattcgcaatgcctcgaaaacggctctattttcatataatttcacgccgacttgcggctactttggcacagaacgccagcttttggaaagcaataatttttattgcaacattgaacctttatttgcaactagaaactagatttcgagaatcatcgggcggggcggctgaggatctggcatttcgtccgtaagatcggttattcgcaatggaggaatatgatattcgaaccaaatggcgggtgaagtgcctcggcatggagctccattttcttcgaatcttatgttttgacattgcgagtctgaaatggatgttgcctgatctccagccgccccgcacaaccgttgattctcacaaccgccggctccactttgtgccggtcagcggagaaaaagcgattatttggctatcaaaagatatgatcactgtgttgagagacatggcaatcatcgctattgtaaccatatatttgctgatttttcgtctgatcctggtcctttgtgaagctagcaaaaaaccccccgcccggtgaatgcccacttagatccttttgcaggaggatttcgacggccctgaaggtgggcgccacccgtttcgtgatgattcactctgagcaataataccaaaaacatagaccttccctctcttattggctctccccaatgcctcaagctttttcgaagttcgatttcacaacaggcggatataaaagggctgcaatgtgggagagctgttcagttcaaatcaccggccgcattcgctacactggctttgtccgccgactgaaccaagattaatttgatcacctaacctcacacagcagcgaaaatggcccagcttacacagatgaccaacgagcagctccgcgagctgatcgaagctgtaagagcggccgccgtgggcgccgccggaagtgcagcagcagccggaggagcagacgccagcagaggcaaaggcaacttctccgcttgcacacacagcttcggcggaacccgcgaccacgacgtggtcgaggagttcatcggcaacatcgagacatacaaggatgtagaaggtatcagcgacgagaacgccctgaagggcatctcgctgctgttctacggtatggccagcacctggtggcaaggcgtccgcaaggaggccaccacgtggaaggaagccatcgctctcatccgcgaacacttctcgcccaccaagcccgcctaccagatctacatggaattcttccaaaacaagcaggacgaccatgaccccattgacaccttcgtcatccagaagcgagcgctgctggcccagctgcccagcggtcgccacgacgaggaaacggaactggatcttctgttcggtctgctgaacatcaagtaccgcaagcacatctcccgccacagtgtccataccttcaaggatctcctggaacagggccgcatcatcgagcacaacaaccaggaggacgaggaacagcttgccacagcaaagaacacccgtggctccaagcgcaccacccgctgcacctactgcagtttccgggggcacaccttcgacaactgccgtaagcgccagaaggatcggcaggaggagcagcacgaggagtaggcgacaaaaagaacatcaaataccaacaggcagcagccaacgtcattgatgacctcatcgctgctgccgcccacccaaacagaacttttcgtagcctcgccagccgatcgacgtcagagagagcccaacaaccggagagctggagatggggagcagccacatcaacagcagcaacagcagccacatctcttcatactcttcatactcactggcaatcggcgtgccggtaagcctcgactagcttctgaaatccacaaatccacgctgtttgtattgctattcgcaatgcctcgaaaacggctctattttcatataatttcacgccgacttgcggctactttggcacagaacgccagcttttggaaagcaataatttttattgcaacattgaacctttatttgcaactagaaactagatttcgagaatcatcgggcggggcggctgaggatctggcatttcgtccgtaagatcggttattcgcaatggaggaatatgatattcgaaccaaatggcgggtgaagtgcctcggcatggagctccattttcttcgaatcttatgttttgacattgcgagtctgaaatggatgttgcctgatctccagccgccccgcacaaccgttgattctcacaaccgccggctccactttgtgccggtcagcggagaaaaagcgattatttggctatcaaaagatatgatcactgtgttgagagacatggcaatcatcgctattgtaaccatatatttgctgatttttcgtctgatcctggtcctttgtgaagctagcaaaaaaccccccgcccggtgaatgcccacttagatccttttgcaggaggatttcgacggccctgaaggtgggcgccacccgtttccggtagcggcttcggctgcttccggtttccggtgtcgcaacccttcgcgatgtcccccgtgcgagtggagctacagtgggcgtgagccgggcaaaacctaaatttcttcggagatttaaaaaaccaaca

SEQ ID NO: 33212 - DNA, 841 bp, DROSOPHILA
cgcattcgctacactggctttgtccgccgactgaaccaagattaatttgatcacctaacctcacacagcagcgaaaatggcccagcttacacagatgaccaacgagcagctccgcgagctgatcgaagctgtaagagcggccgccgtgggcgccgccggaagtgcagcagcagccggaggagcagacgccagcagaggcaaaggcaacttctccgcttgcacacacagcttcggcggaacccgcgaccacgacgtggtcgaggagttcatcggcaacatcgagacatacaaggatgtagaaggtatcagcgacgagaacgccctgaagggcatctcgctgctgttctacggtatggccagcacctggtggcaaggcgtccgcaaggaggccaccacgtggaaggaagccatcgctctcatccgcgaacacttctcgcccaccaagcccgcctaccagatctacatggaattcttccaaaacaagcaggacgaccatgaccccattgacaccttcgtcatccagaagcgagcgctgctggcccagctgcccagcggtcgccacgacgaggaaacggaactggatcttctgttcggtctgctgaacatcaagtaccgcaagcacatctcccgccacagtgtccataccttcaaggatctcctggaacagggccgcatcatcgagcacaacaaccaggaggacgaggaacagcttgccacagcaaagaacacccgtggctccaagcgcaccacccgctgcacctactgcagtttccgggggcacaccttcgacaactgccgtaagcgccagaaggatcggcaggaggagcagcacgaggagtag

SEQ ID NO: 33213 - protein, 254 aa, DROSOPHILA
MAQLTQMTNEQLRELIEAVRAAAVGAAGSAAAAGGADASRGKGNFSACTHSFGGTRDHDVVEEFIGNIETYKDVEGISDENALKGISLLFYGMASTWWQGVRKEATTWKEAIALIREHFSPTKPAYQIYMEFFQNKQDDHDPIDTFVIQKRALLAQLPSGRHDEETELDLLFGLLNIKYRKHISRHSVHTFKDLLEQGRIIEHNNQEDEEQLATAKNTRGSKRTTRCTYCSFRGHTFDNCRKRQKDRQEEQHEE

SEQ ID NO: 33214 - DNA, 5993 bp, DROSOPHILA
tatggttgtaaacttatttttaatgactcatatcaatgtatttcagttcccaaccactgtgcaactgtagcttgaactcaatgtgcgactctgagttatctaatgcccaaaaatcgggtacgatgccatacagtgaatgcaaaaactatgcgctcggtgcgctaatgaaccgaccggcgttcatctatcaatgtcatgccgttggcccggccaagaatggaccctttgtcccgttggacggataaatttcgattttcaatttgattggcttttaccagcacaatcagaaagaactcggttggggtgggtggttcatttgggggaatctcggacacctggggagtggtgctgtggtactgtggtgcattggtgctacccacacacgccaaggagcaaaacataaatcgttatttggttgacacatttttgtggccgctcaggtggcggttcaattggctccattggcgttttagcgattggtcgggtttagtgggtcgaaagcgaaagtcgagctgctcagcgagcagtgtatttcataatccaattaagcattagacgacagctgactgacggccaagcggcgaaggaagcggctcattagccaagatcagcaaagctggctggctaccgtgccacgcactccattcaaagttaattggattcgataaggtcaagaacaatgagccagggagtggtccaaagcccacggatgctgcagagctcactgaatatgttgtgacttggtggaggctgtgatttgctctgtgaccctcatactggctcaatatctaacttgtctaatttcagatactaaggggatacagcatataggaaatgatttcatgtctaattgagcattttaaatacggcttaatggctgagaattttatggtttagtcttcttatttgtataattaagagaagctcaaagataaatatatcttttagttaaaattttcttgctaatcccattctatattactattatagatcatataactcaccgtttctgctggttgctctccagattgctggcaatcacattgtcatgggcggtggatctggcacgcggcaacaggggcggcggtggcgccacgggactggccacattttcgaggatgggctgtggagtcgcgtggtgcgggcgcttgcgactgccgcctcctccgttggcgagatgcttgtgctgccggcggagaataatagaaatgtttagaatatattcgaatccaattaccaaacagtagttgcatcatgcatgacgacccacctgcaagctcgttggcttcttgggcaccagcggtggcaccttggcggcgacaattgcggtgggcggtggtgcttcgtaggtggtgcgacgtgtggatgctccggcgaagcaattccgccggttgggcgagggcggtgggcgtggctggagcacttccggcggcggtggcggcggcaatggctcatcgaaggtataactgatgtcaagttcactctgcggcggcggtggcagctcaggcgacggcacccgaagattgggatgcttgggcggacgctcgggcggcacatggggcggttgggcatggcgatgctgctgcgggtggtgctgctggtgggccaaggcggcggcctgctgcaacagcagtttgtcccgcatgggtgcgtattccgttgccgaggatgtgcgtctggtcggcacggccaaacgtcctcgtggtggcggcggcggaggtggcattccgcagtcattgaaggagattttctcggcattgcttatgttcctaatgctcggtcccttgacctgaccctgtgcctgatgcagctccctgaactccgcgtagtccgaggccgaactggagcgccttagcagattgggcagcagactccccgaacgtcgtggcggtggtggtggagtgggtgaactgcagtcccgagtcgatgcggagttactcccagtgggcagacccaccattatgggactcaagttgttcggcagtgatttgcgctccacatgacacgcttggtaggattgcgagtgcggacgtagtagctgctgttcctccttctgctgctgctgctgtcgttccacataggactgcactgcgttcttctggagagcctttagagccggattcgagaggcggtgcgtcttggtgggctccaggtaggcaaacttcggtggctcccccaactgactgcgctcaaagtcgttaatcctctcggccaccgagtgccaggtgggctgcactgtggcccccgctggcgttatcacaggaagtctgatgggtaagcacaaacacatattagttaaataaattagaaaatgaagtatctggaagagatctactcacttggcggacttgtgcagcccggagctgaactgcggcttgggatgctgcacgtactgcgaggtgttgctgtgcaccggctccgtgtaggtgctcaccgggaacaggcgatggttgctgcggtaggaatcgatgctgttcgtgggactctgctcccccatattgggtgtactgcaactgagggcctccgactttcccagggacaactgcagcttgctgggcttaccagctggcggttgtggtgcaatggtgaccacggcctcgctgctggaaatggtcacggaaatgctggacttgtgctgctgaccagccgatcgtcccaacatcggattctgatgcggattcttttgctgcaggtcgcccatggagtgggattgtcccatgagggagcgaggtttctccgtgggcgaggccagctccagcagggaactttgtgtgctcaacgtggactggttggtgtggtggcgactcgggtgctggtaatcctgctgctgctgctgctgctgctgaaagtggtgcagcaccatcgaggtgtgcacgggcggatagctgggactgtgacggtgctggatgcgaagtggctgcaccgacggcggcgattcctcgccattcgcctcctcggagatcatcatctgcgaggagttgctcgcagtgggcgagctgtcgccttgctcctcgttgttgtgcagatacagcacgctctcgctatgatgacgcttgggtgtcggcacccgggaactgtggacaatgcgctgcgaggaggaaactgcaatcgaaagggagaacggttagggcgtgtcctcggccattctaaaaaggagttgcggccaaaacggtaaaagtgggccaacggttagccaaggtcgtgggggagtgggttcgcccgccagtcacccagcattttcggcaaccttctcttctggcaactggccaaccgttcacccccaaaaactaactgtgactgccactctgaccccactcgaattatggccacgattagacattttttcagcgcagtatcagaatggatacacctattttttgctttaattgaatcactgcagctgaatttaagcctgtaactcctgaaaatgtttaatggaacgggaagtgcatactgtttggtagctggaaataccatgttactaaagaatttcgaaaatatttttgattccctctgcaaatgatttgaataagttttatataaatttaactttgtaaaccgcacagaccataatgcatatctctcactttacgatttaaaatctggtggcattctggatgacagtcgtggcacgcgagttacttacccgattcggagatggcgctgtagccggttgcatgactggcttcggatatatcgctcatggagcccagccacttgagggtttccgtggaggaagtgctttccgagctgttgttgttgttgttgttggtggcgctgccgttgctattgttgttgctggatgaggatgaggaggctgagtgggcgtgaccgtgggaatggccatgggagttcgaatgggaatgcgcgtgagaatgagagtgggagtgagactgacgggccaacagcggaatgggcgaaggcgccacagagttgctgcaaacggaggacagatcgttctccgaccaatgatgcgattggcgcgacagcagatcgctctcctgacgtaatctgcaagtgaaaatagaacagcccgtcgaaatgtcggaattagagttgaagccaacgttaaaatggctgtaagccaagccgtgctttttggcaaatcattgcgtgctacagaaatttgcgatttctggggtctgcttttcgcatggccgcaattacttgaatttcttgcctagccttcggatcgggcaatggagccaccggcggactctcttcggtacttggggcaagttcagatagctcagatcgtcggacacacagacagatagtcagttagactgaaaatagagctaaaaccggagatagagatagagatggtgatggagacagagccagagccaagaagaccttgagagccgagcttaagctgctcgttttcggttttatttctcgttgctccgtctgcgacttatgtatctcatgtgtctgcgttaccaagaattttttatggcgttttttagtgtacaaataaaattcataattgtcgttcggcatttgatgcgagtatgtgcgcagaaaacgtgtttgcaatgcagccacacggagagaaaattacacagaaaattacacggaaaattgaacatcaagtggttctatcaaatgtgtgtatacacatcgtaattgtccactggtggtataactttacgttacattttagtatctataaaattacactatctttttttttttctctctgcacaagagtcttttccgcaacaacttacttatccagaaatggcgtggccgatgtggaatccgaacttgacacatagctgtggtagccctcggattgggcataggatggctgcttctggtgatggaaggccgtctggtcgtagtacgaggacgatctattattgtactcctcgaggccggcctgagtcaatccgcactggtccaacgatgagccgtgttgctggcccagctggctgctgctgctgttgtggtgcggcaggtcatcctgcaagagaaatcgatgttgcataagtccgaagtatttaaatggtttaatcattagttatgtgaccgctgctgaccggatagctcacatttgcaaatgatccgcagccataattacggccagagcttgggcgaataccaaaaaaaaaaaaaacaaaaaaaatcaacaatggagtccctcgacaaaacccaggtcgcttgttagataattaagtgaaaattattgcagtgcacagccaatgcaattgccgacgaacaaacatatttgaagtgcagcggcaatacccaaacttgccatgttgccaaagcatttatattatgtacacaaccatgggaaaggaaaggggatgggtatggtgatgggggtggcaaagggggctcagacggatgcagagagaccgctgccaagcggagcgtccataataagccggattaagtaatggtgtgcacaaggcgagcgtattggagccacatgagcagggctccaagccttcgagctctgattcatgctgcgattcggtgatcaagttcactggatcgggcgaaaatttggtaacgaagtaataacagatcgataacatgatcattgctgggctttggggtttgggtaaatagtgatttagttttccaaaatgcaggggtatttattatttctctcgaaagcattgattgaagtcattgaactcaacgagctttcataatggttcataaacaggaagtagtttgcttaatcttttagaatcattgcttattcattcacaaacagagtgattcataattttcccttaattagtattgtttactttttctttcattattctttatcagctggaacttaattcatttactgattaatgcgcttttaccaataaaagattgatattgtaatcatcgcttaatcaatctgctgaataattacatatacaaataaacttattgtgtcaaggattgggttatcaacaaaattatataatcctgaaaatgtatacttttactttatatgatatagctcactgaactgaaca

SEQ ID NO: 33215 - DNA, 2571 bp, DROSOPHILA
atgcaacatcgatttctcttgcaggatgacctgccgcaccacaacagcagcagcagccagctgggccagcaacacggctcatcgttggaccagtgcggattgactcaggccggcctcgaggagtacaataatagatcgtcctcgtactacgaccagacggccttccatcaccagaagcagccatcctatgcccaatccgagggctaccacagctatgtgtcaagttcggattccacatcggccacgccatttctggataaattacgtcaggagagcgatctgctgtcgcgccaatcgcatcattggtcggagaacgatctgtcctccgtttgcagcaactctgtggcgccttcgcccattccgctgttggcccgtcagtctcactcccactctcattctcacgcgcattcccattcgaactcccatggccattcccacggtcacgcccactcagcctcctcatcctcatccagcaacaacaatagcaacggcagcgccaccaacaacaacaacaacaacagctcggaaagcacttcctccacggaaaccctcaagtggctgggctccatgagcgatatatccgaagccagtcatgcaaccggctacagcgccatctccgaatcggtttcctcctcgcagcgcattgtccacagttcccgggtgccgacacccaagcgtcatcatagcgagagcgtgctgtatctgcacaacaacgaggagcaaggcgacagctcgcccactgcgagcaactcctcgcagatgatgatctccgaggaggcgaatggcgaggaatcgccgccgtcggtgcagccacttcgcatccagcaccgtcacagtcccagctatccgcccgtgcacacctcgatggtgctgcaccactttcagcagcagcagcagcagcagcaggattaccagcacccgagtcgccaccacaccaaccagtccacgttgagcacacaaagttccctgctggagctggcctcgcccacggagaaacctcgctccctcatgggacaatcccactccatgggcgacctgcagcaaaagaatccgcatcagaatccgatgttgggacgatcggctggtcagcagcacaagtccagcatttccgtgaccatttccagcagcgaggccgtggtcaccattgcaccacaaccgccagctggtaagcccagcaagctgcagttgtccctgggaaagtcggaggccctcagttgcagtacacccaatatgggggagcagagtcccacgaacagcatcgattcctaccgcagcaaccatcgcctgttcccggtgagcacctacacggagccggtgcacagcaacacctcgcagtacgtgcagcatcccaagccgcagttcagctccgggctgcacaagtccgccaaacttcctgtgataacgccagcgggggccacagtgcagcccacctggcactcggtggccgagaggattaacgactttgagcgcagtcagttgggggagccaccgaagtttgcctacctggagcccaccaagacgcaccgcctctcgaatccggctctaaaggctctccagaagaacgcagtgcagtcctatgtggaacgacagcagcagcagcagaaggaggaacagcagctactacgtccgcactcgcaatcctaccaagcgtgtcatgtggagcgcaaatcactgccgaacaacttgagtcccataatggtgggtctgcccactgggagtaactccgcatcgactcgggactgcagttcacccactccaccaccaccgccacgacgttcggggagtctgctgcccaatctgctaaggcgctccagttcggcctcggactacgcggagttcagggagctgcatcaggcacagggtcaggtcaagggaccgagcattaggaacataagcaatgccgagaaaatctccttcaatgactgcggaatgccacctccgccgccgccaccacgaggacgtttggccgtgccgaccagacgcacatcctcggcaacggaatacgcacccatgcgggacaaactgctgttgcagcaggccgccgccttggcccaccagcagcaccacccgcagcagcatcgccatgcccaaccgccccatgtgccgcccgagcgtccgcccaagcatcccaatcttcgggtgccgtcgcctgagctgccaccgccgccgcagagtgaacttgacatcagttataccttcgatgagccattgccgccgccaccgccgccggaagtgctccagccacgcccaccgccctcgcccaaccggcggaattgcttcgccggagcatccacacgtcgcaccacctacgaagcaccaccgcccaccgcaattgtcgccgccaaggtgccaccgctggtgcccaagaagccaacgagcttgcagcacaagcatctcgccaacggaggaggcggcagtcgcaagcgcccgcaccacgcgactccacagcccatcctcgaaaatgtggccagtcccgtggcgccaccgccgcccctgttgccgcgtgccagatccaccgcccatgacaatgtgattgccagcaatctggagagcaaccagcagaaacggtga

SEQ ID NO: 33216 - protein, 856 aa, DROSOPHILA
MQHRFLLQDDLPHHNSSSSQLGQQHGSSLDQCGLTQAGLEEYNNRSSSYYDQTAFHHQKQPSYAQSEGYHSYVSSSDSTSATPFLDKLRQESDLLSRQSHHWSENDLSSVCSNSVAPSPIPLLARQSHSHSHSHAHSHSNSHGHSHGHAHSASSSSSSNNNSNGSATNNNNNNSSESTSSTETLKWLGSMSDISEASHATGYSAISESVSSSQRIVHSSRVPTPKRHHSESVLYLHNNEEQGDSSPTASNSSQMMISEEANGEESPPSVQPLRIQHRHSPSYPPVHTSMVLHHFQQQQQQQQDYQHPSRHHTNQSTLSTQSSLLELASPTEKPRSLMGQSHSMGDLQQKNPHQNPMLGRSAGQQHKSSISVTISSSEAVVTIAPQPPAGKPSKLQLSLGKSEALSCSTPNMGEQSPTNSIDSYRSNHRLFPVSTYTEPVHSNTSQYVQHPKPQFSSGLHKSAKLPVITPAGATVQPTWHSVAERINDFERSQLGEPPKFAYLEPTKTHRLSNPALKALQKNAVQSYVERQQQQQKEEQQLLRPHSQSYQACHVERKSLPNNLSPIMVGLPTGSNSASTRDCSSPTPPPPPRRSGSLLPNLLRRSSSASDYAEFRELHQAQGQVKGPSIRNISNAEKISFNDCGMPPPPPPPRGRLAVPTRRTSSATEYAPMRDKLLLQQAAALAHQQHHPQQHRHAQPPHVPPERPPKHPNLRVPSPELPPPPQSELDISYTFDEPLPPPPPPEVLQPRPPPSPNRRNCFAGASTRRTTYEAPPPTAIVAAKVPPLVPKKPTSLQHKHLANGGGGSRKRPHHATPQPILENVASPVAPPPPLLPRARSTAHDNVIASNLESNQQKR

SEQ ID NO: 33217 - DNA, 2138 bp, DROSOPHILA
cagatccaattagaaagccaaaaatctttcactcggtcactttctgtttttccagcgttgaggatgcgatccgatccaatccgatcctccagctggctgctgccggatgacaacacagaaaatcgaaatggcaaatcatgtttattttggccaaattgcaactggatcgaaagggcagctgtctcttgagttccaagctgcgagttgcgaattgcgactcttgacgagctcgaggcttctaagttggcattaaattgcgaagagtttcagttcgatggcaagaatttcaatggactccacaggccacagacgtcagatggccacaatgtttgcggccacttttggccaaaacagccgccagacgaatgaatctccggcaatgggaacgagtctctttcgtctccgtcaccgtttcttgctgttgacctcaaaattttcgtggctcgaatgtcgctttgtctgccgctttgctggaggagaaacaaaagtgaaatttgttgctcgtgtgggttcaagaactagccaaaaaaaaaaaacagccagcagccaacggaaaatgaaatcgaagttggctaggagagcatggcaccaacggcacctggcccaatgcattttcacttggcttgttaattaattaagtcagtgctcgctcataaagaaatcttcatgcccgatggccaaaagaagtgcatgcatacaatgtacggagcatttccatgtccggaacaatggattcccactcccaatcttcgtatttaagtcagcagcatagcgacataggtgaaattttccatcacattttttccgggggccagaatgccgccgcatgaaagagtgttgttgtgcacctgtcgcaagagcagcgcaattatttgttataattttcttctttttctgcttaaaaaatgcaaaccatcgacagcagaagggaagaagctaaagctaaaaagccggcggttcgagttcaaagacaagccaaaacaatttagctggaatctggctagaatttagcgctggcaggcggcattgttgcagctttttgttcatgttgctgatgttgctgctgtagctgctgctgctgttgctgctgctgctgttgctgttgctgctgttgatgttgctgccggactgttggcattaattaattgctgagctgaagcctcctatgtggcgtgtggtgtgtgagaaaacaagttgagagttggggctgacggagttagagaactaatgagcgttaagagtcgagctgaactgagctgagctgagcttgaagcgttcgacaggcattggaaatgaaaatgaaatagaagacaggctgaggaaatgccagcgaacacgacactgagatactttggaaagtctatataatagaatcggctgcaactgcttgggaaaatccaataaatttaaccatttaaccatatgactttaaaaaactcatatgtaaacttcagtttagaaagccccaacgggggcgccaaatactttgcataaaaattgaatctgcaataaattcagattttaaggtaacccaatccattattgacaccccaaagactacctctttctatttataaatgtaaagacccctattctgctaaccattggggcgtagccccgaccgcttagccgcctctaattgcgcaactcgatgggctactttggcttggggagatctcttttggcgaaatatgcgatcatttccgccgctaaaaggaaagctctgcgcggaaatgaagcgacgattaaggtgccccactggcttcaacttgatcagctcacgcttcggctttagtcccaacaaacacttgaacctaccaagatatgtacatataaaaaacgatttcagtgcagcgtcaagtgctttggctgattcgacagaaacaaaaaagaagtaacaaaaaataagacccaagtgaagcaaaaaaaaaaacttaaaaaaaaaaagcaatacagaggaaaaagaaaaaatctttacatatataaccaaaatatttttctttagaaatctgcgcattcatctaaagcaaagaagagactgaagaagaatggacagcgacgaccttcgtcaagcccattggaaactgcccactaggtatagccattaccttctgcttctatccattacccagttggcc

SEQ ID NO: 33218 - DNA, 138 bp, DROSOPHILA
atgccaacagtccggcagcaacatcaacagcagcaacagcaacagcagcagcagcaacagcagcagcagctacagcagcaacatcagcaacatgaacaaaaagctgcaacaatgccgcctgccagcgctaaattctag

SEQ ID NO: 33219 - protein, 45 aa, DROSOPHILA
MPTVRQQHQQQQQQQQQQQQQQQLQQQHQQHEQKAATMPPASAKF

SEQ ID NO: 33220 - DNA, 2359 bp, DROSOPHILA
tgtctaatggagaatgggatcattgggggcacgtaaaagagaagtgaaagactccgaaaacattctgggaatttggaagccacaaagtaatcattaaaagtaattattctattatgcgaggcagcacaagatatacgtatactactcgcctgtaataagcgtatagacgagaaaaacacataactttcttttcaagcaacggtaatgcataaaataaaataaattttaattatatcttcatgcttgatttaatctatttaaatttatatttttagactgaaagtaataccagtttaatgacttcacaggcgggtaaaccgctttattcttagaaccgcaccttgggccacatttctacagcttccttatcaaatcccatactttatctcatgtgcagaaaaaaaaaatggcaccaaaacaagcagcactcattcattcatttggcatcgagaaaaccacttcacacgcaagtcgacattcctacggcttcattcatggccgccacttgtccaattaataactcgcatcctgcggaggagaaagatggggagtggtctgttcggttggttgatcgatcaacggattcccccggatgatctccaaaaataaacaaaactctccaagtggtaaatgtaccgttctgtgaactttttttttatttctcattttacgcccgactgagtgacaccgagtggatgtggatgctgggagggcacggagatgtggatatactgtatcgaaaacgaaacctccctgggttgggcaatgcaaatggaggtcaggcccataattcaattaggaacctgcagtggtccgaatatcgaaaatcgaaattcccagacatcaaaaccactgtgcgtgggtttttgggcttcgttcatttcatttcatttcatttgtttttgttttgttgtttttcgattttggtcgatttttgttggagccttcacttttgtttcattttctggccgaaagaagccggctctttgggggctgtgactcagaccgtgtgcgattggaattctgcgcgcttttgaggatttattaacaagaataataaaaacaagaagtcagacggtcagagaaaagaaaaccaaaaccggttgcttgaaaaaaaaataataaaaataattgaaaaaatatagagagacttacctgtacagaaccggcgaccgatgcggaactgaagctggcattgctgttgctactccggctgttagccccattgctatccttgagcaggagcttcgatacggacaccaccgaaatcttattgttgttctccggctccattttggccaagctcttcgtcgactcgcccatttcggagccgtttccgttctccttgtgattgcgcattttcatttagtttttctttcgcttattgctgacgatcgcttgctgtgattagagctgccggattttcatttcaatctcatctttcggccacctctgagaagggtcagacagacaaggtttatgaggttgatggtatcaaagagttgtttatgtttatcgtaagttaaaggtccgaacgtttcccaacaaagaagtgctagcttcagttatggcattttggtttagcttaaaagcaaaagttactttttacactattcttgtttttgagctacttatttttcaaattctgtctttatctaaatatgttatgcaaaacgttattttaagcaattttttagttagttttagtcaagcgcttggcatttgttttgcaacaagtccaggaattatttttgagtctttttctcccccttcttttttgctgatgtgattgtgcgattagagctgcccgattttcatttcaatctcatttttcggccaccttttcgacaagagttatgatgtaagcgaaaaatacacgaaattatatgtgttaaattattttaatttggtctggcgacatttttccgtggcggctggactcttggttcgttggatgtggctgctttgcacttttatatctgttatcgggtccggtccgcacaactcgcatctttggaatgcagtgcagccaaaccagtaagacgaatccacatagacgccgaccgaaagagacgggcatatggcggccgaaagagacgggagtagcgtgtccgcggtggttggagggaaaattgaatcgatttctgttgactgcgtccgtaaatatttgttgagttatttgggtttttgtgtaataagttgagtgtattatgtgtgcggtaaaacacgagtaaaaaaaaaagcagaagaaatatatatatgaaaacgaaaagtgaaccaggtttacataacattgacccacgagacgcgagaagagtcaagtcaagtcgagacgagacgagacgagacgagtcgatac

SEQ ID NO: 33221 - DNA, 234 bp, DROSOPHILA
atgcgcaatcacaaggagaacggaaacggctccgaaatgggcgagtcgacgaagagcttggccaaaatggagccggagaacaacaataagatttcggtggtgtccgtatcgaagctcctgctcaaggatagcaatggggctaacagccggagtagcaacagcaatgccagcttcagttccgcatcggtcgccggttctgtacagcgcgcagaattccaatcgcacacggtctga

SEQ ID NO: 33222 - protein, 77 aa, DROSOPHILA
MRNHKENGNGSEMGESTKSLAKMEPENNNKISVVSVSKLLLKDSNGANSRSSNSNASFSSASVAGSVQRAEFQSHTV

SEQ ID NO: 33223 - DNA, 2324 bp, DROSOPHILA
gcagttggcagctagcttaacccactggtggccacaacgacagatcactggatctaggggaagccaattgaataattgaatcattggaatgcaaataattggaaccttttaaattgcaaaattgtattgatttggaaaggttgtttctgacctcttgcaataatggatttaagaatgtatgctgcaaaagatattcattttccagtggatactatccatttgatgttcaagttcctatggatactttccggctcaagtgggttaatcgcttatggatctcagtgggtttaagccctgccgcagagtccagtcaatggcgaagctggcttgaagcgcctttgcactgcactctggtgtccgctctgcccggagtgggaaatgcaaatcaattgatcacttcgccggtccacgactgatggccttccacccaccgaccaccgcccagccagttccgccccctaaaaagccaccccctctgcgaccaaacactccagtgcactaaaagtggccgcttcgctgagcagcgagtggatgaggaagacgactttgtactgcatttcatgagccaccgcatatgcgttttcccctacacttttcccactgccgtttgcaactgctgtttgtcgctgatttcggtgcggggaggggggaactcttttagtggcaattttgcgggatgctcggggaaaggaggttgcattcctgggatttgctcgaaagtggtttttagcagcagcacaaaagtgttgcacactttttggcgtcaattgctgcttcagaataattcccagcattttttgtcatatgagcacaggcttaattaaacgatttgcaggcattagctttaatgactccatgacgcttaaaagcggattttaaccgaatttagctacaacacattagagtactgatatcaatttatttcaagaacttgtattgataaagggaatggtaaggaactgagcaagcctgttcgctttcattaggatcaatctataagttacgaagaggaaacctctgtgctgctggattcagtgctggtagcctcagtggtcgaagttgtggtactgttggagagttcagttccattcggaggcagaccccatggaccgccaggaccaccctgctgctgacctccctgctgacctccctgttgtccttcctgggatccttcctgggatccttcctgggagcctccctgctggcctccttgctgaccattttgagatcctccttgcccaccctgctgtccaccttgtggtccgccttgagcagcagccagggcaatcagggcgaagagggcaatcagaatgaaggaacgcattttctctctggcagttcggctttgcttagtggaaattcaggttgtgatgctttttccaaaagcctaagcctttttatattctctaagacttcatattttcccacagaagtcccctcaaaaacagctgctgcccggttacgtcacagaaatcatatcaaagaaacgtatgaggtaaatggaaaaaaccgaagcacaatttgttcttgaaaaagtacaaatgtttagcattgactcattcatttatcgtctttgcattagaagcagctgctttagcttctagattttcatttctagttctgtttttgatttactactttagtttccatttatttactatttgcgctcagcgtcttgatctgtttgcatatttacaagtttaaattataaatattggtaataattcaagcaaagtaattttttggcaagctcaatttaaaatcctttcaggtaagttttgaagacaacatggagccgagctcagtagccactcaattatattttagttacacatcaagaaaatattgactttgaggagcacgtgggcggtggagctaagaagaaacagttgatccctcacggcgagagcgtaataaattagccagcaatgaactccagcagcgctggcgtcataaatcatcttcgggactaggattttgagtcctaattatcgcgctactcactgggccaaagcctttttcttctgctccatctaccgccaggagctcccacatccctctccgacaaccatgacgagtccatccatgaccaaagctaatcacgagcactggcctgtgcgaaactgaagccaagcgcaaaaaatgttgccacgcataaaaattttgtgggccgcaatggaaactgaggcgattatctcgtgtttttttcccagaaggggcgtgagtgggcggggctggggttgcgatgggtagggcctgggattgggaaatgatggaatgatgccccgacggcaccagcagccgctcaattattcctgcctatt

SEQ ID NO: 33224 - DNA, 324 bp, DROSOPHILA
atgcgttccttcattctgattgccctcttcgccctgattgccctggctgctgctcaaggcggaccacaaggtggacagcagggtgggcaaggaggatctcaaaatggtcagcaaggaggccagcagggaggctcccaggaaggatcccaggaaggatcccaggaaggacaacagggaggtcagcagggaggtcagcagcagggtggtcctggcggtccatggggtctgcctccgaatggaactgaactctccaacagtaccacaacttcgaccactgaggctaccagcactgaatccagcagcacagaggtttcctcttcgtaa

SEQ ID NO: 33225 - protein, 107 aa, DROSOPHILA
MRSFILIALFALIALAAAQGGPQGGQQGGQGGSQNGQQGGQQGGSQEGSQEGSQEGQQGGQQGGQQQGGPGGPWGLPPNGTELSNSTTTSTTEATSTESSSTEVSSS

SEQ ID NO: 33226 - DNA, 2300 bp, DROSOPHILA
tttaattaaaaacgctttgcatattttgcgcaattgatttttgttttccgcccaaccaagtgcagttaaagagggcgaaaagtggggaaaatgtggcttgggtgttggatcgaacgaattgtgccattattccggtcacgcttttgttctcgagaattgatggtttaatcagctgtctatccgatccgtgggaaggaatccatctgctcggatttgcctcgctgagtcgtaggtccttttttggtgcctggtaattgaaaaacacacaggcgcctagtgcatcaattagcaaagcaaacgcagccactcagccggcaaagacaaaacgcaaaccactccgaaggaccttgccccggaatcctgagaatcctgggcgtcctgactactgcaagtgcattctattagttgcccaagccccaaaccgagtttttatctctgggcaaacagtcgcaagtgccgcacaaaagacaaagaggcgagctattgtcctcgatggatcacccatccattcccagctccactgcgccaaagtctatattgccatgcaaatgctatggcattaaaggatttcccaactgcctcgttcttacttccatttgttagtatcgccatcgccatcgccaccgccatcgccgtcgccatgaccggcttttattgactttgcgcatttaacttttaattttcaccatgttaaagagtcgttctccgtgggtgggtggcaaagcgtgggtggtgccaaactgaatggcaaaactttttccgttaaatgctgaaacaaccccgtgcgctttaagcggttcttcttgttcggcgtttggggcttgtaacaccttttagtccactaaatgtattcacataccctgggacctgacgggcatattgcttcgacggctgattgaaattttcacttttaaagtttatatgtttaataggacattgtgattaggtactctttagttatatacaggatcgattaatacaagagtttttgattagcttcctatgatgaggaaacgtcagtggtgctggattcagtggtgctagcctcagtggtcgaagttgtggtactgttggagagttcggttccattcggaggcagaccccatggaccgccaggacctccctgctgctggcctccctgttgtccaccctgggatccttcctgggagcctccctgctggcctccttgctgaccattttgaggtcctccttggccaccctgctgtccaccttgtggtccgccttgagcagcagccagggcaatcagggcgaagaggacaatcagaatgtaggaacgcattttctcccacagccaaagcccttttcttgaaaaacagctgctgctggggcgccgtcacagaaatcaaacaaacgtctgcggtattttggtaaaaccgaaaaccagacacaaagagagttgaaagcttggggaaaatgtttactgtttaccagtgactaatttacctaaagtgcgtcacctagcagttacctatatgtgttttgtgtgttctgtttatgaaattttcatttgttattttgtaataatcaaacgctttggccttaaaatgtaaacatcaactataactacgtcaaatagtcaatttgatttgaaaatactaaagaataataaacatactgccattaaatcgaatttaatagcatcctcaaatgggctcaaaatgcaatagcaagcagattatacctattcaaagtactagataactcaaaagtcgttagacctgcctttagccccgtaaccttgttttccgccgtgaaattattttcacacgaagcgctttagaatattccttgcccgcggcggcatcgccatagaagtggagtgccgtgtaaatatggcatcctcactctccgaaccgaaagccatcgccaagccgactcatttccatccggatctgagcctggaatgacatgaagcggcatttgtgcgcatttcgggctcaattttgcagagcccacgcggcgtatacttaaccgggccgcttgcatatttttactttacgctgcttaatcggcaaaaaaaaggggaaaagagcagcaaaatgaaaacggctaaaaaatagatggcagtgagcccaaccaagctgcatgcaatatttatgattattttttcaattttgcttcgatcgcttcggccttggaaaatttcatttgctgcatttcagcgccgctgctgctcatcctgatttttccgcttttgttgttgctgctgcgctgctgcagccttttcaggaagccaggatgtgttttcctttcaatttgtgctcctagagtgtatgaaa

SEQ ID NO: 33227 - DNA, 300 bp, DROSOPHILA
atgcgttcctacattctgattgtcctcttcgccctgattgccctggctgctgctcaaggcggaccacaaggtggacagcagggtggccaaggaggacctcaaaatggtcagcaaggaggccagcagggaggctcccaggaaggatcccagggtggacaacagggaggccagcagcagggaggtcctggcggtccatggggtctgcctccgaatggaaccgaactctccaacagtaccacaacttcgaccactgaggctagcaccactgaatccagcaccactgacgtttcctcatcatag

SEQ ID NO: 33228 - protein, 99 aa, DROSOPHILA
MRSYILIVLFALIALAAAQGGPQGGQQGGQGGPQNGQQGGQQGGSQEGSQGGQQGGQQQGGPGGPWGLPPNGTELSNSTTTSTTEASTTESSTTDVSSS

SEQ ID NO: 33229 - DNA, 2360 bp, DROSOPHILA
ggacaggaaatccatggcaatgacagccgttctggactgccaatcccctcatgcaactccaccgggataagcgagctacaaatcttccccgaagaatgtttggaatttgcgaggcatatttaaagagtttcacagctttcgggggactcgcagccaactgttgcgagttcgaccctgctttttggccagagttttccctgttttggcagcgaaactcattttcattgcacacagtttggcaaactcagctcttttaatgcgaaaactttcaagacaaacgacaaggggaagtgcataaataaagtgtttagctggttttttatgcccacgaagtgtgtgcgccatgtcacataattgcacccaacttgagagggcgactgcatggtccatttaaaacgggctggcttcatccaccaggatgcggcttaaagaactgatgcagcgcatcctaggatttgtgggctcttgttgctgccgcgtccctttcgaaggacgtgcctattccaagtgtcacagcagccgagcgaatctctcatggccgccggctgtcagccaccaggcggcctcggcgaacaagttacatttcgatttccgaatcccgtggcttgcattcctccctctgcccttccaccatcgccttggtctgccatccatcacggggctgcactgacaggaaatcccactttatctgaatgctttattacactagtaaaattttcgatcccacaaatacttaatttatgtgctgttacagcaaaaagggtgttcaacacaaaacactttagactcaatttgatcgcactattaatttaatactgctttttccccttgaatcaaacgatttctctctgtagacgtaatgcaagtatcttgtgcgaaatggtgctgagaaaatgtgagaaagatttactttttgcagaaaagacttttattaatatcgaggaaagcgcggaagagaacaagccaaaaatggattttagattggctggagtcctgcgccttaagcaggggatgactcggtgctggcttccgtggttgtgctggtgctggattcggtggtcgttgaagtggtggtggtggtagtgctgttgctgggaagagtggcatttggaggcagtccccacggtcccccgggtccaccgggtccaccaggaccaccctggggtcctccctgcggtccaccctggggtcctccctgaggaccaccctggggtccaccttgaggtccaccctggggtccgccctgtggtccaccttgaggtccaccctgaggtccaccctgaggtccgccctggggtccaccttgagcggcagccacggcaatcagtgcgaagagggcgatgatgatgaaggaacgcatcttatatctgtccgtggaactggtgtttgatacctattcaccagttccacaagccttttatactctcacctcgccagttccaccgacttcgttaccagatggttttcggtgacgtcgtcgccgatcaaataaacgtcaggtgtaatttggtaaaaccggagccggacaaagagacttgagctgttccaaacgctagatggatagatgaatgaatatctgtttttccccagcgtcacagaccagctgctgttgattcgatttcaatactgccgtcgtcgctcttgtctgcgtttgtgcttgtgttggcaaacacaaagtgtttgtccagtcgactatttatcaccatagaacgtggtttgggtggtttttatagctaatggagttgtcgccttctgattcgattccattgggcttgcggctaattcatcagttcgaccagcagcggatgcgatttatgagtttgcatgggtccttcaaatgcaggaccaataaataaatgttaatttaatttgcattggtcggggaaaattgcaaggtctgaaatgcgcactcgaaagtgcacttgaataaattcgagctgtgaaaatagagttaaactagtgcatactttatgcaatcaactcagacaatagtttactccttagtgcaattaatataataaagaatagtatacaatatatttgaaaactggcctagtttcaagttgaatttaaatgaatcaaagcaatccagcttaaccactttcagtttaatcacatttgcgagccgtgtaggcgaggatggcactcaggctaatgcaattaaacattaatcatacgcactgtatgcccgggcggaccagcaggatacatatgtcgatgtccgagaaccgttgccgggttacactcacagttttagaccgaagcatccacaaattagcaaattggacataaattgactaattagtgctaaaagcaagtggccaatgtttgctccagccacaccgagcacaggctgcaat

SEQ ID NO: 33230 - DNA, 360 bp, DROSOPHILA
atgcgttccttcatcatcatcgccctcttcgcactgattgccgtggctgccgctcaaggtggaccccagggcggacctcagggtggacctcagggtggacctcaaggtggaccacagggcggaccccagggtggacctcaaggtggaccccagggtggtcctcagggaggaccccagggtggaccgcagggaggaccccagggtggtcctggtggacccggtggacccgggggaccgtggggactgcctccaaatgccactcttcccagcaacagcactaccaccaccaccacttcaacgaccaccgaatccagcaccagcacaaccacggaagccagcaccgagtcatcccctgcttaa

SEQ ID NO: 33231 - protein, 119 aa, DROSOPHILA
MRSFIIIALFALIAVAAAQGGPQGGPQGGPQGGPQGGPQGGPQGGPQGGPQGGPQGGPQGGPQGGPQGGPGGPGGPGGPWGLPPNATLPSNSTTTTTTSTTTESSTSTTTEASTESSPA

SEQ ID NO: 33232 - DNA, 3549 bp, DROSOPHILA
tcgtaataaaatttccaatcgaactgcattccaacttagaaattgtatttttttttaatttttcgccaaaaatcatgatgttatttccaaaatttcaaaaattggtaaaaaattttttttttatatcattcaaaaagttttttgggtggttagtttaggtcaatagctattcaaaacagtaagaattttggttgtgagacaattttaagcctagtttcgaaaaatgattgcaatgaaaatgtggcacttaagctaatactaactttttgtcatagaaaagtcattatttttcgcataacattccaaaaaatgatcggagaaaaaagtgatatgccttgttgaatttgtaataaaatttccaatcgaactgcattccaacttagaaattgtatttttttcaatttttcgccaaaaatcatgatgttacccctttccaaaatttcaaaaattggtaaaaaaatttttttttgatatcattcaaaaagttttttgggtggttagtttaggtcaatagctattcaaaacagtaagaattttggttgtgagacaattttaagcctagtttcgaaaaatgattgcaatgaaaatgtggcacttaagctaatactaactttttgtcatagaaaagtcattatttttcgcataacattccaaaaaatgatcggagaaaaaagtgatatgccttgttgaattcgtaataaactttccaatcgaactgcattccaacttagaaattgtatttttttccatttttcgccaaaaatcatgatgttacccctttccaaaatttcaaaatttgttaaaaaaaaatttttttatatcattcaaaaagtgttttgggtggttagtttaggccattagcgacttaaaactgtataaagtttggtgatgggacaaatttgaggcaaaatctaagaaaaatcctattaatctcgatatacattgaaaccgaaagcatattatatttggcccagcttggcgagaatcattttataggaaactaggcctgctgctgaccaatgcgtctctgctccgtgatcttaaactgcagcaggaccacgaggtaggtggccatgaacgagatgttggtcgtgatcagctcgcggttgatgtttgcatacccgtccagattcatgatgggcgggttcttgtttatggccacaagcagcatctccacttccttctgggtggcagcgtccacggcagtcaggttgatattgagcagcttcgtctggaagtcaagtccgacctttcgggaggcgtagtgcgcctcgttgcagataatgtacagcagacccatgcagtagaacacgatgacgaacagacccacctggaaatgtcctaatcaatatgagttattccctgcgtggcaagcaatcgcacctccttgtaggttgccccgtggtcgatgatttcgctgatgctgccgtaagtggcgatgatcgttgtgaagaagatgactagacagtacatgccgtacatgttggagtaagctcgtcccagctgctgcatcatgtggctcagatccacccatagatggcggtactcagtgagtttttgggcgggcttctcgccccggatggttgtctggatgtttcagtttagtaattttgtaattgagcactgataatatgttattttacctgcagagcgtcggaaagagcgcgacttgcagttccgaatgcattgcagttgatgtacctttcggatttcagaaaggaagtattgtctttgtggggatttttcatttgtttttgccataggacagctactcaccacaagctgcagaagcagttgagcatggcgatgatggggtagtaggcgaatgtgtaccacagccggaagtccggctgcaggaagtactgcgacaggttgatggcgatgcttaggagccaggagaagacgcacagcgaccaggtgagtgggtagagattcggaaagacgatcggcgagccggtagttttgaagaacttatactggtagttggtccacatgttcttgaagatagccacctggggaccgtgccgccagctggccaccgggagcagaaagttggtgaagagcagactgatgaaaatgacattgtagatggcctcatcgaagcgcttgtccgggctggtgacgaattttttcacgcgctcacgcagcaccagaacaacaatggtcgtctggcagctgtagatgaagatggcccacatgacctgcttggagccccaggagtagcccgttctaggcaggttcttctcgggcggattgcggtgaatgggcattacgcccattatctggaaaagcacgaggaggctcttggtggtctggtagaaggaatcgtgcttgtccagttccagcggatcgtcaacagtttcctgcttgcgcacgtacacctcctccatggcatcaccccgagccatcagcttcagtttctcccgatagcgcacctcgtcctccagaaactggcgttggttgggattcagcatcggcactaccttcgaaggcggcgttaggccacgactcactgcccaaaacgacatcgtgcgatcgaggaaagtcatacggcttcccaatgacggaccttttatactcctccacgcagccttgctattgactttcgattgaaagacaaacaatgaaagggacacgcccggggcggcgcccatttgcttgccctccattaaatatgcttaagtccgggacatcagcacgagcctagtcgggcagctttcctgcactcagaaaaaatggtagggaatgcattgcaaacatggttttaaaccttcccattctagcaagattatatagtgctaatcaaaagctgtgttcattttgtgtattcacacggcctctgattttctctcagtgtccgcttgttgtggtcattctgctgacaccgaccaacgggtgaccccaaacagcagggtaggatgaggaggaggaggaggaggaggcggtgggcagctgagggcgaccgaacggagaaggtacataaaatgcgcttaatttgccggaaatgaaagtttaacgatgtgtaaatgcttacgaatgccgatagaggctcgcactaatgaccaataaaaatgtgccaccaacgggacggactgccagctccatcgccatcgccatcttcgcctttgtcccaatccttgaccctgtcccagttcatctggtccgtcgtgtgtgtgggtctgacttttgatctatttctgcctcagataccaaaaggcccggcattaatggctcttaaggcgcttaaagccaggcgagagtggacaggaaatccatggcaatgacagccgttctggactgccaatcccctcatgcaactccaccgggataagcgagctacaaatcttccccgaagaatgtttggaatttgcgaggcatatttaaagagtttcacagctttcgggggactcgcagccaactgttgcgagttcgaccctgctttttggccagagttttccctgttttggcagcgaaactcattttcattgcacacagtttggcaaactcagctcttttaatgcgaaaactttcaagacaaacgacaagggg

SEQ ID NO: 33233 - DNA, 1365 bp, DROSOPHILA
atgactttcctcgatcgcacgatgtcgttttgggcagtgagtcgtggcctaacgccgccttcgaaggtagtgccgatgctgaatcccaaccaacgccagtttctggaggacgaggtgcgctatcgggagaaactgaagctgatggctcggggtgatgccatggaggaggtgtacgtgcgcaagcaggaaactgttgacgatccgctggaactggacaagcacgattccttctaccagaccaccaagagcctcctcgtgcttttccagataatgggcgtaatgcccattcaccgcaatccgcccgagaagaacctgcctagaacgggctactcctggggctccaagcaggtcatgtgggccatcttcatctacagctgccagacgaccattgttgttctggtgctgcgtgagcgcgtgaaaaaattcgtcaccagcccggacaagcgcttcgatgaggccatctacaatgtcattttcatcagtctgctcttcaccaactttctgctcccggtggccagctggcggcacggtccccaggtggctatcttcaagaacatgtggaccaactaccagtataagttcttcaaaactaccggctcgccgatcgtctttccgaatctctacccactcacctggtcgctgtgcgtcttctcctggctcctaagcatcgccatcaacctgtcgcagtacttcctgcagccggacttccggctgtggtacacattcgcctactaccccatcatcgccatgctcaactgcttctgcagcttgtggtacatcaactgcaatgcattcggaactgcaagtcgcgctctttccgacgctctgcagacaaccatccggggcgagaagcccgcccaaaaactcactgagtaccgccatctatgggtggatctgagccacatgatgcagcagctgggacgagcttactccaacatgtacggcatgtactgtctagtcatcttcttcacaacgatcatcgccacttacggcagcatcagcgaaatcatcgaccacggggcaacctacaaggaggtgggtctgttcgtcatcgtgttctactgcatgggtctgctgtacattatctgcaacgaggcgcactacgcctcccgaaaggtcggacttgacttccagacgaagctgctcaatatcaacctgactgccgtggacgctgccacccagaaggaagtggagatgctgcttgtggccataaacaagaacccgcccatcatgaatctggacgggtatgcaaacatcaaccgcgagctgatcacgaccaacatctcgttcatggccacctacctcgtggtcctgctgcagtttaagatcacggagcagagacgcattggtcagcagcaggcctag

SEQ ID NO: 33234 - protein, 454 aa, DROSOPHILA
MTFLDRTMSFWAVSRGLTPPSKVVPMLNPNQRQFLEDEVRYREKLKLMARGDAMEEVYVRKQETVDDPLELDKHDSFYQTTKSLLVLFQIMGVMPIHRNPPEKNLPRTGYSWGSKQVMWAIFIYSCQTTIVVLVLRERVKKFVTSPDKRFDEAIYNVIFISLLFTNFLLPVASWRHGPQVAIFKNMWTNYQYKFFKTTGSPIVFPNLYPLTWSLCVFSWLLSIAINLSQYFLQPDFRLWYTFAYYPIIAMLNCFCSLWYINCNAFGTASRALSDALQTTIRGEKPAQKLTEYRHLWVDLSHMMQQLGRAYSNMYGMYCLVIFFTTIIATYGSISEIIDHGATYKEVGLFVIVFYCMGLLYIICNEAHYASRKVGLDFQTKLLNINLTAVDAATQKEVEMLLVAINKNPPIMNLDGYANINRELITTNISFMATYLVVLLQFKITEQRRIGQQQA

SEQ ID NO: 33235 - DNA, 2853 bp, DROSOPHILA
tggtgttcattgcgtgttccgagtgctatatgctggtttcctacctgctgaacaggaatatacagaagaccgtgctcttgccgcacgaggagaagtcgctgaggtacaagagaaatctgttcttggtgaatgtgatcgcctttggcttggcaggatactgcttcgtgaggcacaactcgcattgcgaggcgggaggtgagtgggaatcggttgtgagtccactattgtcttataatgaatcttttctatccacagtctatactttcttcgcgttgttcgagtacatcgtggtgctgaccaacatggggttccacatgacctcctactgggacttctacgccctgaatgtggtgtgtgatgccaagcacggtctctacctatcacaatcgtagaccaatgaactagatcaaacccagcctgcgccgccatttcagccagccagtcgtcctcgagtattgtgtacatacgcggtattagcttaagctcaatgtttacttaattttaccaaaaggaaattgcttacgagggattccgagaggagacgattcagtatgacaggatctgatgcatacacacgcttttagctttaggctctaacacgattttacacctaaaggatctagttaaattcgaaccgagttccatcattatgtagtgcattatttatacacatactcatttaggaacaaggcttcaataaggttttattttatacgtactgaatttgcttttattggcttctaatgttctaattcattattttgtaagtctaaaattgtatttattagaattcagataaattaactttttaattgcttccaattgtttggtgtacttttaatcaactcctaatatttaataccaaccaaatttaagaattattgagattgaactgtcttagttttatgtgtcattgttcgagtgcctcactttgtctggagggataacagaaagtgtaagattgtctgaccgacttgtcctaggattaacctgctcttaaatgctgcactttgtggaggatcaagccaagctgttgcccagctccatcaaggatttgcaggcgaggcggcatttccgcatcccagttggtccgattctcgcactggggcttctgcaattgcccgtctgcatggtgtacaacctggtgatggccatcaccacggacttccagtccaccacgtataccacctgtaatgccttcaacatctttccctccacatcggcggctgccaagtctcagcacaaagtgtgggctctggcttgctacctggagttcccatttctcattgccagtgcatggctgcagttccgattctatcggaggaatctgcgcaggccggtccgaggtttcggctgcctgatggccatcattatggctgtcagtagttccagcgtactgctatggggcaccttcccccaagaggatggcgactcattgctgcacataaccatcgccttgtcgctattcgtatcgtgtgccatttacatggcaggttcctttgtgtgcgccaagtactatatgagcgataggattgggcagctgcatgaggaattctccttgcggttgaagagcggtctggtgctcacctactacgtctgggtggtggtcatgtggattttttactttatacaccagaagttttgctttcccttgggtgagtagaacctaaccgaatggaaggatgtctacaattctaatccccggatcctctgcagcctactccgtattcggtatgggcgagttcatctcctgtgagtgcttctttatctatctatgcacggtctactttgacttctaccacgtctacatatgttacgaccaacgtttgggtttcttcctcagcgagatgtaaacagttcccaattccttataaaatgtattaaacaaaaacaagcaaaaaacataaaaggaatgcttaacgttacgtctcgtagatgcgcaccaggtcgtccagactgatgggatagtgggtgaccgggcaggtgccgtgctccttcatgtggctaacgatgcacttccagcaaaagacgtagccggaaacggagcaggcagtgggcgtctggatggacagcaggcagactgggcactctccccgctggggaaggctctgctgcacttccttgggcagctgctttctcggcatcgcttcgggatttatcagagttccacccactttccgccgctggtcgttggagtaccaccactggacgaactgcaggaagaaggccaagacctccagcatctttaggaccacgtaggtccactgatcctctttgggaggttcgctgggatagcgaagggtcagccccaacaatctgaagatgggcgagtggtttgaggcgtactttacgaggtaaaagaatgtgtgcgccgccttggcggcatggaaagcatggaatgcgcttagaaggcgttgctcccagggactggtgtcctcgtgcctggtgatcctggtccttagcttccgctccacgtaaggcatgaaggttagcagtgtggcagaggcgaactgctgcctgcggttcagcagatccccagtggttgtgaccgtcctttgcaatccgtaaaagctctcaccgaaagaggaggccctcttgcgcagatacaggtactgcagcagccaagtcagcaatggcgacagctcctcctgaatcctcaaactcccccatagtttaaagtccaggcgtagtccaaagtagtcgaatatcttgctcagtgccgggtaaatcaggttgtccagcgtctctgacgctgaaatttcgaagatcgacggcacattttgaaggttctggcgcacatttgccgcttctgccattgtgtttatagcatttaaataaatggaattaaattcg

SEQ ID NO: 33236 - DNA, 792 bp, DROSOPHILA
atgctgcactttgtggaggatcaagccaagctgttgcccagctccatcaaggatttgcaggcgaggcggcatttccgcatcccagttggtccgattctcgcactggggcttctgcaattgcccgtctgcatggtgtacaacctggtgatggccatcaccacggacttccagtccaccacgtataccacctgtaatgccttcaacatctttccctccacatcggcggctgccaagtctcagcacaaagtgtgggctctggcttgctacctggagttcccatttctcattgccagtgcatggctgcagttccgattctatcggaggaatctgcgcaggccggtccgaggtttcggctgcctgatggccatcattatggctgtcagtagttccagcgtactgctatggggcaccttcccccaagaggatggcgactcattgctgcacataaccatcgccttgtcgctattcgtatcgtgtgccatttacatggcaggttcctttgtgtgcgccaagtactatatgagcgataggattgggcagctgcatgaggaattctccttgcggttgaagagcggtctggtgctcacctactacgtctgggtggtggtcatgtggattttttactttatacaccagaagttttgctttcccttggcctactccgtattcggtatgggcgagttcatctcctgtgagtgcttctttatctatctatgcacggtctactttgacttctaccacgtctacatatgttacgaccaacgtttgggtttcttcctcagcgagatgtaa

SEQ ID NO: 33237 - protein, 263 aa, DROSOPHILA
MLHFVEDQAKLLPSSIKDLQARRHFRIPVGPILALGLLQLPVCMVYNLVMAITTDFQSTTYTTCNAFNIFPSTSAAAKSQHKVWALACYLEFPFLIASAWLQFRFYRRNLRRPVRGFGCLMAIIMAVSSSSVLLWGTFPQEDGDSLLHITIALSLFVSCAIYMAGSFVCAKYYMSDRIGQLHEEFSLRLKSGLVLTYYVWVVVMWIFYFIHQKFCFPLAYSVFGMGEFISCECFFIYLCTVYFDFYHVYICYDQRLGFFLSEM

SEQ ID NO: 33238 - DNA, 2558 bp, DROSOPHILA
ctgtcaacgtagccgaagggctgagaagaaaatgaaatagaaatggaaatgccagtggaaacggagctgtcgccccacaatttgtctcaatagctggccttatcagaacaggtagtggtgcgcacaggtgagggctctcgcccgctccctttgcctgcgacccccggtcgggtgcatccattcaggccagctcacagctcaggtcactacgatagtggtgaaatgtagtaaggtaataggctgcccaagatcaccatttgatctaatgcctagaagagaaagaaactcgttgatcccaccattacagtttttggctgattatggtacaatccctgttataagtatcgcttatatctctatgaccccggctgtaccgctgacaagtgacaccttcgacccacccgcgctatcgccggcgactttatcagaagacaaggcgaacatgccaagagagtcataattttctttgatgttcgcacgagacggagtgtcattaattgatttattaccaagttgattgcctgggcttcctttcggcgtgctccactcagatttggcgatgtccaagtggttagatggccaactaattaggtaaatgtgtttgctctaatgttgcctgcctgactgcaggagatatcttctcgccttggcagatacacaatacttccagcggtgataacgtcgagggtgggaacatcgtcgtcgatggggcacttagatgattgggatggcaacaaggtggcccgctgcggctgcatttcgtcaaccgttgtttgctccatttcgatcattgtttgaagtgggaacagaatgtgtgagcatacaccccatttcacttggcattcccattcgcattctacctttctcgattcaatttccagcaaatgtgtacacttgcggcttgtttattcagcttggcagtgtctcacttgtgaacaatatatacaactggatcaaatgtggccacacgaattgctcgagttccagggaaatacatgtcttatagatcggtctgttgcctcttggcctccatcacattctgcatgaccagatcatagagattttcctcctccccctcctcctcctggttgtctgggttcttcggatccttgcccctatcctctgcgtcctgcagactctccagctcccgtcggtagttctgcagggcctgttgaaggagtttctccacgggagagtacgtggaacgcgatctcaaacgggccttggctatttccagagcctgcaatgggaatgggaacaaccttatgaacctctgatatcccaagagatggcttaccttcaaggtgttggtgtttcgcaggagagcctcttcgtaggacagaaccttgggagcaggtgcacagattgaagactcggccagctgctcgttctgccgttccagttttagttcctcggcttgcctagagatgtagtccaatatatgtatgtaacatcatccttgcacagtgccatgaccaacctacactttctccagtttctggtcgatctccgcctcgagggccatgtatttgtcgttgatctccttgatgaggtccattgtgcgtccttgcaaacggattttgtaaatttgtaaacaaaagcccaaacaaacgagttgccatgcaacggtaatttgtttggcaaccgttacgaggcgttgccagccgtggggaaacttttggagacgaatggagttgccacgtagatagataaatatagcggtagcatgaacccttaagtgccaacgatattttacatggaatttaaaaatactattttacactccaaaaaaattttattggtttcaaatttaaattacaagagaaaggagatatttgatacatgctaaaataaaaagcataccaaacataacaattttcatagtgttaatgagaaccctttatttcgatatcagttggttgtaaagatttcagctttatctgaatagtcaataaatgcgaaagtaattacataggaaaatgcgatagtttatctccccatgatttattatattttcgaataaaccaattttgtcaactgtcttgctattcgaaattaattttcatttgagttatcgtagagttgatatatattcactttatatagctctattgttcatagaagatatatgtatgtatgtacgtcagcattatctaggagacgcaagtttattttctaggtggaacctttttcggtttttacaccttcaggttttaatctctgtttaatcaaattacgactttaggcgcgactacctaaagtttctttttgtctaatttgatgactaaaggcgatgattatagcattagatatcttttgagaccttcaatactttggttcaaaggtcgagaaaaggtctgcgtctcaatcagataagggtaattaaatattaagggctttcaccacgaaactcgcttagcactccaataaaagtgtttttaactgtgacttgctaaaaagagaatagtagctattaaaagatttactttgaagatattttgctaaacagctaactcgccgcacaaagtccaagtagcaaagctgtgacgaaaagactt

SEQ ID NO: 33239 - DNA, 438 bp, DROSOPHILA
atggacctcatcaaggagatcaacgacaaatacatggccctcgaggcggagatcgaccagaaactggagaaagtgcaagccgaggaactaaaactggaacggcagaacgagcagctggccgagtcttcaatctgtgcacctgctcccaaggttctgtcctacgaagaggctctcctgcgaaacaccaacaccttgaaggctctggaaatagccaaggcccgtttgagatcgcgttccacgtactctcccgtggagaaactccttcaacaggccctgcagaactaccgacgggagctggagagtctgcaggacgcagaggataggggcaaggatccgaagaacccagacaaccaggaggaggagggggaggaggaaaatctctatgatctggtcatgcagaatgtgatggaggccaagaggcaacagaccgatctataa

SEQ ID NO: 33240 - protein, 145 aa, DROSOPHILA
MDLIKEINDKYMALEAEIDQKLEKVQAEELKLERQNEQLAESSICAPAPKVLSYEEALLRNTNTLKALEIAKARLRSRSTYSPVEKLLQQALQNYRRELESLQDAEDRGKDPKNPDNQEEEGEEENLYDLVMQNVMEAKRQQTDL

SEQ ID NO: 33241 - DNA, 3376 bp, DROSOPHILA
tcagcgacgaccagatgctcgagtcctggctggaggatctgcaggcgacgggcgctaagattgtgctggtcacctatccgcgaaccgccaacaacgacaaggagcttagcgtgatgcgaggcgaatacttggaggtaaggccagcacccacgttaccatccttcgttctgtcctataaccatctcttcgaaactttagatccttgatgatacccgaaagtggtggaaggcgcgcaacatgcggggtcaggtggcccacgtgccgcacacgattgtaacccccttcaatttcggggatggagatggagcccagttctacgggcaacagcagcagccaccgacgggtcccacaggtccgggcaacaaatcgcgatcaggggtgagtaaggctggtcactcaattcatgatgggacttgctaaccgctctacattacccaggataatcccggcatggaacagcgatcgccggatcccaccgacatgatgcgcagcaagcatctgggcaagaagggcgagttccgctacttctaggatcgagatgcgatcaccatatacatatacacatattccgtagtgaggatctagcgttatagagagacagacatcagcagttccgtctaggatgctagtcctggtcactagcgatcggattggctccaataccttgcactcgctcgcaggagtgtgcaaaccagaactaaccttaagactaacctaagtggagctccagacgggagctgttgagcagcacgtggctcctgctgaggcggatgcttaagctgatgctcatccaggcgaaaaggggaggcgacggcaataatttgttttaataaaattatatccaaaggaacctgcctattggttgatgattattgaggagattgtagtttggagagctgctttgctttatttggatgctcacaagaagaagttaactggtgctgtacggtgatcaaagccaacgattgaacaaagagcatactacgagaactcgaatcgattaaatgatggacaacttctccacgcgggccagaagcggagaatcggagtggtactccaggctccgcacggcgaagtcgcccacttcgttggtgaagcacttcagagtggatatggagaaggggcgtccgggaaagttgtagtaggtgaagtactgcccgttgacggcgatcaggaaagcccgatccccgagcccaaaagcgatcttgaagagctttccgcgcacaaatgggaattcgccctcggtctcctcgtcgctcaaggcaaaactagaataagtgagtaaaggtgaattctcttggaggaactttgcatattggagtctcggactcctttatacctgttgtcttcacgctggtagctgcgtgacacggttgtccgatcgaagttcacgtggaaccggagcaccgtacgcccggtgtcgttgcactggaagcagatggagaactccgtggtcggcgggcccttggcgatgcactccatggccaccactgtgccggtttcataccgcctgggcacgtcgctctggaaggccaccttgtccggacacatgagcgttctggggaagacgagcggaaagagcatgcggtggtggaactgggtgatcttctcgaagtcgccgtaggtgcgcacgtagttgatttgcttggggaacttgacgaactcgaaggacccgtacagctggtcgttcacgtagatctcgaagcatcgctgcagcaccgccacccggaaggtgaagctctggccaggctgcagcgggttctttgggccgtcgcacttccagttcttcgagatctcctcctgctgccatcccccgcccggctggaacatgctgcggatgatttggccctcgcggaaattggcctcgatcttcaggaacaccgtttcgctctcgttctgcgcgttcacattgtccgtgaggtccagcgaaattctgtccgtaattcgagaggtgtcattagtaaaaagtattagatatggattgggaggatactcggcactcccccaaactcgctaaggatacccatttcatttctgcaaatctctgtcacagctttataagcctttcgttggcattagaactgcattgttttgtcaataatcggataattcgaataccatttatacttaatctctttttactttttgaactaattggtttatttcatttggttaatttcatttggttagaaaatcagcttctacatttgacctttgactttaacccagatcaaagcggtattcttttagtggagaaccgggtatccaaactatgaaagatgattacttattcggatgaggcttgacgcgcccactgacgatgaggacgtgtccgaatgggacctccgttaggacctttgctttccaaacgttcatcgcggctccacggctccactgcaactgagtcgacgagtgcgaatcctcgatggaatccagccggatccggcgccgttttatgcgcccttatgctaatagattcgccatccgtcgcctttcctcgttcatttgttgtgattatgtaaaggcgggtgaaatggggaattacctgcagccgcatgcaaacttgacatggacgtggatgtggacgtggtaaggttacccccaggcccatgcccgaacccaccccggtcggagctcaacccgttcaatcgaatcccatataaatccactcggtggtggctccctgtccccctggccacctaataaccgacccagtgagccgcgctccatgacgagaaccttgcgcgtttatttatttgattcaatccttgcctttgtaacccataactgtcatcctcgagttcttttcacggttgctgtcacgcccccaactgccgactgcccatttgttgctagttaccagcgacactgggagaaaaactagccaaagataagttattatccttatttttgcttaaatattgaatattcagtattgttgcaccacataacttgggaaacccggaagcgttgtaatactttttcgaagataaaacatttatgatcctaactcgaaaaactgcttatcgcataatgaatttccgatcataaaattaattgcccgaataactttgcaagctactagttataaaaatacaaggaatatgttgtaattgtcatcttaaattcatattaagaaagtataagtgctagttggaggaataggcactccttgatggtggctcatatcctttttatatcttactgctacattttagtactcctagtaaccactattactagaatgtcttctagccgtgttctccatcttggcctctccccttttgacggttccattgttgttgcgtgtcttgggcgaaataaaacaaggtaacaacaattgattccctgtctaaagtttttgcatttgcagtaa

SEQ ID NO: 33242 - DNA, 951 bp, DROSOPHILA
atgaacgtttggaaagcaaaggtcctaacggaggtcccattcggacacgtcctcatcgtcagtgggcgcgtcaagcctcatccgaataaaatttcgctggacctcacggacaatgtgaacgcgcagaacgagagcgaaacggtgttcctgaagatcgaggccaatttccgcgagggccaaatcatccgcagcatgttccagccgggcgggggatggcagcaggaggagatctcgaagaactggaagtgcgacggcccaaagaacccgctgcagcctggccagagcttcaccttccgggtggcggtgctgcagcgatgcttcgagatctacgtgaacgaccagctgtacgggtccttcgagttcgtcaagttccccaagcaaatcaactacgtgcgcacctacggcgacttcgagaagatcacccagttccaccaccgcatgctctttccgctcgtcttccccagaacgctcatgtgtccggacaaggtggccttccagagcgacgtgcccaggcggtatgaaaccggcacagtggtggccatggagtgcatcgccaagggcccgccgaccacggagttctccatctgcttccagtgcaacgacaccgggcgtacggtgctccggttccacgtgaacttcgatcggacaaccgtgtcacgcagctaccagcgtgaagacaacagttttgccttgagcgacgaggagaccgagggcgaattcccatttgtgcgcggaaagctcttcaagatcgcttttgggctcggggatcgggctttcctgatcgccgtcaacgggcagtacttcacctactacaactttcccggacgccccttctccatatccactctgaagtgcttcaccaacgaagtgggcgacttcgccgtgcggagcctggagtaccactccgattctccgcttctggcccgcgtggagaagttgtccatcatttaa

SEQ ID NO: 33243 - protein, 316 aa, DROSOPHILA
MNVWKAKVLTEVPFGHVLIVSGRVKPHPNKISLDLTDNVNAQNESETVFLKIEANFREGQIIRSMFQPGGGWQQEEISKNWKCDGPKNPLQPGQSFTFRVAVLQRCFEIYVNDQLYGSFEFVKFPKQINYVRTYGDFEKITQFHHRMLFPLVFPRTLMCPDKVAFQSDVPRRYETGTVVAMECIAKGPPTTEFSICFQCNDTGRTVLRFHVNFDRTTVSRSYQREDNSFALSDEETEGEFPFVRGKLFKIAFGLGDRAFLIAVNGQYFTYYNFPGRPFSISTLKCFTNEVGDFAVRSLEYHSDSPLLARVEKLSII

SEQ ID NO: 33244 - DNA, 2666 bp, DROSOPHILA
acaaaacaagtgacctttaaaacagagctgcgcaaaaaatatatgaaagcaataagtattatgtaaactagttttaagctttggatacggaaagataattaaaatatttctaagatggccgttaaatatgttaatttataatttttggcgagaatttacaattgttcgctgaatatttttatgaaaataaaatagaattaagaatatggttttgttatttgtagtaaaaaggtgataacgagttttggatttcaaatgttatggagttattgaaataaaaataaaatatggtggaaaccttttactttttataaatgacgttcattttgaaattgaaaaaaaagaaaagaaaacgattttttttttaaatatccggtttggtatatctggtattatttatggttcgcgaggtatatcggtatattttagtggtcgatctacggtcacgctgaaatatttgtacacaataaaaaccggctcgttttttcgctgaaaaaggtaataaactaaagttaatgaacgcaaacgaaacaatcggtgaagttaatcgacaaatgagatgcataatcccgcgttgcattttggtggatacagaaataggccagaaatcgcgatttccacaccgcacccatgacgtgtcactcgcccacttcgtttctaatcaattagtttgtttttatccatagaacgtgttactgtctgcaaaatgatcaccgacgtgcaattggccattttctccaacgttctgggcgtatttctgttcctgctggtggttgcctatcattatattaatgccaataccggaaagtaagtaatcccacttggtgaagaagaggaagaagacagcccggaatcaacaataaaaccgattttcatttatttacaggcccagtgccaaggcaaaatgatgtaggatgtttccgctaacagactaatatagttctaccaggataatgataatgctgcttcattcgcaaaataaatatgtagttgtacaaatctaatccaggatgtcgttaatggcctccttcatggcctggacatcgtccagtgttttgccagatctctgatctttgcctgtgtagaaactcctctgcgtttgatgtccaaagctgaaggccttgacgtagggcaaacttttagtttcctctatcacctcgtccacctccatggaattgggtttgcttttgccttgatgcttctgtttgcccctattcttgctatgatcaaagcgatagtttgccggaagcttgtgcgttatgatgcagtgatccttgcgctgccgggcagtatgaaacttgatggtgcactcttccagaaagcaggaaaacatgggcttgtcaccgcgctccacgctggcggcaaaatagcaatcgtgctgttcggtgatgtgcagatccagtagatgggcagtgggcagcatttttcggcattctacgcagctgtagctctgctccttatctatgttgtccctgatcctagctgccgccgcatcctgctcgcccaagatgtcatcgatgtccacgagaacgccgagtttcttgaagggcgccaaactgggtgcaggcggatccgtgggctttatgaatcccgctggcacttcgcttagtatcctgatgatttgctctctggagagaagtgctactcccgcagcttccgaatccattttgtttgtgttgccaaaatgttttgttttggttcctacgccagtttcaacatgtttccactgtactgcctcttggaagatgtgattttgtttaatttatataaaaattaaaaataatttccttttgaattgaaatagtaatacaatttttgaagtgcatacgtaaaatagacataattaatgaattgaaatactcgctcatattttagatggatatatttctatattaaacaactgcaattaagttgaaacatcttaaatgcctttgaaatgatgccacatcgccagacttagttacgcgggctggcatcgccgtgcagcacatgtgaacctaaactggttccgcccgagaaccggttctttttggaatacgaagctgacaccgcgtggtgtttttgctttcgattccgcatttattttcctttcgacgcgtggaaaataaacaaatcctgccaagatgagtctgtacaacttcaaaaagatcatggtggttccgccagcaaaggtaaggtgtacccagcagcgcccgtcccgcggagcaccccttgaagcaaagacataacctcactggaggtgtttaccaatatgcgcaatatgtaaataatattttattttttgccctttccacaggacttcatcgacattatgctgtcgaagacacagcgcaagaccccgacggtggtccacaagggctacaaaatatccagaatccgggcattctacacgcgcaaggtgaagtacacgcagcagaacttccacgatcgcttgtcgcagatcattcaggactttcccaaactggacgacgtgcatcctttctacgccgacttgatgaacgtgctgtacgacaaggatcattacaagctggcgctgggtcaactcaacacagccaggcatttggtggacaagtgagtgccaaagtcacagatccccaaacgaacaaggttcgattaactattctattttttatcccgcagtgtggccaaggactacgtgcgcctgc

SEQ ID NO: 33245 - DNA, 666 bp, DROSOPHILA
atggattcggaagctgcgggagtagcacttctctccagagagcaaatcatcaggatactaagcgaagtgccagcgggattcataaagcccacggatccgcctgcacccagtttggcgcccttcaagaaactcggcgttctcgtggacatcgatgacatcttgggcgagcaggatgcggcggcagctaggatcagggacaacatagataaggagcagagctacagctgcgtagaatgccgaaaaatgctgcccactgcccatctactggatctgcacatcaccgaacagcacgattgctattttgccgccagcgtggagcgcggtgacaagcccatgttttcctgctttctggaagagtgcaccatcaagtttcatactgcccggcagcgcaaggatcactgcatcataacgcacaagcttccggcaaactatcgctttgatcatagcaagaataggggcaaacagaagcatcaaggcaaaagcaaacccaattccatggaggtggacgaggtgatagaggaaactaaaagtttgccctacgtcaaggccttcagctttggacatcaaacgcagaggagtttctacacaggcaaagatcagagatctggcaaaacactggacgatgtccaggccatgaaggaggccattaacgacatcctggattag

SEQ ID NO: 33246 - protein, 221 aa, DROSOPHILA
MDSEAAGVALLSREQIIRILSEVPAGFIKPTDPPAPSLAPFKKLGVLVDIDDILGEQDAAAARIRDNIDKEQSYSCVECRKMLPTAHLLDLHITEQHDCYFAASVERGDKPMFSCFLEECTIKFHTARQRKDHCIITHKLPANYRFDHSKNRGKQKHQGKSKPNSMEVDEVIEETKSLPYVKAFSFGHQTQRSFYTGKDQRSGKTLDDVQAMKEAINDILD

SEQ ID NO: 33247 - DNA, 3497 bp, DROSOPHILA
cacttagacacttcgcccatcgttctggcctgtcagcagaatcgccagccaagacgacactcgtgtatcgagtgcaataatcatcactgctcccccacgagtgccgaatttcgaatgccgccttttctgtggacctcagcactttgacattgcccgtttcccttccagggcgttgctcgccaaacgtggctaatctgcgcccttcgatctccaaggcatttgctgaaaatttattaagctctgccaaaatgcatgggcagggtgctcaaagtagttgaaccagttgaaatggctgaaatgctactcgaaatagaggataatagaataaatctttaagttcataagctttgattaggcatacttatataaagtgctaagtattaatcacattccaatcataaatcatttaaataactcgaattaggcttttacttagcaattgtatatatcgaatttcccaagttgcatctttcaattggttcaaattggcatcgttgaaagtcttgaaaactttacgcccaaaagaattgatttgttttcatttcatttttgctgtgttcctcaagaaatcattgagccgggctccacttgccgaaactttctgataactcgtaacttgttactcagcgcacacagcactaatgaagacggcacacacacaacaaacacaataaggggtgtcttgttggctgtttgttttccactggccaagagcagagcaccggtcaccagggagcagcaggctgattcaagtgttaaaatcaatgggattcacagctgagtgcagctgaagcccctaagggggcggtcaagacgttcctcgatttaattgaataattgtgaggcaggccacgttcgccgaattcctggtaaatcagcgaaaattccgtaactaaacagaaatagaagccagtcgtccagagagagagagagagcgccccaaaataggcaacaaagatggggcacaaaagcccgggaaatcttcagccaggagactgcgtcaggctttgtttttcggtcccgatgcaaatgcagctgcagctgcaacacctgccgaaaaccccgccagcaatttatgcgccgcatttgaaattcggtgataccaaatcctcgagacttaccgttcccaagtggcacattcgtttgcgttgttgtcgattgttgctgttgctgctgctgctgctcgcttgtcaccgcgttggacaatttatttgatgttgtcgctgtggccggaactggcaccgctgtggttgtgctcgtcgttgcctccagcttgcttgctccattaatggccaccgtggtggcgctttttcccagccttagtatggtggtggccgtagatgatgttgctccggctgatgaggctcccccgctagtggctgttgtggctgctgccgccttgagcttgtgcagcgctcctgccacgcctttggccgccttcgtggtgcgcgtcacgcttagaatacttgaggtggcaagactgttgccatttggtggcgaagtggccatggaagtgttggttgcagcggtcgacgccgtggagttgcgtatgaccagtatggattgagacttctccagacgcttcagcgtttgcagcacaaagggtgacttgctgtcgcagttgctctcggaactcaagctgcgtgtggcctgtaaaagtgatggaacaagttggtaaaatacaacacaaatgtcactgcacatctcttacatgttttagcataaagggtctctccaccatcttggtttgcgtggcgttggcctgcttggaacgctcttgggcctttagaacgctctccaactgactggcattgatgggggtttgcagaaggatcgtgttgctactggcctccttgttgttgctgttggccacaatggaaatggtggagctgctgctgctgctgctgctgccggctccactcgagccctgcacaatggtctttctagccaccgttgtggccgtgggcagctggttgagcgtaatggccgtggaggagtgacttttctcctgctgctgctgctgttgttgttcgctgagcaggctaagaatgtcctgcttgttctggatgatgatctggccattttcgttgcgtgtgccgcgcagcaggatgatgttgccgccactcgtggcctgatgctgctgctggtgttgctgcttctgctgttgcatggccccgatcttgagcttggccgctcgcagagtcgtcgttgtactggttgttgctgctggctttgctgatttcgcttcattgctgcttagcttgccactgctctgcgatcggatcaagacatttttggaggtgatttggcctagaaaggaataacaaaagtaaatcagtcttaaataatcaattcaatgtacatacaatatataaaaggtatttatccaggtaaaacaacaaaattaaaaatgtacatcctagaacgtctggatgtataaaaagagtagatcttatttatttatttgtaagttatctaaacagcgtgttggtttcatttttggtgtaagtgctcctgtaacattttgttctcgatttctcgaattgagcaatttcgagtggccccaaaaaacggacagccccattgtatgcaaattcaatggaaacttcataagcggcgcaagatttatgactccatcttgatcgaatttggaaagccttgcattagaagcgcatgtgacaggggaggcaggaggcgtggctgccattgttgcactttcccagggtccgtaaaaatgaactgaaagggacgtcgagcattacgtatacgcgacgtatgcctagagcggtcagtggctcggacactctattttgttggccaacaaatggggaggatgggcggtagccaaacgctaaatcaagcgaaagacgacatgtttatggcagggacgaaggactacttagccgacgagccccagcacaaaacgcaataaaagtgcaacaaacaaacagcgagttttcagccaagaaaggaggagaaagtaatggggtaggttcacgggtgtaggcaaatgggggtctctgccctggcatgcgttgccaaatatagactctcaaggctgaaggcgacacggaacgtaaagtgcgcgccggaaacatttcgaaatgtagcctaaacacttgtccggctcccctgcttttcccgcctccccccgccgccggcatccagcaccctttcctgggtatttccacacccccaaaaaccatgtgtgtttgttttcgcaaaaacgtgcgggtcataattagccgttgacgccgccttcagtcggctgtgctttggggaaaagcggaaaagcagaaaagcgggcaggggaaagcgccacatgcgaccatctgaccccaagtggacaagtgtctgcgcccccttcgccttccttggagtgtctgtgcaaaaaggtcgcctgccgccaggcaaaataaaccgcctgaattggaccaggatcggaatagaataggtggggccactggctgttggctggccatccattcgagcgcaca

SEQ ID NO: 33248 - DNA, 1194 bp, DROSOPHILA
atgaaaccaacacgctgccaaatcacctccaaaaatgtcttgatccgatcgcagagcagtggcaagctaagcagcaatgaagcgaaatcagcaaagccagcagcaacaaccagtacaacgacgactctgcgagcggccaagctcaagatcggggccatgcaacagcagaagcagcaacaccagcagcagcatcaggccacgagtggcggcaacatcatcctgctgcgcggcacacgcaacgaaaatggccagatcatcatccagaacaagcaggacattcttagcctgctcagcgaacaacaacagcagcagcagcaggagaaaagtcactcctccacggccattacgctcaaccagctgcccacggccacaacggtggctagaaagaccattgtgcagggctcgagtggagccggcagcagcagcagcagcagcagctccaccatttccattgtggccaacagcaacaacaaggaggccagtagcaacacgatccttctgcaaacccccatcaatgccagtcagttggagagcgttctaaaggcccaagagcgttccaagcaggccaacgccacgcaaaccaagatggtggagagaccctttatgctaaaacatgccacacgcagcttgagttccgagagcaactgcgacagcaagtcaccctttgtgctgcaaacgctgaagcgtctggagaagtctcaatccatactggtcatacgcaactccacggcgtcgaccgctgcaaccaacacttccatggccacttcgccaccaaatggcaacagtcttgccacctcaagtattctaagcgtgacgcgcaccacgaaggcggccaaaggcgtggcaggagcgctgcacaagctcaaggcggcagcagccacaacagccactagcgggggagcctcatcagccggagcaacatcatctacggccaccaccatactaaggctgggaaaaagcgccaccacggtggccattaatggagcaagcaagctggaggcaacgacgagcacaaccacagcggtgccagttccggccacagcgacaacatcaaataaattgtccaacgcggtgacaagcgagcagcagcagcagcaacagcaacaatcgacaacaacgcaaacgaatgtgccacttgggaacggtgttgcagctgcagctgcatttgcatcgggaccgaaaaacaaagcctga

SEQ ID NO: 33249 - protein, 397 aa, DROSOPHILA
MKPTRCQITSKNVLIRSQSSGKLSSNEAKSAKPAATTSTTTTLRAAKLKIGAMQQQKQQHQQQHQATSGGNIILLRGTRNENGQIIIQNKQDILSLLSEQQQQQQQEKSHSSTAITLNQLPTATTVARKTIVQGSSGAGSSSSSSSSTISIVANSNNKEASSNTILLQTPINASQLESVLKAQERSKQANATQTKMVERPFMLKHATRSLSSESNCDSKSPFVLQTLKRLEKSQSILVIRNSTASTAATNTSMATSPPNGNSLATSSILSVTRTTKAAKGVAGALHKLKAAAATTATSGGASSAGATSSTATTILRLGKSATTVAINGASKLEATTSTTTAVPVPATATTSNKLSNAVTSEQQQQQQQQSTTTQTNVPLGNGVAAAAAFASGPKNKA

SEQ ID NO: 33250 - DNA, 2765 bp, DROSOPHILA
aaacatacacacttgcagctagaggcaaggagtggggcagaaacgaaaggtgaaagcctttcctttgggcctccttttggcggccctttgtttcaattgtctgtagtttaggttttaggcgtgcgagcctcgttataggtaaccgtaactgtaactgtaactggttacggcgtacacacatgcatgcagacacatccttgtgtgcttcagtgtgtgtgtgtgtgctgggtgtcctttgcaaacaataaacgactgtcaacatatgcgcgagccacccgtgcacgcgtctctggaatggcgtgcgaattattgcccaggaagatatgacataaaatttaatgaaatgttcagaaaatgctaaaatccatgttctcggttcccccaagtgtgtgttttccaaaaggggtgtgtaacttaagtgaaaatcgaaatcgcggcgaaaacgttgtttaaagtcaagttgggtcagattttaaatgccttcaaatatatggacataaatagttaggactgaaaaatccgaaatcagaatagtagaataataatgtagcaatattataagttagagttattcaaatcgtttttagaaaattggtatgctacaatatatagaagaatacgggaaaacaacatttaagataagaatgctatcgttatttgggcatattcatatgctatatagaaacacacacaaagatttacttaggtatgaatatgttaaataagcacaacatcgataggtaaaaacactctataaaggacagatcatgcgacaccaataacacatcaaattctaggtttttgcaagttggtaaagaagatttgtacagaacagcatatttattgttacagttatttaatgcctttgaaacttgaaaaggatcctttgatgaattaagaaaatcgcataacacgatgcagtttctgttttaattcctctttaccaacttcaatagccactaatattccaaccttattcttcgatcgctcgcaatagtactcaacctgccacgccccttttgaagggtcttaaggcgtcatacttactaacactcagaggcataagagcactctgcagatgactgaagatctggcggtggtgatggtggtgacccaaactggcaccgctgaagtacaggtggttctgatgcagcgacaactgctggtggtggtggtggtgatggtggtggtggtgctgctgctgctgctgctgaagatgctgctgctgctgcaggtggtggtgttgctgctgcgccacagagtgctgctgatgggtcatcagttgctgctgctgctgcgcgtgttgctgcgaatgttgctgcgtgtggtgctggccgagatgttgctgctgctggtgctgcgactggaggtgctgctgcggctgctgctgtccgtaggcggcgtgctgctgcggtgctgcggctgttgctgctgccgtcggcagggccaccactgctgctgctgccgccgctgcagcggttgctgttgcagctgctgccgccgctgttgcagtcgccgttgctgttgccgtggctagaatgtgatgatgggtggtggttgaggatcggtgctggctctggaccgtattgaggctgtgaatggaggcgtgcaccgccgactgatagataataccgttgttcgacatagccgtcatcgattggtggtgagcataggcggccatcgtgggcggcactcctcccatcgtcggctgcaccgccgccgttgctgccaccggagccaagggcagcgatctgtagcccgccatggctcgaagttgcaattatgagttaactgttcactgaactgatcactgatcactgttaccactatatactatatatagtatatgtactaatgtgtccggatatcgtttttggtccgcctggagcgtctgatcgcttgaggatacgagagttgactgaatgaagcgaccgcagcggattatttcctacaattttgtcgttagattcgtaagttgtattatatttttctcagccataaattagtgggagaagtagattttaggcttagttcggggttgataatgtcactccgtgatgctgataatgtaggccgcctatctcgacatctccttctgtgcatctcgagtcgtgtgtcaacagaaatctcaaaacaagcggcactgaaatttcacaaatttcctggacaaccgaaccaactatgcaaattgttaaatatttatgtactgtatgtaaccttacttagacgtaatttttacacttgttattttaatttttccctgctgacgagctgaaccttgaaccaaagttcaaccccaaacaagttgcctaagtcgctagtgtgcttggccaattcgaaaaaaaagtgtatatatttatccgggttatcaagtgacagctgccagctaaaaaaaaactagactaagataagctctagtctcgtgtccctaagcaaggtccgagaattttgtgatccgtttgattcatatttagccggtggtatatcagaaatatgtcttatcttaattttccttaaaaaatatatgccatacaaataggtatgtttgcactaaaacaccaattaacaacagcaatcaaccaataaatcactacataaataaacattaagtacacataaaacacatatgggtaatatacatatacatatacatttatatggtccagagatcttaagtacaccaatttaaattgaccacacaacatcgaaaggaacaacaaccagaacggaaagcaaacaacaaacagaacagagcagaaggggct

SEQ ID NO: 33251 - DNA, 765 bp, DROSOPHILA
atggcgggctacagatcgctgcccttggctccggtggcagcaacggcggcggtgcagccgacgatgggaggagtgccgcccacgatggccgcctatgctcaccaccaatcgatgacggctatgtcgaacaacggtattatctatcagtcggcggtgcacgcctccattcacagcctcaatacggtccagagccagcaccgatcctcaaccaccacccatcatcacattctagccacggcaacagcaacggcgactgcaacagcggcggcagcagctgcaacagcaaccgctgcagcggcggcagcagcagcagtggtggccctgccgacggcagcagcaacagccgcagcaccgcagcagcacgccgcctacggacagcagcagccgcagcagcacctccagtcgcagcaccagcagcagcaacatctcggccagcaccacacgcagcaacattcgcagcaacacgcgcagcagcagcagcaactgatgacccatcagcagcactctgtggcgcagcagcaacaccaccacctgcagcagcagcagcatcttcagcagcagcagcagcagcaccaccaccaccatcaccaccaccaccaccagcagttgtcgctgcatcagaaccacctgtacttcagcggtgccagtttgggtcaccaccatcaccaccgccagatcttcagtcatctgcagagtgctcttatgcctctgagtgttagtaagtatgacgccttaagacccttcaaaaggggcgtggcaggttga

SEQ ID NO: 33252 - protein, 254 aa, DROSOPHILA
MAGYRSLPLAPVAATAAVQPTMGGVPPTMAAYAHHQSMTAMSNNGIIYQSAVHASIHSLNTVQSQHRSSTTTHHHILATATATATATAAAAAATATAAAAAAAAVVALPTAAATAAAPQQHAAYGQQQPQQHLQSQHQQQQHLGQHHTQQHSQQHAQQQQQLMTHQQHSVAQQQHHHLQQQQHLQQQQQQHHHHHHHHHHQQLSLHQNHLYFSGASLGHHHHHRQIFSHLQSALMPLSVSKYDALRPFKRGVAG

SEQ ID NO: 33253 - DNA, 4778 bp, DROSOPHILA
tacataatataaataacatatacatccgttttattatagaaataatacaaaatagcaaaactatttaaattaaataaagttttcaatttacaaaagtgttgaccgctctctattaacttagctttttaggcctgtataaaaccataattatatacttcgctacataccatgtcctttgtattttcttatctattgccaaatttaaacgtgatgatctcacatttcactttgcaacctggccctaaacaggccaataaatgtgggtcatcactgaccactcgacattgagtgctgctagagcgccatgaatgccgtcccttgtgtgtgtgggggtcctgttcgcatgagctggtatgtttgtggggaaggatgtgcgtgcaacaagttgaaatctgctacactcatgcataatggaggcagacgcgaatccgagccagaaaagtgagcaaaactattggcaagctgtcctcgttggctgggtgcttttccatcccgcgccctaagtaacagctccatcttttgtgagtccttgaatgtagtgatgggaagggagggcgcacataaggatattgggcgatgattgtctattgaactgagtggtagagtcggtctaatgttcggttgctcttgttgttgcaggtgcagccgtcgcctttaagcgccacttgatgccaccgtgacacacaaaagcgaaagaattgaaaaggcaattgatgagaagataaccgagaacgaggtaaccaggaggcggtggcgatgacactgtcgcatccaaagacgtcgccacccagatgacgggcaggcatcagcaggaggagccgacgactcaggagcagaagtaccagaacaaccccgaggacaaaacaagccgatcaacgtgtcaacgcgtcgagtagaatgcaaataggcgctaaaaccagcagccaaagcagcaacaaccgcctccaaccaccagagcctgagcccgagcgtgagccacccaccatccaactaggccaacatggcggatgcggacgatagcaagagtggcactggcagcgggggcagtggtagtggaactggtcgtggaagtggcgctgaatcactgcagctgctgaccaaactggacaaggccgtgtccaccaacgatgttctgctggatctccaacgagcgctcacctacgaggctgtcttcagcactttggtggagcacaagatgcaggccctcaagcgagactacgaggagcacaagaaggcgaagcgtcgcaagcggaagtccatcggtcgcatttttctgccgaaaaaactctttggaagtggcagtcgtcgttccagtagggaggataccccgccaccggaggagcaccaagtccagccttcaccagcagccactagtagcggaaaggccagggcccaaacaaaaggcaagacccggacggatgacattgaggaggcctccggctcagtggccagtttgcagcgatctcatccgaagcgccctgacaacttggaggacagcctggccagcacgctgagcaactcctcgggagcccagcgaccgcacaagcacagccatagcttacttgttcgagctcaaacgcacacgcctgcacaccaaatggacatggatgcggatcgaagatccattagctcggatgcggagctgagattgaaggcccagctccccgccaaacattccacaacgatcaacggcgagtcggaattactgcccccgatctccggacacgacaatacctcgacgactgccacagcaactgccacagggaccgccacggcccacggcggagtcctccacagctccacgctggcggacgacagcctgaccgcctcgctgcgcggcagccttgaaagcctctcttacagtagttcccgctgcaccgtcagctttggcggagcggaggtgattaccgcgtccggcggagaggcggagtcgagagagcgggcgcgactggccaagagactgaggatcctggaggccaagtccatcagcgcccagtgcagccccatatttcccaggcacgtggtccgttcgtttccgctgcagtcacctcagcaagcggtaagtaatccattacaagtatttgaatgactcagtccaatgggattaagagaaagacttgtggttagtatttagtggattttatagtttcacctatgtttttgcctttcacagcgcctgcacatcaatgttccctccagtttggccaaacctcagccgcaagtgcagcagcaacagcatcagcatcagcagttgcaacctcacgtggccttggagattgaaacgctacccgctccacttcctcagcggaggcgtctgctgcccaagcagatatcgtgtacagaaagcggaggagcaggagatttcggcgtgggaggtgcggaggcctacaacaggtacttctcccggcagaacacgtcggaggatagcgccaatgtgacggtgagcacggtgttggcgcaaagcgattcccagtcgctgcatgccacgcccagctatgcaaatacgcccccggcaatgggcagcaggaggcaggagcgccgcaagtcccgcagcactgggctgctggctgtgcgaccgccatatggcgtggatcccagtgccgtcgtgattcccatggaggacgggagcgtggagcgtggagccaggacgagggaactggtgcccgaaaaactataccggatgacctcaacgtcgacgggctccagtgtggccgccaccggctgctgcagcgcaacgaagccgaaggagaggccgagcgaagccttcaggccctccgcgatgccctcctccgcagccatgacaacggcccagagcacgggcagcgacgatgagtaccgccggcggaagcggaagtacagtaagtgacagcgagctccagcgaaaggtgcctcaatcattcagaactccttccttgcccatctcccccagagcgccatcatcgttgctcggatcccgcactggtctatcccacgcacaacggactccagcactatgtgcacgtgctcggtatcaatccggatacacagcagcccatgtaagtcacgaaggaggaagcgaaaataacttaaattgcggattcaggattcagattgcgtttcagcataacgaatttcctgttttgttcacgttttgaatattttacttttatatattttcaaaggattagctaggaaaaaatccacaataataaagccagttgttaatcccgaaattaaacaagcaataattaatgattattgaacaaaatgcttaaacaccataactcactggagtaggaaatctgagcgcagtctgtacatatatacttaaaataaagtttatgtactgcatatagaaatggaaaacactcagttttagttacaacgagttttttatatttacttgttgtatataattacataatctagttcgaaatgatagatataatctgaacgacatacattttctttttgaaatgtgggtgacatttttatcttgtttggatatcgaaggtcatagccgctaatgtgatttattatccacagacaatgcccgtacggtgaggactcgccctgcgacctgcagctggacatggacatggacttggacctggacctggacgatgccgataaaatcgacgaccttgagcagatggtccccagtggtcatcagaggcatcgccgaaagcatcggtgagtggccaccggagtctgtgtaacccacacgccatggatgtccctaaatcctttcagccagcaagacacattggccttgatggccgggccaaaatcggtttgagttgagaaatgatcgtagcgcacataaataatagcgcgattcggggccagctgatggatgactggtggcacggttcgacagctaggacattcggacaggtgctgcaacaaaggactggccgtgtccttgggctgcactaataaatgtcctgccgactggcgatgcgattgcgattgtgattgccaaatatgccctaatgcgtgcccctcctcccacacccaccacccacatttcccctgggaggttcgcgtgacgttgagcagacaaaaattgattgacaagctttgtgcgactattttgtgaagggaaaggcaacggacttaggtgactcactgggtgggtaaccgggtgactgggtgggcacaatggcattgactgtcagcagtccgatgtctgccgctgctcccctttttccgcccatagccaggagcaacttccgttgcaaaaatcgtgccatgttgtttgtagcgaacggtgggttggtgggtcggtggggctgcggtgtaggggaaattgcggcagctttgtaatgcggaagttttgcaaaacccaaacggaaatagagcaaatatgtttaagctgccgctgcaggttgagctcacatatgtggctgaaagcaggcagacgctcaggcacacaagctaaacagattaatgtgcaaaatttctgccagaaataatcatcaaatggcattaaaggcaatgccaagtacctaaaactttatttcctcttaccagcatttaatcaatttatagctttccaaatcaacaagcaatttccttaggagaacatataaaatcaatttaagtcctcatatgctttcaagtcaaggaaaatttttaaaattatatttgcaggcctttaaaggactatcctttaagaaataaaattatggttaagtttaagtgaaagctgatactcatcttcttttgaattcacagacatcgccacaaaaagcggcatcggcacaaaaaaccaaaaattctggtacaggacttgg

SEQ ID NO: 33254 - DNA, 2043 bp, DROSOPHILA
atggcggatgcggacgatagcaagagtggcactggcagcgggggcagtggtagtggaactggtcgtggaagtggcgctgaatcactgcagctgctgaccaaactggacaaggccgtgtccaccaacgatgttctgctggatctccaacgagcgctcacctacgaggctgtcttcagcactttggtggagcacaagatgcaggccctcaagcgagactacgaggagcacaagaaggcgaagcgtcgcaagcggaagtccatcggtcgcatttttctgccgaaaaaactctttggaagtggcagtcgtcgttccagtagggaggataccccgccaccggaggagcaccaagtccagccttcaccagcagccactagtagcggaaaggccagggcccaaacaaaaggcaagacccggacggatgacattgaggaggcctccggctcagtggccagtttgcagcgatctcatccgaagcgccctgacaacttggaggacagcctggccagcacgctgagcaactcctcgggagcccagcgaccgcacaagcacagccatagcttacttgttcgagctcaaacgcacacgcctgcacaccaaatggacatggatgcggatcgaagatccattagctcggatgcggagctgagattgaaggcccagctccccgccaaacattccacaacgatcaacggcgagtcggaattactgcccccgatctccggacacgacaatacctcgacgactgccacagcaactgccacagggaccgccacggcccacggcggagtcctccacagctccacgctggcggacgacagcctgaccgcctcgctgcgcggcagccttgaaagcctctcttacagtagttcccgctgcaccgtcagctttggcggagcggaggtgattaccgcgtccggcggagaggcggagtcgagagagcgggcgcgactggccaagagactgaggatcctggaggccaagtccatcagcgcccagtgcagccccatatttcccaggcacgtggtccgttcgtttccgctgcagtcacctcagcaagcgcgcctgcacatcaatgttccctccagtttggccaaacctcagccgcaagtgcagcagcaacagcatcagcatcagcagttgcaacctcacgtggccttggagattgaaacgctacccgctccacttcctcagcggaggcgtctgctgcccaagcagatatcgtgtacagaaagcggaggagcaggagatttcggcgtgggaggtgcggaggcctacaacaggtacttctcccggcagaacacgtcggaggatagcgccaatgtgacggtgagcacggtgttggcgcaaagcgattcccagtcgctgcatgccacgcccagctatgcaaatacgcccccggcaatgggcagcaggaggcaggagcgccgcaagtcccgcagcactgggctgctggctgtgcgaccgccatatggcgtggatcccagtgccgtcgtgattcccatggaggacgggagcgtggagcgtggagccaggacgagggaactggtgcccgaaaaactataccggatgacctcaacgtcgacgggctccagtgtggccgccaccggctgctgcagcgcaacgaagccgaaggagaggccgagcgaagccttcaggccctccgcgatgccctcctccgcagccatgacaacggcccagagcacgggcagcgacgatgagtaccgccggcggaagcggaagtacaagcgccatcatcgttgctcggatcccgcactggtctatcccacgcacaacggactccagcactatgtgcacgtgctcggtatcaatccggatacacagcagcccatacaatgcccgtacggtgaggactcgccctgcgacctgcagctggacatggacatggacttggacctggacctggacgatgccgataaaatcgacgaccttgagcagatggtccccagtggtcatcagaggcatcgccgaaagcatcgccagcaagacacattggccttgatggccgggccaaaatcggtttga

SEQ ID NO: 33255 - protein, 680 aa, DROSOPHILA
MADADDSKSGTGSGGSGSGTGRGSGAESLQLLTKLDKAVSTNDVLLDLQRALTYEAVFSTLVEHKMQALKRDYEEHKKAKRRKRKSIGRIFLPKKLFGSGSRRSSREDTPPPEEHQVQPSPAATSSGKARAQTKGKTRTDDIEEASGSVASLQRSHPKRPDNLEDSLASTLSNSSGAQRPHKHSHSLLVRAQTHTPAHQMDMDADRRSISSDAELRLKAQLPAKHSTTINGESELLPPISGHDNTSTTATATATGTATAHGGVLHSSTLADDSLTASLRGSLESLSYSSSRCTVSFGGAEVITASGGEAESRERARLAKRLRILEAKSISAQCSPIFPRHVVRSFPLQSPQQARLHINVPSSLAKPQPQVQQQQHQHQQLQPHVALEIETLPAPLPQRRRLLPKQISCTESGGAGDFGVGGAEAYNRYFSRQNTSEDSANVTVSTVLAQSDSQSLHATPSYANTPPAMGSRRQERRKSRSTGLLAVRPPYGVDPSAVVIPMEDGSVERGARTRELVPEKLYRMTSTSTGSSVAATGCCSATKPKERPSEAFRPSAMPSSAAMTTAQSTGSDDEYRRRKRKYKRHHRCSDPALVYPTHNGLQHYVHVLGINPDTQQPIQCPYGEDSPCDLQLDMDMDLDLDLDDADKIDDLEQMVPSGHQRHRRKHRQQDTLALMAGPKSV

SEQ ID NO: 33256 - DNA, 3205 bp, DROSOPHILA
aggtggatgctgccacgaccatgttgaaggtggaccaatgaactcgccgatgtgttcgaaagtgaaagccgccgtgtccctgatctgaaaaataaaccgataatcatcaatagcaatcgcatgtttccggctaaaaatagatcgccgaatcgatggacgtacctttgcgagggggtccaagaacgggggtctcttacggttttagagctccagagtgcagtgtgattggcaccaattagctggcacacgttgattcagctagcagcttgttgttgccccgactttgggcgcctactaagaatttagttgtgtaactgcgtcacaaactccggcacagggtgcttcgggttcgttaccttcaatttctggcaatttgctggcgatatccctcgattcctgcgttgcctcgaccttcagtgcccccttctcctgtctgtacacggtttcattgcttgctttccaagggtttgctgccaatttggatacaatttacgcctgttcaaaggccatccggaaacatctggtcgcaaagttgccagatggtgcgtgtgccaataataccacaatttgcattttcccaactatttagtattttacgtttggttttgcgccaaaacgttttcttttaaatttcacttaaaaaatgtttttaagctttcaatattaattggcaaatatgacaaatgttcttgaaataacttaaatcaaaggtttgccggtattttactactacatttactatgttaaactaataaattatgaatttattggatgttgggtcatatctagttttaattaaatatttaattatttaaatttcgaaaaataaaatctattatttgagaaatagttattgcaaatattttattgcttaaaaatttataaaattaactcacaaatagttgtcatgggaatttttgaattgtgcggtgcttagataccagaaaacaatcaaaagttcacataattaagtacaattagaataaagaagctcaaaaaaatggatgttgtggaattcctcacacgaaccgataggcgcaatctaaaatctcaaataagtttccaggtggcgcaaaagatgcacgaatggcacgcggatttggacaaccgtcgttggaacctctgtcttcttctccaaaaggaagccttggaggcggatgagcagattgcagagatgctgcaggcgcaggcggatgaagcggatcgaaagcgacacgaatggatcgaaatggagcgattgaagcgggaggaggccgaaatggagctggtcaaagtaaagaagcagcaaagggagatgtaggttttgagtgtagaattttaagtccttttccatctgaaatcacctcactttcagtgagaactccgaggcccatcgtcacatgctaaccaaggagatcctgctggagtccaagcaagcccaactccatcaaatcgaggagaaaaaggcgctcaaacgccgccaggcctgtgtggagattctttggcagcgcgtctggcagagattggacgaaagtaaggcccagcaggagcagcatgagctgaaactgcgcaacttgattgagaacaggtgccaagcccacaatctagacactgatcgggagcagaaggcccagttcgccaaggaggtgttggcagaccaacgggaatgttcccaggcgtgagtaccaggttccctagagattcagttagttaatatactaatcgaatggattatgttggtaatccaatcaactacctttcatagcctggaactggctgccgaaatggatgtgctcaagaaacaagaagatctgaagaagctcaaggataaacggcgccagcagctcattgacttgcaggatcagatcaaatggaatcttaccatcagcgctcggcaagcacaggccaatatccgtgaggatgtgggctacaacatcctcgaagaccgccagatttacgaggagctcatggagaagcgttgcgccagggtgagtttgcatgcccgcctccaactgcctttcctcttagtcacaatgccaacaacccaaccccttctcattgctccagattcacaatcgcgattggcaccagcagtacatgacgcacacggctgccgagcgagctgctcgcagggaagaggatctggcacgggatcggaaatacctgggcactgggtgtgtgcttggccagcagccgaagcaaccgtacggcaaggaagtgcgctagtaccagtggtggacacatcgtcatcgccattgccatcgatcgatgggcacgcactcatgtcacgcctcacatttgaataccatattgcaattatatttacggctgatataaatcaagcgatggcggcgataaggaaaagcgtatcatgcacgggcggcataaaaccagtgataatgcccaccatcaacgtcaccagggaagctgaccaggctaaccccaactaccaactttgccagccgccgtcgggctaatatgcaaatgcgaaatgccagtacagtcaagatattgtaatgcgaaccaacctctccgaaataaaaaatatataagcaccatattaatcaatcttcttaagataagtaaaacaatatttttccacaataaaataaatgaagctactgtttgctgtatcaccaatacataatctaatttaacaagctataaccaaaccaataattactcaaagtagattttttattcccatataaaatgtagttttgacaaatccaaaatggcttttaagctgaatcaatcaaaaatatagcataccagatatttcagttaatgaagttaaggaagttgcaattgtgaactatagaagttggactgtatgaacgataaagcttgtaagtgtggctcgagcagcgactttgacaatatttctgacacttggacaggacttggaactatttggacttggacaccaccccgtcatcctccgcttccatgggttttctttttataattgaccgcttccgccgttcgcagcgcttgtctcctcaactggttgccgctaattagagttgatcgctggccatgtctccggcagcagctgcaattgttgcacgtagcacgttgcgcgctgcacgccgcatgttgcaactgctgctgatgcactcaatatgtaaacacactaaccgctgtgtttattcaattaaaacgagtgcggggcagagattttgcggggagcgactagcaaattgccactgcaatttccattgca

SEQ ID NO: 33257 - DNA, 981 bp, DROSOPHILA
atggatgttgtggaattcctcacacgaaccgataggcgcaatctaaaatctcaaataagtttccaggtggcgcaaaagatgcacgaatggcacgcggatttggacaaccgtcgttggaacctctgtcttcttctccaaaaggaagccttggaggcggatgagcagattgcagagatgctgcaggcgcaggcggatgaagcggatcgaaagcgacacgaatggatcgaaatggagcgattgaagcgggaggaggccgaaatggagctggtcaaagtaaagaagcagcaaagggagattgagaactccgaggcccatcgtcacatgctaaccaaggagatcctgctggagtccaagcaagcccaactccatcaaatcgaggagaaaaaggcgctcaaacgccgccaggcctgtgtggagattctttggcagcgcgtctggcagagattggacgaaagtaaggcccagcaggagcagcatgagctgaaactgcgcaacttgattgagaacaggtgccaagcccacaatctagacactgatcgggagcagaaggcccagttcgccaaggaggtgttggcagaccaacgggaatgttcccaggccctggaactggctgccgaaatggatgtgctcaagaaacaagaagatctgaagaagctcaaggataaacggcgccagcagctcattgacttgcaggatcagatcaaatggaatcttaccatcagcgctcggcaagcacaggccaatatccgtgaggatgtgggctacaacatcctcgaagaccgccagatttacgaggagctcatggagaagcgttgcgccaggattcacaatcgcgattggcaccagcagtacatgacgcacacggctgccgagcgagctgctcgcagggaagaggatctggcacgggatcggaaatacctgggcactgggtgtgtgcttggccagcagccgaagcaaccgtacggcaaggaagtgcgctag

SEQ ID NO: 33258 - protein, 326 aa, DROSOPHILA
MDVVEFLTRTDRRNLKSQISFQVAQKMHEWHADLDNRRWNLCLLLQKEALEADEQIAEMLQAQADEADRKRHEWIEMERLKREEAEMELVKVKKQQREIENSEAHRHMLTKEILLESKQAQLHQIEEKKALKRRQACVEILWQRVWQRLDESKAQQEQHELKLRNLIENRCQAHNLDTDREQKAQFAKEVLADQRECSQALELAAEMDVLKKQEDLKKLKDKRRQQLIDLQDQIKWNLTISARQAQANIREDVGYNILEDRQIYEELMEKRCARIHNRDWHQQYMTHTAAERAARREEDLARDRKYLGTGCVLGQQPKQPYGKEVR

SEQ ID NO: 33259 - DNA, 8454 bp, DROSOPHILA
gtatttgaagcggccaaacagccccagaaattacgtattacgaaaataaataaatttttctctaagctgcttctgcttcttcgtcttgtgcggctaataacaaaaacaacggcaatgctgtgtctttgtttttacgtcaggtcgagattacaagcatacatatagctataagcaggttacatgtgtgtgagcgcacttcccccacctgttgcagtaattttaattggccaaaaccatttcggtggaatctcgagacagtgccgtatgttctggcatttgtggaaaatcatttttctggcaaaatgtaaaacaattgaaaagcaacaggtaaaccagcagaaatacccacacacacacatgcgggcattactaagcagacatatgtttgtgtggcagtgaggctccaaccgcaaaagagaaaactacagccgatcacgttctcacctacacaaaactcgtaggtcattttgctggggcacaacgacttcaagtgcatatgccctcatattagctaaaaaataaatcctttaattttcggtaatattcggttttttttttaaatcaacaagcattaaaatgaatagttcaatttttatattatttttaaatgaacttaaaataaatttttagtatagcgtttaataatttgttacaaacgaggaaaatgtgtccgtctgtatttaacaataacttataaaatatttgttccatttttaaatgtattaatgtttatgttatcttttgtcttgtcaacttgttctgataatggtgccacttagaatgtttcgacagatgactcatctggtgtagggcgtctaccagcttcccctggccgaccttcctgtccaagaactagttttacatctgaagcctctgctctctctggaagtgcatccaagccggagagagagccgacgccgactgcgcagcttggagagccgtgttttggtcgcaatggcaatcgctgccaagccagtcagtttgttgatgggcgcgtgatcggtaaatcgaagtagcggaccgtgaaggtgcagaggatattccacagagcacactgttgttgttgttgtcgctggtcgttgttgttgtcgttgtggttgttgttgctgctgtgttatcgtgtaaatttgcgcagttcagcttgaaagcagagaaaaagagagagagcgcgaaaaaataaaaaacccgctagcatcccggcactcttgttgttgttgtgattttgttttcgtctcgcgtgcagttggaaaataagaagtaatactacaaactgcactaattattttgatcaacgaacaagacgaccatatcgagtgaaaacaggcgtaaatagtttggcaaaagtaagtgagcgattaaacacatccaaagtcgcgctttaaacgttattttctgcaaagtcattagccaaaggcaggtcaagagagaaagggagagcaaaggctgtgagcgctgagtgggaggaaaatgaaactgcgagatcgaaacggctagagaagatgagggaaagagccagaaacaaagcctttgtttaattttaatggcacttgaaaaattaaaattacaaatcatcattgctctccagctctaatctctacaattgtttatctctcacgtcggagctcgcgctctctatctccggctctctcgagtgaattaaaacgaatcgacttgaaaaagttggagcccagcttttttgttgtgctattcgctgctgtctcccgtcgcgttcgtttgtgtttggcgccgtggcgctccagaaatagcggtgaattgctgtgcctgtgactgtgactgctgctcctactcctactcctccttcagcttgtaacggtatgcatgcgtgcataaaagcaaaagcaaaagtgctcaaaaagcaattacaatataactgaaattaacgtttggtgtgccagtgtgcctaatgaaatcccatgttgtgtttataacattagctttcaaaactaggacacagaaagaaacatttaagatgatctgctgaattttacgatcagatcatttgtacgattagtttttaaatgaatgattttcatttatcgagtgttatccactcaactaactatttcctagaagcgttatgttactgatgtatgtatagctctaaattttggtgtgtatttaacaagatattcacctgtttttctctgtgtacacttagagaaacagtcacgcacaatggcaaataagcacgcatagtccgcgtgtcccagcttcagcttctgctaattatgaaagttgaaaaaaaaaacaccgacgctttactttgtttgtttgtttttgttagccttgtgcaatgccttgtgttggccaaacacctgttgaatgccgcccgaaaaaagactgcaaaacggcaaagaaagtgtctggccagcatgaaaagaaaatgcccgtaaacacatggcaacataaagccataaaactaaaactgaaaacacaagtcagcaaagagagtggaaatggaggaccgaaaatggttcacaataatttcacagtcagtgcgcaggcccaattgaatttaaatttcgcttctcccccactcctccgatcccactcccccctcggccacattctcttaccgcatttgcatatctgatgtgtaagtaagtacacacagcgttgtctaatctcagtcgccggaaatctcagtaattagggcgggcagcttggcttgttcctagctaaatctttgagattactgaaacttattcatatttattgctgaggtcgcctttaggtcaccagcataaaactagctgacactgtgctgttttctgttttaaaactataaaaaatatatatttaatttactagctttttaaaaagtaaagaaacacatatttgaaattttgaccagtctggaaagatacataaaatacagaaagcctgtacatgtacaagcatgtaccatatactgaagaaacctatataaaaatgtcctcctaaaaaggtaattgcgaaatactacacaagaaaaccgtctattatctgcacaatttctgtgaagtgacagccactgagaaatagtgtcaagttgctctcgtccgctaatatcaatttagacgatatacatacggccagatctggcacgcagtctgcattcccaatgatgcgggatggatttggattgtggggcggaatctctaagtgcgataagatgcggagaattacttccgcgacttggctctgttttgttaaatatactatgtgtgtatgtgcgtagtacagcgacttgtacggagtacataaacatatgcatatctgcggtttagttgtcgacattatcttttgttcgtcgtttgaaaaatgtgtgtagttgttggggtaattgcgcacaattgccgggctacagggtgctttgagtctttgtttttggatttcgttttcgatgtttagctacgaaagccaagcgttgtgctattttcgaattttgtattttataacccgggctgtcgtcatcggcgtcgctcgccgtttttggccaatttagctttcgcttttgtgcgattgcctaacaaaacccccgttcccaattccgcaccgcacttccctcctttttggccaactccaaataaatcaaacccgtactatatacacacatgcaagcgccaaacaaagaaaaagagagccaaaaaccagcaaagcttcattaattttttgcaagatttttcttaattatgagacggcacgaaatgtgagaattgcacgaaagaaccaattcacaaaagatccgttcgtcacatcatctctgtccacaaggtgtgactttgatccggtgtgagctcagcttagcttagcgactttgttctaatttcggtttatatcttttttgtcgtttttgtggttttacttctgagaaactgttgccttattgtctttgcacaatgacgaatgtttgagtgcatttctacatccgtactccatagtctggaaaatggataaaccagtcactttactggtggtggcttcgtggtagcttcatgatttcaatattattgccttgcaaataagtatgtaacttctctgttttggtgagctcattcataatatagaaatattaaatgtgccatagggacctccttgcaattatatgtagtaaaaattgttccagagggagcaatcgagctttatgttaatttgttttaaaactcaaaagtaacattactccgatgctctctggctctttagccatctaaactacaaatatgaaagcaattaatcaaataacacacttcagtgccttttaaaaagctttgttttgcttttttgttaattttaaaaaaaggcaaaattttatttcaaggttgataattaagtgacttcctaaaatcgcgcttactttctacacgtttaagaggattaaattgagactgaatgttaattttctttgtgtattcctgcggtgtgtatagttttataaaagtgtctaggtccaagtgcaccgatctcgacagctgatgaaggcaacaaataaatcaggtttgagtctgcgatgacgcagatgggattggcattcatggatcccgatctccactccgcctagcccatcgagcagtgtagattctttgctgtccctctctccgaacacgatttgcaattagccaaaagaatacattcagattcagtttgttgtataacgataattagcagtacagcggcagctggtatttgtatgcacactgtattttatactcgagggatccgagaggaaaaacccaacacaatgccggcggcgggcaaagttcaatccgtagctcatttgccaattctaattccaatttcagctcccttaaacgcttaaaaacggcgccgaccacaacaatgccttatcagccagccaacagcggcgggacgtctggtggcagcaaggcggcagccaagatggcccagctaaagttctggaacaagcagaacagcagcaagcagcagcagcaggacaaggacaaggacgccgccgacgggggcaacaacaccagtggcggcggcactggcagcaacagcaacggggatgccaaaagcgaggccaagaacggcaagcgcaactggctgcacacgccggagcagctcatcagcggacacgcggtctatctagtcaaggtgagcaagggacaacccacctgtgacgaccgaccccgataggcggtacatggcgagaaacatggccgtcgttttcgcttctttgtggtgccgagaaaccgtccacaactcatgcaccctaagggagtaaaatgaaaacaaatatttaacagattcgacgttaacctcagattaaattgaatggcatcgccataaaactttactttagtatccctttcaatttgtagtggccttctctgcgtatacgtaatgtgtttattataggattgtttatcaatatagaatatatacgtatataactaactatttatacctacatcggtcttttagaggtttaaatattaatagtgtactatttatacgtttaatattccagattaacaaatcaataatttgctaaattaatttgaagtataagtaaaatacctcaaattccttatttcctgcaacaagcacaattaaataacttcgttttagtcgaatgcaattttcaatttttaagtcgaccgtaaaatggaacacatttttttccataggaaacatatttttgctttaataggcaattacaacgaaacagtttaaaaagtagtttaatggcatgtcattgttttcattttccagttctttggtaacctgagcgtggatcagcccaaagggattgaggtggtcaaggaggccattcggaagctgcagtttgcccagcagatgaagaaggcggaaacgggcacccaggagaagttcaagaagcttgagatcaccattagcatcaagggcgtggcaatccaggagccgcgcacccacaagatcctccaccagtttccgctgtacaacatttcgtattgtgcggacgagaagggtgtgaagaagttcttcagcttcattgccaagacggtgaagacgcaggacggcagcgatccgacgtcaaatggccatgcaaacggaaatggcgatggtagtgccaaagtcgaggagagccacgagtgctttgtcttcatttcaaacaaattggcctcggatatcacgctgaccattggccaggccttcgatttggcctacaggtgggttattaagcagttttattcaagccacatcattttactgacgccatgactgtctttaattaacagaaagtacatggatagcaccgaaaagacgaatctgagcaaggcgcagcaacagattaatcatctgcaacaaaccgtaaacgtttacaaggagcgactgcgagaagtttccgccaaattgccaaaggccgagctagatgccctgctcttcaatctgggaatcaaggatatcctggaagcgcccaccacagaaccccagaatggaatcgaggtggccagcgaagccctgagcaacggcaagctgggtaaaatgatgctcaactatttgtcgtacataaataaattccataactgcatttcagatgatgataagctgctaatcgacaccaattccaccacagcgtcgacccactcagcgtcgcccagctcgttcttgccgattgtcccgccgaggaacaatttatccagccagatcagcatcggcggcaagagcaatagccaaaagatggacgagctgctgctgaactcggattccgatagtgatttcgatccgcgagcggatgagacgcaggagatcggcggcactggtcgcagtgcgataagcaatatgttcggcttcgagccggccaatagctttggtcagcatttgttttccaacaacaatgatcacaagctgcaaaataataacagcagcttactgataacgagcaataacaacagcattaacagcagtggcttctccagcgagctgaacataacgccgccattgtgtatgtttaaagatgcatatccaagcatataggttactaatgatatgttttcttttcacagtggccccaccgccaaagattgccgctcccaggcgcctaaactcggtgacaacgggcaacggcctgaatggcaacacagatctattcggttcggatcctttcgaattgaacaatggaccgaacattttcaaggtgagttttgtcgaaactaactgctgtaagtcattattaatactttgatgtcattaaagcaaaatcagcttaaccttgacgacttctcgctggagagtttggatcccctgcgaaagtagagcggtgctaccaaggccattttcacacttcaacatgattgaaactttatgacatcccaaaagtttgtctcatcgtttatccttctatgtttctccgattcgcatgcattccaatccaattgcaattcgatttatttaatgtgtattattgtttatatattgtattgtatttattatcattgattttttgtcgattttatattgcatattatgaattctactattattataattataaatatgataataatctgaggtcaagatcaaaagaacacaagaaacaaccgcaatgcaccttgtttaaacgtatcaatttgttgctgtagttgaatagattaattgatggtcgagtaaagcgaatgaaaaaatgttaacaagtgataaatgtgaaaattgctaaacaatgctaactgaatgtgagaattttgtataaaataattataaagacataaccagaagcaaatgaatcgattactgtatagagccgaaatacgaggagaattaaagcaaaatgaacaatatttaatgttattgatgcaatatagagaaatattattattactattattattgtgtacgtaaagaataaaatgtagtgcctaaaagaaaactccgctgtttgatctttaacaaactgccgtgtttgtcatgcatccgttttatttcaaataacaacacgataactacacgtaactgccatgaatacaaatatgagttgcttccgttgctgctgcagtttgggaatgtttgcctagggctagtgatatatatcgcgatttaatatccaacaattgtttcctgaatagtcctctttgcttaacctgagtaacatttgctggagcacatccttcatgcgtcctgaagaaagtcgcagcgcttgggtgtggtggccgacaactggcgtgcgttcatatcggagctctagaagatcagagagtttggaaagcttaatggttaccctgtgtggcaataaatgaaaaccaataaactgcaaacgcgtctggatcaaatgcagtcctatgaattctttaaaaaaccatataaataacgccaacgattggaaaagttctgaaagaaatcatcagtggagagtatataagtaaagaaagaggtatttaaaaacaatagaaataaccatagacattaagttggaattaaactgttaataaaacaaatgaaagcaacagaggaaat

SEQ ID NO: 33260 - DNA, 2128 bp, DROSOPHILA
cggtaaatcgaagtagcggaccgtgaaggtgcagaggatattccacagagcacactgttgttgttgttgtcgctggtcgttgttgttgtcgttgtggttgttgttgctgctgtgttatcgtgtaaatttgcgcagttcagcttgaaagcagagaaaaagagagagagcgcgaaaaaataaaaaacccgctagcatcccggcactcttgttgttgttgtgattttgttttcgtctcgcgtgcagttggaaaataagaagtaatactacaaactgcactaattattttgatcaacgaacaagacgaccatatcgagtgaaaacaggcgtaaatagtttggcaaaactcccttaaacgcttaaaaacggcgccgaccacaacaatgccttatcagccagccaacagcggcgggacgtctggtggcagcaaggcggcagccaagatggcccagctaaagttctggaacaagcagaacagcagcaagcagcagcagcaggacaaggacaaggacgccgccgacgggggcaacaacaccagtggcggcggcactggcagcaacagcaacggggatgccaaaagcgaggccaagaacggcaagcgcaactggctgcacacgccggagcagctcatcagcggacacgcggtctatctagtcaagttctttggtaacctgagcgtggatcagcccaaagggattgaggtggtcaaggaggccattcggaagctgcagtttgcccagcagatgaagaaggcggaaacgggcacccaggagaagttcaagaagcttgagatcaccattagcatcaagggcgtggcaatccaggagccgcgcacccacaagatcctccaccagtttccgctgtacaacatttcgtattgtgcggacgagaagggtgtgaagaagttcttcagcttcattgccaagacggtgaagacgcaggacggcagcgatccgacgtcaaatggccatgcaaacggaaatggcgatggtagtgccaaagtcgaggagagccacgagtgctttgtcttcatttcaaacaaattggcctcggatatcacgctgaccattggccaggccttcgatttggcctacagaaagtacatggatagcaccgaaaagacgaatctgagcaaggcgcagcaacagattaatcatctgcaacaaaccgtaaacgtttacaaggagcgactgcgagaagtttccgccaaattgccaaaggccgagctagatgccctgctcttcaatctgggaatcaaggatatcctggaagcgcccaccacagaaccccagaatggaatcgaggtggccagcgaagccctgagcaacggcaagctggatgatgataagctgctaatcgacaccaattccaccacagcgtcgacccactcagcgtcgcccagctcgttcttgccgattgtcccgccgaggaacaatttatccagccagatcagcatcggcggcaagagcaatagccaaaagatggacgagctgctgctgaactcggattccgatagtgatttcgatccgcgagcggatgagacgcaggagatcggcggcactggtcgcagtgcgataagcaatatgttcggcttcgagccggccaatagctttggtcagcatttgttttccaacaacaatgatcacaagctgcaaaataataacagcagcttactgataacgagcaataacaacagcattaacagcagtggcttctccagcgagctgaacataacgccgccattgttggccccaccgccaaagattgccgctcccaggcgcctaaactcggtgacaacgggcaacggcctgaatggcaacacagatctattcggttcggatcctttcgaattgaacaatggaccgaacattttcaagcaaaatcagcttaaccttgacgacttctcgctggagagtttggatcccctgcgaaagtagagcggtgctaccaaggccattttcacacttcaacatgattgaaactttatgacatcccaaaagtttgtctcatcgtttatccttctatgtttctccgattcgcatgcattccaatccaattgcaattcgatttatttaatgtgtattattgtttatatattgtattgtatttattatcattgattttttgtcga

SEQ ID NO: 33261 - protein, 517 aa, DROSOPHILA; identical to SEQ ID NO: 28752

SEQ ID NO: 33262 - DNA, 3085 bp, DROSOPHILA
gctgtagatgctcctcggcgttcaaatcagctcttgaacggtacaaagatcgtcaacaaaagaaaaccaccagcttcccaaagcctgattacgaaatccagtgtcctggggagtggcctcatttgtcgctctaagctgccaaactaaggaattttaaacaatcgtttccggaacagcagctctaagacgagctcttccgaacgctgtttatccaacattaacattaacctttcggccatctattcatcgtcatgttgcgatgaagtcaacttgtgaactaagaaagttacgtatgatttctttcgacacaagctaatttcagcagaccatgatgattgaaaaatgggccttagttatttaatgatttgtaatattaatttgttatgcaaactaatttatataataattatttacctatacctaagtcccaaaatttgaaaatatataaaagaaaacatacgtgaattctataaactatttgcgatcaaatattcttttaggtaagtacacttttcagagtttacgactaatctaaaaaagttcatggcgatctaaagcaaatgtacatatatgtgtatggtaaaggtatgttggtgaaagaaagaaatgaataaaattagattgttaaaaggtagctgatttatctgtttttgttagattgcaactaaactaatggctttacatgcatttagcacacagagtagtgcaatcagagaagttctatattgtttatattattatgcttatttttgtgcaagcggtgaaatcggggaatgtactgcgagtattgcggttcactgctccaatagaatgaccaacaaagcagccagaacaaacggctttgaagttcaacttaccatgtcgccgaatcattgtagcgtttaatgcccaacctttcaatagagttttgcagcgattagtggagcacttcgacctggcactccgagcgcatcggctgtacttctgcacgatgtccgagaatagagtaatccatatgtggatgcgatgtctgatgccactgctgctggccaactgcattgcggcgaatcccagtttcgaggatcctgaccgtagtttggatatggaggcgaaggacagcagcgtggtggatactatgggcatgggcatgggcgtcctggatcctacgcagccaaagcagatgaattaccagaagccgccattgggttacaaggactacgattactatctgggatctcgacgaatggcagatccctatggggccgataatgatctgagtgcctcgtccgccattaagattcatggcgaaggcaatttggcttcgctaaacaggccagtcagtggtgtcgcccacaaaccactgccctggtatggcgattattccggcaaactgctggccagtgctcccccgatgtacccgtccaggtcctacgatccctatattcgccgctacgacaggtgagtgtgtgttcaagtaaaccgaaactatcgcaagaagatagttcatctggacagttttttctcagaatctgataattagtttaacaaaaaaatgaatattggaaaaaaatgattatgaaattaatcttaactgaatatgaaattctgctcttctctattattgtctttactattattaaactattaaatttttgcagatatgatgagcagtaccataggaactatccacagtactttgaggacatgtacatgcaccggcaacgtttcgatccgtatgatagctatagtccccggataccgcagtatccggaaccctacgttatgtatcccgaccgctacccggatgccccgcctttgagggattatccgaaattgcggcgcggatacatcggtgaacccatggcgcccatcgattcctacagcagcagcaagtacgtctcttcgaagcagtccgacctgagttttccggttcgtaacgaacgcatcgtatactacgcccacctgccggaaatcgtacggacaccatatgatagtggatcaccggaggatcgaaactcggcgccttacaagctgaacaagaagaaaatcaaaaatattcagcggcctttagcgaataattctaccacgtataaaatgacattgtagaaggggattttagaatgtaagatccatttttttttttcattattcgtatgcatttgtatttgtcacccatggaaattagcaccaagttcagtgtaccagcacattgattaaaaatatcgaggtgagcttattagcaattttgatgatttttcatagatttgcttttaaattgtttcactcacttctcataattcataaggttcttttttttttgttgatttataggatcaatataagcgcataaactataccatatttgaataataaatttttttgaaagtataatcgaacacaaaaggaattaaattgactgctaatagcgtatattaattctaaatccaatgaaattataaaaaaataatacaattatactctaaaagttgccccacttaaattgaattaagttattctcctccactcaaacgtgtaaaaaaaaaaaactttcaaagcaaataaagcccattcacaacttgccaggtttggtttcttttgaccaagtttcatttacgtatatggatttattgaagacccggcaaaattacgtccatcggttcgagatccccagagtctcgttaattacgcaacgccattactttgacttttgtttcgaactagggggatgtggatgtggatattaaagtttgcgatttgtgtaatttaactttttcgctgtctctgcaagcaaacaagaaggattcgtaattatttacaaacatgcatatgtacatatgtatatctatactcgcttcgtataaacgagtatgctcacatggtgtacacatggaagaaggtcaaaaggtccattcatcctggagctttatgtgtgtttgggtcttggtctcgttttccttgtcgttttgacacaagaggagcaaaagagctattatggtgcccaataccagcgacaacaaatacttgtgtaatgcatgaacacgtacggctaattaatgtccttttttttgtttttttttttggagctaagcttgtcggcgaaaatcgg

SEQ ID NO: 33263 - DNA, 885 bp, DROSOPHILA
atgcgatgtctgatgccactgctgctggccaactgcattgcggcgaatcccagtttcgaggatcctgaccgtagtttggatatggaggcgaaggacagcagcgtggtggatactatgggcatgggcatgggcgtcctggatcctacgcagccaaagcagatgaattaccagaagccgccattgggttacaaggactacgattactatctgggatctcgacgaatggcagatccctatggggccgataatgatctgagtgcctcgtccgccattaagattcatggcgaaggcaatttggcttcgctaaacaggccagtcagtggtgtcgcccacaaaccactgccctggtatggcgattattccggcaaactgctggccagtgctcccccgatgtacccgtccaggtcctacgatccctatattcgccgctacgacagatatgatgagcagtaccataggaactatccacagtactttgaggacatgtacatgcaccggcaacgtttcgatccgtatgatagctatagtccccggataccgcagtatccggaaccctacgttatgtatcccgaccgctacccggatgccccgcctttgagggattatccgaaattgcggcgcggatacatcggtgaacccatggcgcccatcgattcctacagcagcagcaagtacgtctcttcgaagcagtccgacctgagttttccggttcgtaacgaacgcatcgtatactacgcccacctgccggaaatcgtacggacaccatatgatagtggatcaccggaggatcgaaactcggcgccttacaagctgaacaagaagaaaatcaaaaatattcagcggcctttagcgaataattctaccacgtataaaatgacattgtag

SEQ ID NO: 33264 - protein, 294 aa, DROSOPHILA
MRCLMPLLLANCIAANPSFEDPDRSLDMEAKDSSVVDTMGMGMGVLDPTQPKQMNYQKPPLGYKDYDYYLGSRRMADPYGADNDLSASSAIKIHGEGNLASLNRPVSGVAHKPLPWYGDYSGKLLASAPPMYPSRSYDPYIRRYDRYDEQYHRNYPQYFEDMYMHRQRFDPYDSYSPRIPQYPEPYVMYPDRYPDAPPLRDYPKLRRGYIGEPMAPIDSYSSSKYVSSKQSDLSFPVRNERIVYYAHLPEIVRTPYDSGSPEDRNSAPYKLNKKKIKNIQRPLANNSTTYKMTL

SEQ ID NO: 33265 - DNA, 4508 bp, DROSOPHILA
aaattctcgccggatggtctttggattgcctctgctggcctggagggttccatactcatctgggacatacggaagagcaaacagataatggagttcatagccgatccgccggttacggctatcacatgcgtgcaattccatccgtttgagttcctgctggccgccggtcgcgtcgatggcaccgtttccatttacgatctggaacaccagcagctcgtctcgcagaccacgcacttctatggccaggccatcaggtgtataacctttaggtgagtcctgcaaagaataatccgcaatcgtgaattgatttatgaaaagaaatagtaatatagtaattttgccaaaaagtgcataaattctaattatctgcatgttaaactttatttatttcagtgacaatggcgagtgcctttttgttggcagttcttcgggcatttcggtaattggatgggaaccggatcgtgagctggaccatataaaaagcacctggtcctccttggcggacatgaaagtggtcaacaataagttggtaagtgaaagcacttactcattaagcgaagcacccttccaaatctcgtcatccccgttatcttttttgacaaaaataatcagtattttggtcagaatattctaaaaaatggtccaaatatggagtgtcatacctcgttgagtttgtttttttaatccaaatcgatttgcattcaaatttgggaattctaggttttttaaattttttgcaaattttgatgataaaattttgattataaaaaaggcgaaaaattggccaaaaactaattttacaaaatccgtccaaaagtgaaaggggtggttagtattggtaattaggagcacaaaacggtatttcttttggcggtgtggccatttttagtcaagttatacccagaaaaccaatcttaaatattgcattttatgccaaaactggtttcactgattttatgcgaaaaaaataatcggtattttgagcaaaacattaaaaataatggcacaaatatggaatgtcataacttgttgagtttccgaatcaattcgcattcaaatttaggaaatctaggtttttcactttttgaaaaaccaatcttagatcttaaatgtaaaatgtctacaaatggaatatccaataaaaaccattgcacttccttttgtagatctgtggttgtcatgagatcgacaccgtttcaatcaacaccatcagtctggatcgagtgataccattctatcagccgccaaactcactacccaactttaagcacaactcgacgaaccgaaagagctttacacgtggcaaccagaagttcaggctgtcagttggcggtgccaagccggcacaggtgcaggaggagcacgagggcgacaagagtggattgtcctcgcccaactatagtctggaggttgtgaacgaggcggtgctggagtcggcggagacttctccaatgtcctcgttgccacctgtccacttggcttcgatggccggatcgtcggcggacttggcgccgcatcatgtcgtatatggcggagcaatcgattctgccctaaggcagggtaagtactccagagtgcctgataatatggccagctatggcagtagttacggggccatcgatacccgcctgatgtccttgaacgaacccagttcactgcacaagccggacatttacaatctatatccgctggacaagaacgaggaggcggatgtgcagcagttggagttcaatctgaacgatagcaatccgccaatactcaacaactatgataactacgaaatggccgaggactttccggtcaatcagaacctgaactacattaccaataactataagccagtgcccgcaacctccacgatcaacgcctcgtccaagtcgatcaagaagaccactaccaccaccctgcacaagaggacaacgaacaacatggccggcgcgaagcagacgtccacgggcatctttggtggcagcaagctaagccaggtctcctcggtcagctccatggaactgcacaagctggacgacaacatggtactgaaaaagtcctcctcctcgaatgtcgtcaacaagaacaagcggccaatgggctcggcccagagtcagttcagcaaggagaacaatcaacagaaaaatatcaatgtggagatcatcacaaagccaccgatgcgatcccgcaccaccctggatatgcgtacgtcgcaccaggctaaaactcaggaaaagcaaattcacgtgagtgcttaaaaacttcgcttggtgccctttatttaattaattaattaattaattaattattccagcagcagcagccaatgaacaatcgcattataatggatgatcacgacttcgatatgctctcgagatcacacgaggctgtgctgcaggagctgagcaatcgtcagtctagcctggatttgctgcggcacgcaacaaggtaagtattggttaaacggtctatttgaaacattcgatcgattgacacatccattggtaatcatgtaggtctcacgatgtgctgggcgcattaaggcaggcaaggagctgtggcaaatccattttcatagatctactcggagccatactggagaaaccgtaagcataatattataaatattaaagcgacagcgataacaataggagtttaatcccataacaggtcctcgtggaacttggacttctgcatgtttgtgctgccagagatttacgaactcttgcaaagccaacacaagttgtaagtatggataaacataaacgaaaaggtagcccaagtaatcccaatctgtattttagccactttacgagagcctgtgataccctgcgtattatattgtcgaacttcttgccaactatacaggagaacctcgattcctgggccgccaatggcctgggcgtcgatgtgacacgcgaggatcgacagaggaagtgcgccgagtgccagcggtggttgttgcaaatcaagaacctgcccgagagcacacactttgggtccacgctgtcacaattacaaaacataattattttctaagggcaacgcatatccagctgtagatgctcctcggcgttcaaatcagctcttgaacggtacaaagatcgtcaacaaaagaaaaccaccagcttcccaaagcctgattacgaaatccagtgtcctggggagtggcctcatttgtcgctctaagctgccaaactaaggaattttaaacaatcgtttccggaacagcagctctaagacgagctcttccgaacgctgtttatccaacattaacattaacctttcggccatctattcatcgtcatgttgcgatgaagtcaacttgtgaactaagaaagttacgtatgatttctttcgacacaagctaatttcagcagaccatgatgattgaaaaatgggccttagttatttaatgatttgtaatattaatttgttatgcaaactaatttatataataattatttacctatacctaagtcccaaaatttgaaaatatataaaagaaaacatacgtgaattctataaactatttgcgatcaaatattcttttaggtaagtacacttttcagagtttacgactaatctaaaaaagttcatggcgatctaaagcaaatgtacatatatgtgtatggtaaaggtatgttggtgaaagaaagaaatgaataaaattagattgttaaaaggtagctgatttatctgtttttgttagattgcaactaaactaatggctttacatgcatttagcacacagagtagtgcaatcagagaagttctatattgtttatattattatgcttatttttgtgcaagcggtgaaatcggggaatgtactgcgagtattgcggttcactgctccaatagaatgaccaacaaagcagccagaacaaacggctttgaagttcaacttaccatgtcgccgaatcattgtagcgtttaatgcccaacctttcaatagagttttgcagcgattagtggagcacttcgacctggcactccgagcgcatcggctgtacttctgcacgatgtccgagaatagagtaatccatatgtggatgcgatgtctgatgccactgctgctggccaactgcattgcggcgaatcccagtttcgaggatcctgaccgtagtttggatatggaggcgaaggacagcagcgtggtggatactatgggcatgggcatgggcgtcctggatcctacgcagccaaagcagatgaattaccagaagccgccattgggttacaaggactacgattactatctgggatctcgacgaatggcagatccctatggggccgataatgatctgagtgcctcgtccgccattaagattcatggcgaaggcaatttggcttcgctaaacaggccagtcagtggtgtcgcccacaaaccactgccctggtatggcgattattccggcaaactgctggccagtgctcccccgatgtacccgtccaggtcctacgatccctatattcgccgctacgacaggtgagtgtgtgttcaagtaaaccgaaac

SEQ ID NO: 33266 - DNA, 2101 bp, DROSOPHILA
atggcacaaatatggaatatctgtggttgtcatgagatcgacaccgtttcaatcaacaccatcagtctggatcgagtgataccattctatcagccgccaaactcactacccaactttaagcacaactcgacgaaccgaaagagctttacacgtggcaaccagaagttcaggctgtcagttggcggtgccaagccggcacaggtgcaggaggagcacgagggcgacaagagtggattgtcctcgcccaactatagtctggaggttgtgaacgaggcggtgctggagtcggcggagacttctccaatgtcctcgttgccacctgtccacttggcttcgatggccggatcgtcggcggacttggcgccgcatcatgtcgtatatggcggagcaatcgattctgccctaaggcagggtaagtactccagagtgcctgataatatggccagctatggcagtagttacggggccatcgatacccgcctgatgtccttgaacgaacccagttcactgcacaagccggacatttacaatctatatccgctggacaagaacgaggaggcggatgtgcagcagttggagttcaatctgaacgatagcaatccgccaatactcaacaactatgataactacgaaatggccgaggactttccggtcaatcagaacctgaactacattaccaataactataagccagtgcccgcaacctccacgatcaacgcctcgtccaagtcgatcaagaagaccactaccaccaccctgcacaagaggacaacgaacaacatggccggcgcgaagcagacgtccacgggcatctttggtggcagcaagctaagccaggtctcctcggtcagctccatggaactgcacaagctggacgacaacatggtactgaaaaagtcctcctcctcgaatgtcgtcaacaagaacaagcggccaatgggctcggcccagagtcagttcagcaaggagaacaatcaacagaaaaatatcaatgtggagatcatcacaaagccaccgatgcgatcccgcaccaccctggatatgcgtacgtcgcaccaggctaaaactcaggaaaagcaaattcaccagcagcagccaatgaacaatcgcattataatggatgatcacgacttcgatatgctctcgagatcacacgaggctgtgctgcaggagctgagcaatcgtcagtctagcctggatttgctgcggcacgcaacaaggtctcacgatgtgctgggcgcattaaggcaggcaaggagctgtggcaaatccattttcatagatctactcggagccatactggagaaaccgtcctcgtggaacttggacttctgcatgtttgtgctgccagagatttacgaactcttgcaaagccaacacaagttccactttacgagagcctgtgataccctgcgtattatattgtcgaacttcttgccaactatacaggagaacctcgattcctgggccgccaatggcctgggcgtcgatgtgacacgcgaggatcgacagaggaagtgcgccgagtgccagcggtggttgttgcaaatcaagaacctgcccgagagcacacactttgggtccacgctgtcacaattacaaaacataattattttctaagggcaacgcatatccagctgtagatgctcctcggcgttcaaatcagctcttgaacggtacaaagatcgtcaacaaaagaaaaccaccagcttcccaaagcctgattacgaaatccagtgtcctggggagtggcctcatttgtcgctctaagctgccaaactaaggaattttaaacaatcgtttccggaacagcagctctaagacgagctcttccgaacgctgtttatccaacattaacattaacctttcggccatctattcatcgtcatgttgcgatgaagtcaacttgtgaactaagaaagttacgtatgatttctttcgacacaagctaatttcagcagaccatgatgattgaaaaatgggccttagttatttaatgatttgtaatattaatttgttatgcaaactaatttatataataattatttacctatacctaagtcccaaaatttgaaaatatataaaagaaaacatacgtgaa

SEQ ID NO: 33267 - protein, 539 aa, DROSOPHILA
MAQIWNICGCHEIDTVSINTISLDRVIPFYQPPNSLPNFKHNSTNRKSFTRGNQKFRLSVGGAKPAQVQEEHEGDKSGLSSPNYSLEVVNEAVLESAETSPMSSLPPVHLASMAGSSADLAPHHVVYGGAIDSALRQGKYSRVPDNMASYGSSYGAIDTRLMSLNEPSSLHKPDIYNLYPLDKNEEADVQQLEFNLNDSNPPILNNYDNYEMAEDFPVNQNLNYITNNYKPVPATSTINASSKSIKKTTTTTLHKRTTNNMAGAKQTSTGIFGGSKLSQVSSVSSMELHKLDDNMVLKKSSSSNVVNKNKRPMGSAQSQFSKENNQQKNINVEIITKPPMRSRTTLDMRTSHQAKTQEKQIHQQQPMNNRIIMDDHDFDMLSRSHEAVLQELSNRQSSLDLLRHATRSHDVLGALRQARSCGKSIFIDLLGAILEKPSSWNLDFCMFVLPEIYELLQSQHKFHFTRACDTLRIILSNFLPTIQENLDSWAANGLGVDVTREDRQRKCAECQRWLLQIKNLPESTHFGSTLSQLQNIIIF

SEQ ID NO: 33268 - DNA, 5609 bp, DROSOPHILA
ttgcagctgcgctccgatgtcgtgcccaagaccgccgagaacttccgcgccttgtgcaccggcgagaagggattcgggtacaagggctccattttccaccgcgtcatccccaacttcatgtgccagggcggcgacttcaccaaccacaacggcactggcggcaagtccatctacggcaacaagttccccgatgagaacttcgagctgaagcacaccggctccggcatcctgtcgatggccaacgctggcgccaacacgaacggctcccagttctttatttgcactgtgaagaccgcctggttggacaacaagcacgtcgtcttcggcgaggtcgtcgagggactggatgtggtcaagaagatcgaatcttatggatcgcagtctggcaagacctccaagaagatcattgtggctaactctggttctctttaagaaggtgcgatgcaaaagcaacagcaacattgcaagaagaaaaatctgttaagacgaaaaccatttgcattttctccaaaacatttttttttaccaattactgtactgtaatattacgagaaaaatacataacaaaccaacatattttcaatagacatgttgggtttcctttggccaatcaattgtatgtgggggccaaaagtgaatagaattagtgcccaccaatgtcagaaagcgttcaattggctatataatatgcattaaatctgtaactttaacatttccattcacaaaaaaaaaaacaaagaagaaaaacaatgagacgacaagagtcgagaggggcttagaaaaatgtttgatcttttgatgttggcttacttactactaataatagtattagtaatgctgattatctaattgcatatatatatatatataccaacgttctacgctatgtaccggaatcggaattgtattttcgtcttaataaatctgaataaacggcaaccaactactcaattgtttgttgtcactgctgggatctttggttttggtaaatggacatattttattggaagaatatttcggagctactcaaggtggcgtacaatagattgtattcatgctcgtaggcgttcacatgtcgttcggttatcgccactgtctggtgaagcttctcgtccagctgctccggcgccgtccgctgctggcccgccaaaatgtcgcgcaccttggagcgctccgcgttcaggtgctgcgtgatcgtctggctccagcccagctcatggaactccgtctgctggttcagcatgttgaggatgtagaccaggccgatggcgaagccatcctcgaacagcgagatcttggtctggtcctttttgtagatctttagcttctgcttgacccggtagtcaatgtagttcatgatgagcgccggtgtgatgaggtagaaggttcgcaggtggtggttatgtggattgcacaaaaagggctgaaagccttgcagaagaagctgcaatataaatccatgggttaagctggttacctaacttgttaagatcgtagactgcaccttgaagtaatttgtgctatcggaatagcactccttcatgtgacccaggctcttctcgtactccctgatggaaccctccgtagcctcgtgcactttggagcccccgcaactgaagttgctgtcgaatctggttttatacgagcgattccggaagttggcattcttgcttccagcctgcaggaggcgcacatagccaacagcgttgcctaaaagcaatatttacgtttatattttaagcattttcttgaattatggtctttaaccacctaccgacttgtgtgataaccttcctgaaaagatccatatacgtctcgccattgctggagcagcctagccttctgatcttcttaagaaaactatcggcgcgctcatagggatacgactgataggacttgctgtgcttgtgctccgtgtgaaaacgcagctccttgagcagccgcgacttgatctgctcgtcgtggaggaaggtggagaaggtgtaaaacttttggcgcaaaaactggtatataaagttgacggtggtgttgatgataccggtgccgtgcgtctgcaccgagttggccacgtgccgggtgccaatgatgtcgaggtgcttgctcctgctgttcgtctccacgaacacctgcaggttcatgttgtaggcatacgaggaggcgaaagtgtgtatattccgcatgatctgcagcacgtctatgcccttgaaagtgggaaagaattgtttggttaatagaagagattgcttattgatgattcaattggttacctggtcaattatctgattgggcaggtggtcatcgatgggttgcagctgcagcaccttgttggccaaatgacgcatcttttcatacgatttccagtcgtgcggagcgattgtcgttaagttgtagaacgtggcagtgaaatagttctcaagatgatctaaaatatgttaatgaatggcatgatctctcagttttgtaaccgatatcttaccttttataatattgtaatcaccatcgttttcaactgcaactgcattgatgcagagacgatagtctaaggcactttgctggaatggttgatcctggctctggaagagatgcgaaagggcctccacgcgcagaaagaactccaggtggttgctcaaaaactcaatgatcaagtcattcgctgattgcttgggacaccttgaacccctgaacatggccatgatcttgtccagatgatggctcaccgacacgaggttctgccgatgataaatggcataaacatgaagttgctttgccagaaactgagtaagaaaccaacctgcaaggagtagggattgcgttggagttcggtgtactccttaagcaccgaagtgtccagaaaccagtgattatataccagactcgaggactccgacgtgttaagttgtccaccaatattccgcataatgtcgctgatactattaacacgatgtaggatcgatttgatcaacttttgattgtcggcgggcaggaggcgattatctagaaactccccgagggctagatttacgaaagtcaaacgttgcttgctcggaaatcccataatggacttctcggccagctttattgtggccaaaaagttgatcttgcgctgcagcaacttgaggacaactatcttctttttcgttgtgtgcagcaggtgtatgaccttttgcttctgccattgtatcagtgagctgataaagcgcacgaaattgatttggtttgactcaaaggtcttctgaatgaccttcaggtactgcagcaaccgagagacgacgatccaatcgtttctggtcatgggcgtcatcagagccacgtgccgattgatcagcgcgactgccagcaggttaacttgatcggcataggagtgtccattgagaatcaactgcagaaaagtcttgaggtgtccaaagactcccacatcgaataccctttgcatttggatggaccacagcgatagttggacgcccaattggcgacaggtcctctgatcgctaagcctaaacttctccaatactgtgctatgaacttttgggccttgtccatcttgcgatcgggctgaagacttcatcagggttttggcatgtagagagaggaatccggaaggcgaccagaaaacgcttcggttgagaggcacctgcttatgcctggccaccaaatcgatcacattcttgaccagttttccctccatctggatgcctagctcatggacgacgaccacgaaggtggtaagtcgaataatgtgcttgggatcctcatagtttttaagttcgttactcggattcgcgtcgacgtcgagaagctgcctacgaatataggcattggaatgctgggtgatggggctaacactattcaggccaaattgcttcttcaattccatcaaattgtccagtagaatctgtttggaaatatccatgaaagggcggttaccattcacgtttttctttgacttacccgaaagaaatccttggtgatcagattctctatatccattagcgatgtactaaggccattgagctccaagttcgctgattggctattggataggttcatcagccacttcttgtacagcgcccacatggtggatatcttcgattggttcgccagttcattgaataccactatgtgttccagtaactcactcattgcatcaaagacagcctgcaagtttcgacttcaattggttactacacttgagatgtgagttcgatcgttgacttacgaatatgtggacttcattgatgtccattgggacgctaacagatgcggctatttgtctccaaaggttttggagtatcacaatcatgcgattgagcaagaagtaaacctggcagaagaagtccatggagctgctcatgcggaccaaggatccctccaagccggcggaaccctcggatgtgtgggtatgtggcgggagcgtatcatctaatcgaaagtcgctgaaaaggaatgccagctggaaccgttttgccttcctggacagatttctgcactgattgcacagattcgccagagttgtcagcggtttattggccaccagctccgattcctcaaagcttctgtccggagccatggaatcgttgcccataaagtttacctcgaccacgggcgacatatatacacactgtgcagactcggaaacatcccgattaggcactttatctcgcaataatttcaatttcccatcgtgctccgatatgaaggagccgtaatcccgtaggatatcctcggcaaacatagctgaaatagaaaatatatagataagaatagtattccatagctgatatcggcgttttcatacacatagagctttgctcttccttcatgtctaccaattttaaaaatattattgttttggttttctcatggcaaatttagggatggggcatttcaagtgggtggattccgattcgataacgctaaattctcgatatcttttgtttaaacaagcgtagttaaaacccaaaaactgtgtaaaatcgaaaatcgcgattaattgaatggaaaagttggtagcatgtctattccgataaatgatttatttatacaatttataagcaaaaataatcctcagataataaattcattttatttatataagaagcaatataaatttttgattcaagaaacagcggtaaaaatacataatcgtaatgactatgaatatatgcaatacctagttttcattctgacttaacaaattaaatcaatttctataagtttggttatcgatttccaaggattaaaatcgtactccttgacacgaatacctgtacgtcgcagtctatttttaaaacaagacttttgtccataaacaaatttaattttgatatttaagttttggacttaaatgttttgtagaataagttatttcggatgtcttatcatagaagttttgttatcgataacaaaaggcttgtcgtgtataagggccctaaacagcgtgtatgcattagtgtatgtgtacacacaagcgttgatgttccgtttccattcgttccactggccttacaaatgccgagcaataaaatcgcgtcgtattttataagtcattgcaggaattatttaatttgagcctgaaagcagtttgaccaactgactaggcaaatttggtt

SEQ ID NO: 33269 - DNA, 3186 bp, DROSOPHILA
atgtcgcccgtggtcgaggtaaactttatgggcaacgattccatggctccggacagaagctttgaggaatcggagctggtggccaataaaccgctgacaactctggcgaatctgtgcaatcagtgcagaaatctgtccaggaaggcaaaacggttccagctggcattccttttcagcgactttcgattagatgatacgctcccgccacatacccacacatccgagggttccgccggcttggagggatccttggtccgcatgagcagctccatggacttcttctgccaggtttacttcttgctcaatcgcatgattgtgatactccaaaacctttggagacaaatagccgcatctgttagcgtcccaatggacatcaatgaagtccacatattcgctgtctttgatgcaatgagtgagttactggaacacatagtggtattcaatgaactggcgaaccaatcgaagatatccaccatgtgggcgctgtacaagaagtggctgatgaacctatccaatagccaatcagcgaacttggagctcaatggccttagtacatcgctaatggatatagagaatctgatcaccaaggatttctttcggattctactggacaatttgatggaattgaagaagcaatttggcctgaatagtgttagccccatcacccagcattccaatgcctatattcgtaggcagcttctcgacgtcgacgcgaatccgagtaacgaacttaaaaactatgaggatcccaagcacattattcgacttaccaccttcgtggtcgtcgtccatgagctaggcatccagatggagggaaaactggtcaagaatgtgatcgatttggtggccaggcataagcaggtgcctctcaaccgaagcgttttctggtcgccttccggattcctctctctacatgccaaaaccctgatgaagtcttcagcccgatcgcaagatggacaaggcccaaaagttcatagcacagtattggagaagtttaggcttagcgatcagaggacctgtcgccaattgggcgtccaactatcgctgtggtccatccaaatgcaaagggtattcgatgtgggagtctttggacacctcaagacttttctgcagttgattctcaatggacactcctatgccgatcaagttaacctgctggcagtcgcgctgatcaatcggcacgtggctctgatgacgcccatgaccagaaacgattggatcgtcgtctctcggttgctgcagtacctgaaggtcattcagaagacctttgagtcaaaccaaatcaatttcgtgcgctttatcagctcactgatacaatggcagaagcaaaaggtcatacacctgctgcacacaacgaaaaagaagatagttgtcctcaagttgctgcagcgcaagatcaactttttggccacaataaagctggccgagaagtccattatgggatttccgagcaagcaacgtttgactttcgtaaatctagccctcggggagtttctagataatcgcctcctgcccgccgacaatcaaaagttgatcaaatcgatcctacatcgtgttaatagtatcagcgacattatgcggaatattggtggacaacttaacacgtcggagtcctcgagtctggtatataatcactggtttctggacacttcggtgcttaaggagtacaccgaactccaacgcaatccctactccttgcagaacctcgtgtcggtgagccatcatctggacaagatcatggccatgttcaggggttcaaggtgtcccaagcaatcagcgaatgacttgatcattgagtttttgagcaaccacctggagttctttctgcgcgtggaggccctttcgcatctcttccagagccaggatcaaccattccagcaaagtgccttagactatcgtctctgcatcaatgcagttgcagttgaaaacgatggtgattacaatattataaaagatcatcttgagaactatttcactgccacgttctacaacttaacgacaatcgctccgcacgactggaaatcgtatgaaaagatgcgtcatttggccaacaaggtgctgcagctgcaacccatcgatgaccacctgcccaatcagataattgaccagggcatagacgtgctgcagatcatgcggaatatacacactttcgcctcctcgtatgcctacaacatgaacctgcaggtgttcgtggagacgaacagcaggagcaagcacctcgacatcattggcacccggcacgtggccaactcggtgcagacgcacggcaccggtatcatcaacaccaccgtcaactttatataccagtttttgcgccaaaagttttacaccttctccaccttcctccacgacgagcagatcaagtcgcggctgctcaaggagctgcgttttcacacggagcacaagcacagcaagtcctatcagtcgtatccctatgagcgcgccgatagttttcttaagaagatcagaaggctaggctgctccagcaatggcgagacgtatatggatcttttcaggaaggttatcacacaagtcggcaacgctgttggctatgtgcgcctcctgcaggctggaagcaagaatgccaacttccggaatcgctcgtataaaaccagattcgacagcaacttcagttgcgggggctccaaagtgcacgaggctacggagggttccatcagggagtacgagaagagcctgggtcacatgaaggagtgctattccgatagcacaaattacttcaagcttcttctgcaaggctttcagccctttttgtgcaatccacataaccaccacctgcgaaccttctacctcatcacaccggcgctcatcatgaactacattgactaccgggtcaagcagaagctaaagatctacaaaaaggaccagaccaagatctcgctgttcgaggatggcttcgccatcggcctggtctacatcctcaacatgctgaaccagcagacggagttccatgagctgggctggagccagacgatcacgcagcacctgaacgcggagcgctccaaggtgcgcgacattttggcgggccagcagcggacggcgccggagcagctggacgagaagcttcaccagacagtggcgataaccgaacgacatgtgaacgcctacgagcatgaatacaatctattgtacgccaccttgagtagctccgaaatattcttccaataa

SEQ ID NO: 33270 - protein, 1061 aa, DROSOPHILA
MSPVVEVNFMGNDSMAPDRSFEESELVANKPLTTLANLCNQCRNLSRKAKRFQLAFLFSDFRLDDTLPPHTHTSEGSAGLEGSLVRMSSSMDFFCQVYFLLNRMIVILQNLWRQIAASVSVPMDINEVHIFAVFDAMSELLEHIVVFNELANQSKISTMWALYKKWLMNLSNSQSANLELNGLSTSLMDIENLITKDFFRILLDNLMELKKQFGLNSVSPITQHSNAYIRRQLLDVDANPSNELKNYEDPKHIIRLTTFVVVVHELGIQMEGKLVKNVIDLVARHKQVPLNRSVFWSPSGFLSLHAKTLMKSSARSQDGQGPKVHSTVLEKFRLSDQRTCRQLGVQLSLWSIQMQRVFDVGVFGHLKTFLQLILNGHSYADQVNLLAVALINRHVALMTPMTRNDWIVVSRLLQYLKVIQKTFESNQINFVRFISSLIQWQKQKVIHLLHTTKKKIVVLKLLQRKINFLATIKLAEKSIMGFPSKQRLTFVNLALGEFLDNRLLPADNQKLIKSILHRVNSISDIMRNIGGQLNTSESSSLVYNHWFLDTSVLKEYTELQRNPYSLQNLVSVSHHLDKIMAMFRGSRCPKQSANDLIIEFLSNHLEFFLRVEALSHLFQSQDQPFQQSALDYRLCINAVAVENDGDYNIIKDHLENYFTATFYNLTTIAPHDWKSYEKMRHLANKVLQLQPIDDHLPNQIIDQGIDVLQIMRNIHTFASSYAYNMNLQVFVETNSRSKHLDIIGTRHVANSVQTHGTGIINTTVNFIYQFLRQKFYTFSTFLHDEQIKSRLLKELRFHTEHKHSKSYQSYPYERADSFLKKIRRLGCSSNGETYMDLFRKVITQVGNAVGYVRLLQAGSKNANFRNRSYKTRFDSNFSCGGSKVHEATEGSIREYEKSLGHMKECYSDSTNYFKLLLQGFQPFLCNPHNHHLRTFYLITPALIMNYIDYRVKQKLKIYKKDQTKISLFEDGFAIGLVYILNMLNQQTEFHELGWSQTITQHLNAERSKVRDILAGQQRTAPEQLDEKLHQTVAITERHVNAYEHEYNLLYATLSSSEIFFQ

SEQ ID NO: 33271 - DNA, 3617 bp, DROSOPHILA
ttgttcattatttgttatatctatttggattactcacatttactctacgaatctcagcaagtgtaatggaaaagatacctgtacgtgagtgatgaaccattcctttgttcacttcgctttccacttaataaattcatggatccatttgctgtcaatttgttattgatatctccgttatgtctgcatttttgcgaccggggggaaactgaaggagaaatgaaacttaatcaaatgtgaaactctagcgagcacttgatatgcattttcgtattgaatttcccttccagcttctatcgcacaatcgcttttattcgaaaattgcacgaacaaaataatacctgtgctgtttgccggaagctgaagaaaaatgtatgtgaatgcttttcggttttttcaatttaaagcatttaagttgcaaatatatatgtatccacctctgcggcttcaatgcacaaattcaagttaaaaccgcatgtgcagtactttaattgtattattgttcaccatttatcgcaatccctgcagcgttggcttcctgttaattgctttgtagacaaattataaaaagctcgactttggcattgtttcggcggcattctggaacacttcaaaagcagacgaaaccacggcgtaaccatgaccatgactatgactctttgcccgcaaaaacaacctagaaacgtataactcttttttttcccccgaccagctgggtcagttttaatttaactttgacatgcatcagctaaaaaatccaattacaaacacaaatgtaaacagagatagtagagagagagagagagaggacatggaaaaaggaccttattttttttggtcgaaagactagaaaacccattaacgcgtttttgccctccataaagatgaagatttataaagccattaatttggcccaagcggcgaaaaaatgtatacaaaatttgtgagtgagtgtgtgagtgaaaagtgctgagcccatggaagctgcagtgaaaccctagaaatgtccagtcaggcaggaaaactgcgtccgggttcctcaaccaagcccgatcgcaatgcgaatgaggagaaccaactgggcgccaagcccaagagccaaagaacggacaatcatcatcagaatcaaccgaagatgttgccacatcccaactacatggaactggagttccttgccacggatcccacggcatcggcgcagagtacggcctatccggacttaccagttagctatgccacctgtttggtgggtccaccaccgtacagggatccgctgcctcccacaccaccgcccctctcccaaatgccatcgaggctgctccactcggcccccaatacgcccagtcgtggcaaggtggtgctcagcaagaaggagcgcaaggagctcagcaagcagctgggaatcgacgaatcctcgatcctgagcagcagtgcccagtcgagtccctacaaaggacgtgtgagtgagctgaagaactgcatagctcgtggcctgtttgccacccttcataggggctcacagaagtcgctgcagcagcaggaggaaaggcccatcagtcaggagatatccccgcctcctccagctccagaatcagccaataataatgaagatgtggcggattactccgaaaagctaaggaatctaccagtgagacagcgcaaggctgccacctcgcacatggagaactactgtctctttgatcccgtggactttatcaacgagaaagccatgagatatcccagtactcaagcccacggattgagggatccccttttcagctcaagacagcacttggtctgcgaggatgaagatgaactggtgccagaagtaatatacgataacgaggagctcgagttggaggagactattatcatagagacttcagctatgccagaagcggaatcagaagcagaaccgactgccaaaaattcagagaccatgtctagttttgatcaccacaactactttattatagacccagcgaactttcccatggacatcggcatacctaatccctataccaacgagcagctggtgaatgccaagttggagcaacagaacctggagaagctcttcaacgaactggagaacactgccagcatgtcgaacagccaggagtccaaagatacggagaccacatccacggccctcgtagaatcatccacctcaacgaactcagcaagttccgcgggcagctgttccctggccaatcccgcccagcaatcgatgaagaaaaagctgacatttctgaatctttcgccctttcgcagtggcaaaaagtctatcgacaaaaatacttctgagcagcaacgtgccatttccgagctggtcagcacggatcacatgttgcacctgcaacagttgttgcagcaacagcgaaaggatcagcgttcgcacacggttccaacggagtccaactatgtgctcttcaacccgggcccagtgcctagtcgacatgtccagtacaagatacgcaaaccacgacctctatcaacccacagcgatgcggatagtggtttcctatcgccctgctcccccgaagaaatgcgtgcgaatccggccattttggtgcttcagcagtgcgacagtgttcagggatatatggaggtaagtctgtgaatatttaatgatataaatatataaaatatcaccatgacatacaaaaagaagaagcttaatagaagcatctgttaggttaatggagaaaaaaaccgaaaacctaaaccacttcttattttaaacagaacttttgtgcttcagcttacaaagtaaaattcaatttttatccagacatttttcgaagactttcaagaagaaagaaaaccttttcccaaaaaatacaaatcatttatctttgttagctttgatggcttgtcctgacaaaagggaactttattattacctatgcaaatctgggttttaatgctaagatgcagcccgaaaagtgccacaataatgttcagctcggtggggctcaccagcaaatggcttattttggtgaagctcttatgaccctctcaatattgcagtgcatgtggctaggtttcatacatttcctacataatcctcttaccgtaatgtgaatcgccgcattaaccattggaaggaaccccacgcagcatcttatctatatggataatttcgcatatcttaagccggtaatcattgcgggctgtttccgtagtcgcacttgtcgccatttgccggctcacttatcttaacgagcgagcaacttaacaagtcttattatgcatcttcaaacaccccaggggaggtgttggcttacccctcgaaggaccattttcggaaaaacccacccgcaaaggcgatgaacaaatgtcacccccaacggccgagtcctcgagtataaattatcaaaaaaagagaagaacgagtcacggaattgcagtttggaggcagtgcactgcagatgattcccaaaatcgagggcttttgagagcagttcctgctggattgcatctggctttcccattttcccccgcccttcgctcttcgctcttgttttcctcgttgcctcgggggagcaatcaatcgtcgcgttttcactgctcgcttcattagttttccctaccgccaaacattagtttgattgtgtgcc

SEQ ID NO: 33272 - DNA, 1617 bp, DROSOPHILA
atgtccagtcaggcaggaaaactgcgtccgggttcctcaaccaagcccgatcgcaatgcgaatgaggagaaccaactgggcgccaagcccaagagccaaagaacggacaatcatcatcagaatcaaccgaagatgttgccacatcccaactacatggaactggagttccttgccacggatcccacggcatcggcgcagagtacggcctatccggacttaccagttagctatgccacctgtttggtgggtccaccaccgtacagggatccgctgcctcccacaccaccgcccctctcccaaatgccatcgaggctgctccactcggcccccaatacgcccagtcgtggcaaggtggtgctcagcaagaaggagcgcaaggagctcagcaagcagctgggaatcgacgaatcctcgatcctgagcagcagtgcccagtcgagtccctacaaaggacgtgtgagtgagctgaagaactgcatagctcgtggcctgtttgccacccttcataggggctcacagaagtcgctgcagcagcaggaggaaaggcccatcagtcaggagatatccccgcctcctccagctccagaatcagccaataataatgaagatgtggcggattactccgaaaagctaaggaatctaccagtgagacagcgcaaggctgccacctcgcacatggagaactactgtctctttgatcccgtggactttatcaacgagaaagccatgagatatcccagtactcaagcccacggattgagggatccccttttcagctcaagacagcacttggtctgcgaggatgaagatgaactggtgccagaagtaatatacgataacgaggagctcgagttggaggagactattatcatagagacttcagctatgccagaagcggaatcagaagcagaaccgactgccaaaaattcagagaccatgtctagttttgatcaccacaactactttattatagacccagcgaactttcccatggacatcggcatacctaatccctataccaacgagcagctggtgaatgccaagttggagcaacagaacctggagaagctcttcaacgaactggagaacactgccagcatgtcgaacagccaggagtccaaagatacggagaccacatccacggccctcgtagaatcatccacctcaacgaactcagcaagttccgcgggcagctgttccctggccaatcccgcccagcaatcgatgaagaaaaagctgacatttctgaatctttcgccctttcgcagtggcaaaaagtctatcgacaaaaatacttctgagcagcaacgtgccatttccgagctggtcagcacggatcacatgttgcacctgcaacagttgttgcagcaacagcgaaaggatcagcgttcgcacacggttccaacggagtccaactatgtgctcttcaacccgggcccagtgcctagtcgacatgtccagtacaagatacgcaaaccacgacctctatcaacccacagcgatgcggatagtggtttcctatcgccctgctcccccgaagaaatgcgtgcgaatccggccattttggtgcttcagcagtgcgacagtgttcagggatatatggaggtaagtctgtga

SEQ ID NO: 33273 - protein, 538 aa, DROSOPHILA
MSSQAGKLRPGSSTKPDRNANEENQLGAKPKSQRTDNHHQNQPKMLPHPNYMELEFLATDPTASAQSTAYPDLPVSYATCLVGPPPYRDPLPPTPPPLSQMPSRLLHSAPNTPSRGKVVLSKKERKELSKQLGIDESSILSSSAQSSPYKGRVSELKNCIARGLFATLHRGSQKSLQQQEERPISQEISPPPPAPESANNNEDVADYSEKLRNLPVRQRKAATSHMENYCLFDPVDFINEKAMRYPSTQAHGLRDPLFSSRQHLVCEDEDELVPEVIYDNEELELEETIIIETSAMPEAESEAEPTAKNSETMSSFDHHNYFIIDPANFPMDIGIPNPYTNEQLVNAKLEQQNLEKLFNELENTASMSNSQESKDTETTSTALVESSTSTNSASSAGSCSLANPAQQSMKKKLTFLNLSPFRSGKKSIDKNTSEQQRAISELVSTDHMLHLQQLLQQQRKDQRSHTVPTESNYVLFNPGPVPSRHVQYKIRKPRPLSTHSDADSGFLSPCSPEEMRANPAILVLQQCDSVQGYMEVSL

SEQ ID NO: 33274 - DNA, 3089 bp, DROSOPHILA
gtacaatttcttagggccattagtaagtttcaaaactaaagtttcaactctgaccaattagtgcaacatcataataattgcagtttgtttgaaagacaggaaaactttcgtcggcaactacagaagttaatgtggcattcgacagaacttatctatcagtagaaagccccatcgataacgagcaacagatacaaattgatagaacgcaagtaggagctatccgctttccagcagtggcaccattttcaccgaacaacgaaaggaaagctgaaattaatgtaaatttattgtctcaatttataatgcaacaaattgagcagcggcaagctagcagcaacactttggccaaatattaatgctgacaggcggaggaaatgaggatccgaagggaatgtatcttgtagatacgcataatggcgcggcattgaacttgaacttatctgcgattggagtttttcaattgtttgccaaagtcattgggcgaaaagttgctgccattttgtctctcacaaagttattacaaagtttgccatataagttttggcagccttttaaagtttgcaccgcccaacccaccaccccctgtcaactggatatggataactttggaccctgggatgctgcatcgacttctcgacttctcggcttctggaccagcaaattgagtgcacacagccggcagacgtttgtcatttgtctgccgtcatgtcagttgtcaagtttgatttttcgacatttgcctctcagttctatttaactacaatatatgtgtgctttttgtgtctcttaatttgttgcaaccactgtgacagagctgggaaaaaatatgaaatatcgtgctctatgatacagacatgataaagacaaatttgtgaagtgtttcggaagcacggcggcattgttctgtccaatcccattcccagcaaaggctgatttgtgtacccgttcaatgaataattttaaatatctgggaaactataatttttaaaacaataaggatatggaaacggtaaagtgccgttttagttatgtttatggattaaaatcaaaagaactttatataagagcattcactccatatattcttgcgtttacctgtctataacttataagttgtaaacgtttaacgaatataggtattgaaatctcttatcaaaagaccacgacattgaaatatttaagaactttagaaccagtgctttttatgtttcaagattcaacctcaacgtttcctaatcccaagccatagtatctcaaagtcgtgcgacctgtcatttgtgtttttttccggtgttgacaaatggaaaagggtgctgttagggggggcagttgatgcctgaacactttatcttaatgtcagtttttgtttcgttcggtttgattcgagaggttttcccggccagctcgagttcgtgtgcgtgaagcagttaaagacgcctgggcaaattagtcataaaaaacgcatttgtacatcggtgtgttttttttttggaggggggggagggggcgcctcatttgggagtcatgtcaaaatcacgacttgcaggcgcccggcgataaaaacagcgcgaggatttacatttatattaggcggcccaaagagatccgcccgtgaatcatagcgtggttaaatagctttaagtgttggccattcccgagctctgatttcatttgcattccgctgttcaattcctgttctctgtttcagtttgacaacgtcaactcgtgtctgcatgtgctgcgaagccagtcggtcggcggcttggagaacatcaccaccaatgacatctgcgccggccgcctgaaagccgtgctcgccctcttcttcgccttgagtcgcttcaagcagcaggccaagcagaccaaatccatcggcgttggctgcggcggcggagtgggcggttcctcgtcgactctcaccggcagcggctcggtcctgggaatcggaatcggcggactgaggactccgggatccagtctgaaccaggataagaatcagcaggagcagcagcagcagcagcagcaacaacaaacgccacagcagttggcccaatcgctggaaaacggcaatgagatggtgaatcggtaagtttatttaaacaactgaaattcgtcaataaatatttaagaattgttttgtaattgcttgaaagtatgcaaccattctttctgaatggaaacaatctttgattattataatactttagataaatttactttttcgctggtaatataataaatttgaaagaaaccgaagcaaacacgttgttcctgacttcgttgcatacttttagacgccccgaattctacttatattatatattttacatgttaacttatactacatgtcaaaaatgtttgctgaagtgacttccgagtacagagtgaagccattacatacagagccatctagcggcgagctgctgcttctgtcttgtgtagcaacgagccttatatcgacagcactttgtgttacgcttgcactaattgttagcagatactcaaaccattggggtcgctttaaaaattatgaaaaatctcaaatctaaatacccattcaaatttttatttctagcagagtttaaatcgattcttaattaaaataaattcaattctttttgatagaaaaaactgttacttaaacttgctcacaattgcgttaagagttaggtttttccattaacatttatttatatgaaactagtcagtttccataacttaacctccactaagtggtaaatcatttttctacttaaccgaaactccccatcgattgagcgaacctcccccattgccacccaaaacactgcatatccaatgtcagggatttcctttgaatttagcttagactgccataagacatccggcgggcatttctttctgcgctttcccagaattccttgcgagtttaatatgatttattggtttgtttgccggaaattacaggcagttggtccccggattgggctaccatttcttttttttttttggggttccgcctcacacctcagccaacagatgtcatcgggaaaatggcaggaaaactccacaaaggcaaacacaattggcgtgcttcaagtttaaagaga

SEQ ID NO: 33275 - DNA, 390 bp, DROSOPHILA
atggaaacgtttgacaacgtcaactcgtgtctgcatgtgctgcgaagccagtcggtcggcggcttggagaacatcaccaccaatgacatctgcgccggccgcctgaaagccgtgctcgccctcttcttcgccttgagtcgcttcaagcagcaggccaagcagaccaaatccatcggcgttggctgcggcggcggagtgggcggttcctcgtcgactctcaccggcagcggctcggtcctgggaatcggaatcggcggactgaggactccgggatccagtctgaaccaggataagaatcagcaggagcagcagcagcagcagcagcaacaacaaacgccacagcagttggcccaatcgctggaaaacggcaatgagatggtgaatcggtaa

SEQ ID NO: 33276 - protein, 129 aa, DROSOPHILA
METFDNVNSCLHVLRSQSVGGLENITTNDICAGRLKAVLALFFALSRFKQQAKQTKSIGVGCGGGVGGSSSTLTGSGSVLGIGIGGLRTPGSSLNQDKNQQEQQQQQQQQQTPQQLAQSLENGNEMVNR

SEQ ID NO: 33277 - DNA, 3697 bp, DROSOPHILA
atgcattttttctcgattgcagacaaattgcccccgcctacgcaaaggtcaatggcggaactgccattccactgcccgccaccgtgatggttcaacgtcgctgtccgccggataaagtgcgtccactgccacccacaccgaatcacacgccatgtgagtactcaactatggtttgggaaaatttattaaaaaatgccataagcccgcgcaaccatccctgatgcgttttttttaagggaggcgagggacctccccattgtttaccgggaataaacaaatttcggtctcagggctcgacaaacaacccccaaagctggaaagcgtcgactgcacttagcccttttcaaatgcgttttatgggtgggcttgtgaccgagattttggtattggatgggatagcccaactccaccacaatcagagctccctagagattcgtttggggttagaatttcgaatgccaaaaaggtgacgttgatttgtggacaaggtaactgaattcttcgtttaattaggagactggagagtaattaaaaatgcaaagcatacgaacatggttcttggtttcacggtgaatagcacaaaaaactcatgaatgagctttaaaacgtcgaagtattcatactgaaaggtgagaattaatcttatgaaccacaatttcccgtttgtcatgcagttttgacccaatttgtaagatagtggcgttcaaaacgcttcattcttcttgagtcacggccgtgggcatatttatagaacagtttcactctccatcatgatttacacaccaaatattcgactggtctctgggcaatcataaatctcgcagctcagactcctcctccttccaatctgttatcaacctcacgcaaggcaattaattaagtttaacgtccacgttgcccttttgcattgatttataggttgactctttctgttaagtgggcgccgaaaatcgtgaaatcgagtgggcttgcagttccttaaagcattctgtaatccttgatgtcgctcttgttttcagcaataccgggacttggaaagagcggaagtgatttcaataccagccgtccaaacagtccgcccaccagcaaccacacgattcagagcctcaagagcggtaacaacaacaggtaagattcttttgaggtcatcacgtatatatcatttctatatgattattaaaaaatgtatctaattccagcctccgacccccgagcattaagagcggcattccctcgccgagcagtccgcagaccgctccccagaagcactcgatgctggacaagctgaagctcttcaacaaggagaagcaacagaatgcggtaaacgccgcctcggtggccagcaaaacgcagattcagtccaaaaggacatcctcctcatcgggcttcagttccgcacgctcggagcgctctgattccagcctgagtttgaatgacggtcatggctcccagctgaaaccacccagtattagcgtgagttcccagaagccccagcccaagacgaagcaatccaagctgctggctgcccagcaaaagaaggaacaggccaacaaggcgaccaagctggacaagaaggagaagagtccggcgaggtccttgaacaaggaggaatcgggcaatgagtcccgcagctccacaatgggcaggactggcaagtcttcgttggtccgtgcagttggtggtgtggagaagaatacacccaagacgtcctcgaagtcctcgctgcactcgaagtcggactcgaagagctccttgaaggcgccccaactcctccagagtcccagtagcgggggattgcccaagcccattgccgccatcaagggcaccagcaagttgccctccttgggtggtggtgctggccaccttccggctgcagaatcccagcagaatcagcagctgctcaaacgcgaaaccagcgacatatcctcgaacatatcccagccaccgccggctgagccacccatcagcacacatgcacatatccatcagaatcagacgccaccacctccctactatgcgaatagtcagccaacgagccacatatcatcgcatgggttcctgagtgagcccagtactccgcagcacagctcgggtatttacggcagcagtcgccttccgccaccaaagtccgccctgagtgcccctagaaagttggagtacaacgccggacctcatatactgtcctcgccaacgcaccaccaacggcaaggactgccgagaccgctggtcaactcggctcccaacacacccaccgcctcgccaaacaagttccacacgataccctctaagattgtgggcacgatctacgagtccaaggaggagcagttgctcccagcaccaccaccagccagtgggggctcctccatcctgcccatgagacctctgcttcggggctacaactcacacgtgaccctgccgacgaggggggctcgcggtggccaccacccacatcaatcctacctggacttttgtgagtcggacattggccagggctactgcagcgatggcgatgctctgcgagtgggcagctccccggggggatcgcgattccacgacattgacaacggttacctttcggagggtagcagcggtctaaatgggcccagctcgtccgcaggaggcatctcacctggaaagcactttctcagcatgatgcgggcacgaacccaattgcccaccaccatcgaagagcggtaagttccatactgatattttattcatttagcttcaactgaaggatagcacacctaagtaatcttcaatattgatgtattgctgtgtactgttcaattgcaactgatggattctactatcaatccctctgcttatatacatactgggatttattgcatactgcaccttatcactcacttatcactctcggatgcaattgggtctttctctgaaatcgttttcaagttatatatagtataaatattattaataatgaccatcaggattctcggaatacaatgcgccctagaaccttaatttaactataaatttcaaagtaatagtataattcggcaatttgttgtctttgctctctttctccgtatgattaattcgactagtaatcctgcttaagaatactctttatacgatcagagactcgccttgatgcgatgttgtaaacattagtatttcacataaacataatttgcctgtgggatatcttgattctctccattcaccttctgctaatttgaataccaaccatcttcatacttggaatgtaactttctttgttttcccattccttcccttcaaccttattgaaatgagccttgattggatatgtggttcctaaggtgagcacttactttctcgccagttgccatgagtcacctgaaattcgctttttaaggcactgttgcctccgctgacaccaatgagtcaaccaaaaactgccgttcttcgagtatcgcctgctttggatggatgactgtttccaagaagatggaccccgcatttgtatcttgtaaatgtggcgtgttcttttgtcgcctggtggtgggcagtaagcggaatttaaatggaagaattgccggttcgggtggtatattgagttcagacttcgctgcactttcgatgggctttggtgtcatttcactcagctggctccattttattcgagcgccacgcacaattggccgcactttttgtgccacatactcaacatacatacatatgtata

SEQ ID NO: 33278 - DNA, 1626 bp, DROSOPHILA
atgtcgctcttgttttcagcaataccgggacttggaaagagcggaagtgatttcaataccagccgtccaaacagtccgcccaccagcaaccacacgattcagagcctcaagagcggtaacaacaacagcctccgacccccgagcattaagagcggcattccctcgccgagcagtccgcagaccgctccccagaagcactcgatgctggacaagctgaagctcttcaacaaggagaagcaacagaatgcggtaaacgccgcctcggtggccagcaaaacgcagattcagtccaaaaggacatcctcctcatcgggcttcagttccgcacgctcggagcgctctgattccagcctgagtttgaatgacggtcatggctcccagctgaaaccacccagtattagcgtgagttcccagaagccccagcccaagacgaagcaatccaagctgctggctgcccagcaaaagaaggaacaggccaacaaggcgaccaagctggacaagaaggagaagagtccggcgaggtccttgaacaaggaggaatcgggcaatgagtcccgcagctccacaatgggcaggactggcaagtcttcgttggtccgtgcagttggtggtgtggagaagaatacacccaagacgtcctcgaagtcctcgctgcactcgaagtcggactcgaagagctccttgaaggcgccccaactcctccagagtcccagtagcgggggattgcccaagcccattgccgccatcaagggcaccagcaagttgccctccttgggtggtggtgctggccaccttccggctgcagaatcccagcagaatcagcagctgctcaaacgcgaaaccagcgacatatcctcgaacatatcccagccaccgccggctgagccacccatcagcacacatgcacatatccatcagaatcagacgccaccacctccctactatgcgaatagtcagccaacgagccacatatcatcgcatgggttcctgagtgagcccagtactccgcagcacagctcgggtatttacggcagcagtcgccttccgccaccaaagtccgccctgagtgcccctagaaagttggagtacaacgccggacctcatatactgtcctcgccaacgcaccaccaacggcaaggactgccgagaccgctggtcaactcggctcccaacacacccaccgcctcgccaaacaagttccacacgataccctctaagattgtgggcacgatctacgagtccaaggaggagcagttgctcccagcaccaccaccagccagtgggggctcctccatcctgcccatgagacctctgcttcggggctacaactcacacgtgaccctgccgacgaggggggctcgcggtggccaccacccacatcaatcctacctggacttttgtgagtcggacattggccagggctactgcagcgatggcgatgctctgcgagtgggcagctccccggggggatcgcgattccacgacattgacaacggttacctttcggagggtagcagcggtctaaatgggcccagctcgtccgcaggaggcatctcacctggaaagcactttctcagcatgatgcgggcacgaacccaattgcccaccaccatcgaagagcggtaa

SEQ ID NO: 33279 - protein, 541 aa, DROSOPHILA
MSLLFSAIPGLGKSGSDFNTSRPNSPPTSNHTIQSLKSGNNNSLRPPSIKSGIPSPSSPQTAPQKHSMLDKLKLFNKEKQQNAVNAASVASKTQIQSKRTSSSSGFSSARSERSDSSLSLNDGHGSQLKPPSISVSSQKPQPKTKQSKLLAAQQKKEQANKATKLDKKEKSPARSLNKEESGNESRSSTMGRTGKSSLVRAVGGVEKNTPKTSSKSSLHSKSDSKSSLKAPQLLQSPSSGGLPKPIAAIKGTSKLPSLGGGAGHLPAAESQQNQQLLKRETSDISSNISQPPPAEPPISTHAHIHQNQTPPPPYYANSQPTSHISSHGFLSEPSTPQHSSGIYGSSRLPPPKSALSAPRKLEYNAGPHILSSPTHHQRQGLPRPLVNSAPNTPTASPNKFHTIPSKIVGTIYESKEEQLLPAPPPASGGSSILPMRPLLRGYNSHVTLPTRGARGGHHPHQSYLDFCESDIGQGYCSDGDALRVGSSPGGSRFHDIDNGYLSEGSSGLNGPSSSAGGISPGKHFLSMMRARTQLPTTIEER

SEQ ID NO: 33280 - DNA, 8095 bp, DROSOPHILA
tgttgtgctcctgctccactcggatgccatgcaaattacattttgtgcacgaaattaggaaactccagcggactaaaatggccaaaatggtgggagccatggaaccgaactgggtagttcggtgcagacatgcatggaatttcatttttgcactctcgcctggggaggcatttattttttggcaacacgtactacgtactacatacatacatgtatatgccccatgtgctcccaaaaactaaagtccgcgcactgacatcgatacaaagagtaaagtgcggcaggacgaagctctgaagtgcggcaggattccatttaggcgacgaggtccttgccacccccaagcacaatgaaggatgaggcttttattttgaacattaaaggctggcagggaagaattagtgtgattagcaaaagctgactttagtatcgaacaaaataaagcaaagcgaagcaatgtagatttaataaaaatgcaatatttaattcttagtaatttccattcgcatgtcagtccttggaatttatgcatgtcctctgcaaatgacgtatattgctcacttactggtaataaaaaccttcttaaaagtactctgcatctgaaaatttgttagctatttttgaacttttttgcattaaaagcaaaagctgtcaaataagtatcaaaataagttactagcaacacaatacccaaacaaggtgcagctttaaaaacatatataaatgttattatgaatattttgaatcacacaagacgaattaatacgtcaaacagttgtgtaagtaagtgtatggaaagttcggctttaagctgacctcctcttctttccgtttcgaataatggctataaatccactttccgctgctcctttggaatttcctgcttatgacgcctgttccggaattggtgagcaccagttttctttttctttttcgaccgcccgcaaaaaatttatgcgcaattttttgcagaagctgtgcggtgaaaaaagcaagaaaaatgcctccattgcaaaggatcctgtggctgcgcgtcatttgtttcccgtttgccaccgcagcaccgtgcgttcaattgaaacagaaatttaagctgaacagaacttgcagtgcacattgaattcgcatacttaatcccactaaataaataaattcaaagaaacacacatacacagtgtccaaaagaacgataaataaacattgcttgtatgcaatatcacgacatgttaatacaatatataaaataaacaaagcctttgactggagatgagttcagagcaatcaatcaattgttgtatgcgtttaagttaactttaattgaatttaagggcaacgctcatattcgcccacccattttgactgatattcctttcatcgatttcacccacttgccgttcagaaggcaagtcgggggtcatttgaccacctacactgcgatacggcggcaatcgctattgatttttgctgccagctacgtacctacgtccccccatttccagcccctcccctttcatgcatattgagtgcgcgacaatttatgagctttatgtgtcacttctgatgccactttcactggcattttccgcccacacccacccccaaccaacatgggacagtcacgcattcttcgagggtatgacgaacagaacccaaccctcggatccaaatggacgtctcagtttcagagggagaatgttgtttttttttccctccagttgggtctgagctgaactgtaattgcttgctggggtgttgtttggttttacgacccagacagctgttttccatcgtccttcggctgcgttcaactttatggagccccaaatcatagcgtactattcgggatttcagcactttagtcgcccgggaaaccgctgtgaaacgcaacaccaattagttaatttattggccagctttctcctttgttgtcccatcaaatccatctaaattggtagttggtttaaattgttataatttggtttgatgccagcagaagccacatggaatatttgctattccggctgtgcgatattttatctttgccatatttatttagccattccgtattgcattgtggcaggattttaggattattctaaaatacgaaattaattaaatcaatttatctttatcgttttaaacaaaaggcgagaactgagtaaagggtttaaatatttcgttatacttttcgtaattattttaagaaactttatgaaattttcgtatgtatggaaatatatttcaagtatgttcccaaaattcgaaattaaattaattaagttctagaaatttcagtacccccgagcgaaattcgtgctctcgacagcagaatggaataaatgcttttcacataaataaacaacattatttattggatcacggacacgcccaattagttttgatatatggcagccaagcagagatgataccgcccccatggcaaaccagcttggatgagacatgcaattttccggctgactcttggccgggagcgactcccgcttccagccggaatatcctttgtcattttaattgaaaaatgtagccattccttgagaagttcctttccctgcccgcctctttcagaacacctctttcgctagccacttgccaattgtatttgcggattgtctgtcagcccctctggttagggtcttttgttcgcctttgtctctgtcggatggcttgactttccgtcgtttgaaaggcgtttgtttgcccgctgatttggccattgtttgacaatttaactcttgaatagaactttgatgtgtacattatagaaatgtattttatagtacttaactaggtatatacaatcaattttgagccttgaattgcataaattatagatgaaattgtcagcggaatggtaatttgtcatgggttcaatgtggcgtatacttaatgtgcgaatccttaaccatcctatattgtcagcttttttattttgaaaagcaaatgggtaatttttaaagggcgaagagaactcattagcgtttcacatataatattatcgattgccgtttattttcattaattaaacaatccgctttctgttgatccttccagtattcgcaacagtcgcggctccttggacagcattggaaccgccgcaaacggcagctcagcggccagccaggccagctccagcggcggctccaccactacccacgcccaaaacaacaacaataacaacaacaataactcgggaggcggcgctaaaatggatggcagtccccaccatcggccaggatctcgaaatgggcgcgataactggagcaaaatgccggaaccgctcaacggccagaaggtggaaaagtcggacaagtcgtcgccatcccgtcgcagcatgggcggcggtgggagtggcagttcctccaagcagggatcgccctcctcatcctcgcgaaccaagggcgttccgcccagttttggatacgtaaagcgggccaacggcagcatcgcctccaccgccgaacagcagaacatcgccatgatgatggccgccggtggagcgggagccaatggtctgccctgcggtcgtaccgctcatgtatcggcggttccgcggacagccagcggtcgcaaagttgccggcggcacacagaccctgcccaatgacatgaacagtgagtatcagtaaataaacaagggacttacaatttacttaaaatttattgtacgcttttatagagctgcccccgaatactcagcatcgaagcttttccttgaccggacccacagccactcaactgagtcagtcgattagggagcgactggccaccggatcacacagcctaccaaagccgggcagcgatttgcacgtatttcagcacaggtatgggaaatgtattcaaataaaaggaatataattacttaaaaattaaccaatgcagaatatccaatcgtggaggaactcgtcacgacggatccctgtccgatacgcaaacttacgccgaggtcaagccagaatatagctcatacgccatgtggctaaagcacagcaatacggctggcagtcggctgtccgacggcgagtccgtggagcagctgcagattggatccccggcgttgacccgacatggtcacaagatgatacacaatcggtccggaggaccaggtcagatggcgggtcaaatgtcgggcaatgagtcgccctacgtgcaaagtccgcgcatgaaccgcagcaatagcataaggttggttttgattcattggcagggtattaaattctcccttcctgcatgaatgtatctgtatctctacttttctctttttcctctgtaaatctggttacccttgaacagctacttgaaagagaggacatatccaaggtgaccatagagtttcagcacacacaaaacatttttgcatctcatctgaaaaatgttcatcgcataatcattacgataaacaatcagaaacagtttaaattctttaagccactcacttgcattttacatgttgcatgcatagtatctttgttaatgcaactccattggattttttatctactgtgctactaagtttataattattttttatgcttacattcaatgtgttattgtggactgactttatcacaacacacactaatgtcaagaatgttcttaaattaaatatcgactaccgcacaagcaaactttttttgcctgtcagctgtattttactttttcctctcccttaaatatgcaaacaacttttggtattcctgttttataccatcagaaaggcaagcgaacttaccttcgacttgcagcctccatgtcgccaggacatatgcttgtttttccatgtgtcgctctgcatatttaaaggattcacttaaagtccgaaatactgtgaagggcgacacgcccagttatttaaagagcaaagttttccgatattctggcgtttgggcaggttgtcgtcaacagacaatgtgaaagctcgttggcaaaacgagttgggaaaaccattcaaaaaaaaaaaaaaacataaaaaccccaaagggcaaatggaaagcgaaaaaacaaagaggagtctgctagctcggaggtgttgttgatggccagattattatttgacatgtcaataggttttgtgaaccccgacttggcaagggtgcagatgaacttcatcgctttttcctggctgcctcgtcagcgagtttagaactgcggtcggttctcggtggacaagtgctgaaataaaatgagttccactgcgacaaaaaattaaaaacattcgaaacacaaatcagctcttaatgtcgatcatttcaacgttgagttaatatagtagatatttaaactagtatgaatatgtgatcaagaaataatgccacaaacaaaattcatcaaattcactcaagtatttcaaatatttagacatttcccggattcttgctagcccacttttatatcccaaatctactttcccagtttatatgtgccttcgctttcaaggctttgacatcaattatgcaataggaagtgtgaaaaggattgtgtcaggggatgtggaaaccctcgaaaccagttcggtggcttgttatcaaattttacactgctattcacacacccaaagtttgtggcaaatagccccagagaaaaccgacagctctcaccaccaaaagcaaacaactgagcccacccgcaccgaggaggggcgcacacttgacgtatacgtaatattagatttgcacgcgaaatgccattaatgtcacagttatcagggccaggcgagtggacatgactggatggaccagcccccatccttttccggaatccttttctatttgtggagctgtcattgtgtgagcttttagaaatctctgcattttatgacaatttgtctagggactaacgcaacgcaacgatggctccacccaatagccttatcattcaaatgcacagtggccgcaaccaatttgtaacagaattaaacggaaatgggggcctttacaggggaaccgaagtgttcgtttctcataatgaaattgggctcataaagttgacaaacgtggcggaaatttgcatctgtctgaccacatttacccatcacaatagtgatctaaatcgagatgtacgcacagagatatgcatgaaaatagaagtggtattatttggtaaattctctgaaaatcctattaaatattaaacaatgtgagcttttgtgttgggtgtttcatttgctgtgtctttccatgagcttacgattgcttaggatgctttatacatattatttcagtatgcttttgattctttcacgcattcattccacgtcacattagcgccacacgatacttatgagactccatttcagatcgacgaaatccgagaagatgtatccctcgatgatgagtcgtgctggggaggtggaaatcgagccctactactgcctgcccgtgggcaccaacggtgtgctaacggcccaaatggcagctgccatggctgctcaatcgcaggcggcccaggggaatcccggcgtgggcgttaacgtgggaggcgtggcctggagccagccaacctcacctacccccctcacccgcggcccattcaacacagcggcaggtgcatcggtgctatcgcccacccatggaaccacatcggccgcaggactcgtgggtcctggcgggggagcaggtggtggtgcaatggtcgggcatcggctgacatatcccaagaagaatgacgaaggtgagattacactcaaaaagattccagcgatgaagtgaatatctcgatatatgctaaagtcatagaaacaaaaccattgaatatataattatattcatgataaaaaaaaagcttaaaaggaacttttactcaatatttaatgggctttttcaagtgcaggcttaagagcagattaatgcaactctgccattctgtttccgtttcagttcacggcagtgccgcctccttgctgtccggaggcagttccctatacggaaacgcggaggagcggcaggcgcacgaaatccggagactgaagcgcgagctgcaggatgcccgggatcaggtgctcagcctgagcagccagctgtcaaccaatgtgagtacctcgccatccaaatatctccgtttaagttcagatgaattgtgagtgcagtcgaatccttctgctcggctgaacttgctgccagaacttactgacagcctaagatacttttggtgtcattcgttatcacctgaaacgttttcatgagccaaaggcatttctcctttcctctacaagttgcgagcactgaaataagttattaggaataataatttttttaaattatatcaaatttacctactggaagcaaatagatcagagtagcggctttgtatttatttcccaacacattttcaaagcaatttattttgattaaaattcgacctttcatcactcttattggcaaggtcgtatatatcttaccttatttccttaacgatcagaaaagcatgctggggaatacgccgaatcgaaatggccacttggcactgcaacaaaagtcaactgaataaattacgaaaatagggtgaattcttggcctcctaatctggcccaccgcatcttttatggttcagcctcgtcgtctgcattgtgcccggccattaatttaagtggttatgccgtgtactttgggccacaatttatttggtttcgcagctgttgcagcattttgcgcattttcatggcctacgctgaggcgcgctggcgaaaaaatgtggcaactggctgctccaccgccttccctccactttcccctccaaaatggcgtgccaaaagctgtgccctctgaaagattcattcgcctcccttatcaaacagtcagcttgcattcaacttttccgccaagtcgccttccgtcatatcccatttaagatgcccgatacacggaaaaaaactaatgaacgcttatatgaataaaatatattcacatataaattcattccaataatgaaatatttattaaaaatttctcaatttaatgttctattagagagctagagctgcaaacatagctgcttttcgttaacgattccattcgagtttcttccagtgtaaggactaaaagactgagactgtgactgtctatgaaatggtgtgtgtgcgt

SEQ ID NO: 33281 - DNA, 1650 bp, DROSOPHILA
atgcctccattgcaaaggatcctgtggctgcgcgtcatttgtttcccgtttgccaccgcagcacctattcgcaacagtcgcggctccttggacagcattggaaccgccgcaaacggcagctcagcggccagccaggccagctccagcggcggctccaccactacccacgcccaaaacaacaacaataacaacaacaataactcgggaggcggcgctaaaatggatggcagtccccaccatcggccaggatctcgaaatgggcgcgataactggagcaaaatgccggaaccgctcaacggccagaaggtggaaaagtcggacaagtcgtcgccatcccgtcgcagcatgggcggcggtgggagtggcagttcctccaagcagggatcgccctcctcatcctcgcgaaccaagggcgttccgcccagttttggatacgtaaagcgggccaacggcagcatcgcctccaccgccgaacagcagaacatcgccatgatgatggccgccggtggagcgggagccaatggtctgccctgcggtcgtaccgctcatgtatcggcggttccgcggacagccagcggtcgcaaagttgccggcggcacacagaccctgcccaatgacatgaacaagctgcccccgaatactcagcatcgaagcttttccttgaccggacccacagccactcaactgagtcagtcgattagggagcgactggccaccggatcacacagcctaccaaagccgggcagcgatttgcacgtatttcagcacagaatatccaatcgtggaggaactcgtcacgacggatccctgtccgatacgcaaacttacgccgaggtcaagccagaatatagctcatacgccatgtggctaaagcacagcaatacggctggcagtcggctgtccgacggcgagtccgtggagcagctgcagattggatccccggcgttgacccgacatggtcacaagatgatacacaatcggtccggaggaccaggtcagatggcgggtcaaatgtcgggcaatgagtcgccctacgtgcaaagtccgcgcatgaaccgcagcaatagcataagatcgacgaaatccgagaagatgtatccctcgatgatgagtcgtgctggggaggtggaaatcgagccctactactgcctgcccgtgggcaccaacggtgtgctaacggcccaaatggcagctgccatggctgctcaatcgcaggcggcccaggggaatcccggcgtgggcgttaacgtgggaggcgtggcctggagccagccaacctcacctacccccctcacccgcggcccattcaacacagcggcaggtgcatcggtgctatcgcccacccatggaaccacatcggccgcaggactcgtgggtcctggcgggggagcaggtggtggtgcaatggtcgggcatcggctgacatatcccaagaagaatgacgaagttcacggcagtgccgcctccttgctgtccggaggcagttccctatacggaaacgcggaggagcggcaggcgcacgaaatccggagactgaagcgcgagctgcaggatgcccgggatcaggtgctcagcctgagcagccagctgtcaaccaatgtgagtacctcgccatccaaatatctccgtttaagttcagatgaattgtga

SEQ ID NO: 33282 - protein, 549 aa, DROSOPHILA
MPPLQRILWLRVICFPFATAAPIRNSRGSLDSIGTAANGSSAASQASSSGGSTTTHAQNNNNNNNNNSGGGAKMDGSPHHRPGSRNGRDNWSKMPEPLNGQKVEKSDKSSPSRRSMGGGGSGSSSKQGSPSSSSRTKGVPPSFGYVKRANGSIASTAEQQNIAMMMAAGGAGANGLPCGRTAHVSAVPRTASGRKVAGGTQTLPNDMNKLPPNTQHRSFSLTGPTATQLSQSIRERLATGSHSLPKPGSDLHVFQHRISNRGGTRHDGSLSDTQTYAEVKPEYSSYAMWLKHSNTAGSRLSDGESVEQLQIGSPALTRHGHKMIHNRSGGPGQMAGQMSGNESPYVQSPRMNRSNSIRSTKSEKMYPSMMSRAGEVEIEPYYCLPVGTNGVLTAQMAAAMAAQSQAAQGNPGVGVNVGGVAWSQPTSPTPLTRGPFNTAAGASVLSPTHGTTSAAGLVGPGGGAGGGAMVGHRLTYPKKNDEVHGSAASLLSGGSSLYGNAEERQAHEIRRLKRELQDARDQVLSLSSQLSTNVSTSPSKYLRLSSDEL

SEQ ID NO: 33283 - DNA, 2459 bp, DROSOPHILA
aaacattagtgaagaatgctctctttacaaccttctttattgggaaaagtcttacacgcttgacgtttaaaacaatctcgcccttttacatgcaaattcgaatggtaggattgtagtttcctgctgacattgcgaaagtgtcctttgccttgcctcttcgcatcgattctattccttttgggcggaggcaagctagctagctagctggttttgtctgtcgaaaattgtttagccttcgtcttcttcgtcgcgttgtcaagtgatttggaaaattgaattgatcaatcgctttgtcaattctgttacctattactgattggcgagtttatagtgtttggctgaattggttgttcctaattatacctgttactcgtagagtatactagattcgttgaaaagtatgtaacagacagaaggaggcgtttccgaccatataaatataaatatatattcttgatcaggatcaagagccgagtcgatctgcttgtaagattgtacctataaccatattgtaactctaaaggctaaaaggttgagattcagagtacagattctagagattcatgttgccacgccgcacaaccgcacaaaactatcacgcccacacttttgaaaaatgttttgatattttttttagtcttgtaaatttctatcgataatttaatacattaggaagtaggatctcgatccataagaaatgaacattgattttgccatgaattaacatttatttccaagtcttcaaagtccatgaaaatatgagtatttactactaaaaatacactcaatgttggattaaatctaaaattattccaaacatctcttatcagtgaataatgcgaattatctcttatatgaattatgcagataatattttaaataaaaataatctctctttcgttgccaaccatgacaacaaattgtgataacaatataatgtcatattaatccacttctaattttcattccatgttgtgtaaatcgttttattgacttaagcttagtacctatccttgaagctcatgactttcataaagagagcttcgtgctgctgtatatcagtggaagcgatgtatttgtcgatcgcctcgaggagctcactttcccgagctattgtggtcggagacaacatggctttcatttgggtggcaccttcgacaaacttattgtggagtttctcattctcattggcgaattcagtgctaacgcccagtaaacccagcaggctcattccaatcacctgggattcaggtgccgattgactcagctcgctgttgagtccctcgaatacctgttgcagttcgtagatatagttatatttctcgccagttgtgcctcgctgtttgagactcttgcccttgttggcataggcctggagggcagccgttcccggtccacgttgttcaagcggaactgtgtccacaacttgttgcacgaatttgatggtgagtgacatcatattatggatttgaatgccacggagggtgtcagcatagtcaaagaaatgagctaacatctcgttttgcgatttcgcaggagcagcacacgaaaggctctatggaatatccgttgggttaagacaatgagatccgactttttcaatttttttacttactacagcagctatggcaaatactataagcatacaacgcatcttcagcaagtgatttaattcgactcaaataattttgagcagagataggctttttatacacatgtcgttatcagtgagtcgttgatttcttttatgaattactgtgtttttaagctggctcacgagataaagtaaatgcgattaggaactagaaaggaatattgaatatattgtattgaacttttgctataaagtctggagagatattcccacggaatagtgcagaaaagggtctggctactcattgtattaagatacaaatgatttaattattaatgacaattactttcgaatacattcaatataaacgcagatgtgtattcacggtcaacgtgaagaaaggtggctgatggagtgtataagaaggtggttatgtttattgttagcttgaataccaaacgagaccatcattgcaaggaatatggatatggacgtgacaaagtatttgacttatgatagttggctcgtaaaatcttacttggaaacccactagccgattgaccagagattgctccctctgattactatttttcctcacgatggctcatgggctggcagacttcttcgtttatgatgtagtcaaaaatggatcggttcatggatagcagaatccgggattcgacaggaagataacaaaaagtagtggctagcgaaaaagaaaatacttttaatgatttaaatgtataaaaaactattgggtccagtccatagactatcagattccattttaaccaattcaggcaactataaaattaaaaatcaatcagtaataggtaacagaattgacaaagcgattgatcaattc

SEQ ID NO: 33284 - DNA, 459 bp, DROSOPHILA
atgatgtcactcaccatcaaattcgtgcaacaagttgtggacacagttccgcttgaacaacgtggaccgggaacggctgccctccaggcctatgccaacaagggcaagagtctcaaacagcgaggcacaactggcgagaaatataactatatctacgaactgcaacaggtattcgagggactcaacagcgagctgagtcaatcggcacctgaatcccaggtgattggaatgagcctgctgggtttactgggcgttagcactgaattcgccaatgagaatgagaaactccacaataagtttgtcgaaggtgccacccaaatgaaagccatgttgtctccgaccacaatagctcgggaaagtgagctcctcgaggcgatcgacaaatacatcgcttccactgatatacagcagcacgaagctctctttatgaaagtcatgagcttcaaggataggtactaa

SEQ ID NO: 33285 - protein, 152 aa, DROSOPHILA
MMSLTIKFVQQVVDTVPLEQRGPGTAALQAYANKGKSLKQRGTTGEKYNYIYELQQVFEGLNSELSQSAPESQVIGMSLLGLLGVSTEFANENEKLHNKFVEGATQMKAMLSPTTIARESELLEAIDKYIASTDIQQHEALFMKVMSFKDRY

SEQ ID NO: 33286 - DNA, 3574 bp, DROSOPHILA
atttgcctgtgggatatcttgattctctccattcaccttctgctaatttgaataccaaccatcttcatacttggaatgtaactttctttgttttcccattccttcccttcaaccttattgaaatgagccttgattggatatgtggttcctaaggtgagcacttactttctcgccagttgccatgagtcacctgaaattcgctttttaaggcactgttgcctccgctgacaccaatgagtcaaccaaaaactgccgttcttcgagtatcgcctgctttggatggatgactgtttccaagaagatggaccccgcatttgtatcttgtaaatgtggcgtgttcttttgtcgcctggtggtgggcagtaagcggaatttaaatggaagaattgccggttcgggtggtatattgagttcagacttcgctgcactttcgatgggctttggtgtcatttcactcagctggctccattttattcgagcgccacgcacaattggccgcactttttgtgccacatactcaacatacatacatatgtatatagctgacagtcagtgaagcacctctcatccgcatgtgaagcagttaattgcgttggcagccacttgactaccttaacaacttcctgcaggatacacaagagtatccactccacaaagaccagatccgatccagccaaaattcggcaatttgcataaaatccactcgacgtcaacagccagaattcagggccacactcgtgctgcggcatgtcaaatgtcattttcaattgtcaatggcaggcgactcgacaatcgacaacgctcacctgtcaacgggaaatgctgctcgcacaggcatcgacacaccggaaaatccccatggatacccatccatctcctcgaacctatattcccaaaaaaaggttggagtttgctttgaattctactgattttttatgttgtgattatagttgtgttaagatttattttgaaattcaaaggctgctaccagatggtatggctattctctgatcgccttggcgattccttccacaattgacacagcgaaaggaagaagtagcgcgaacaccacaccaactccgccctgagcaggaacaccatcgacctgttggttgttgtgtgcccggtacctcctgatcacattgttggcataggtccgatcctggacagtcagtggcagacgactggagtacttctcgtagaactcaatcaatgcgggcaaatttcgggacttggtgtatctatcgacctctgagttgccgaagactgcgagcatttgacgtgccttggccgtgaattcaggatcactctgtgcatgttctgcttccaaatatccaagaagtgccagcaggaagctacaaatttaacgaatgtagatttgtctatctatctttaagcggataaatacttgcccaaatagaatgactgtcttcatatttcgtcttgatgttgcacttagtaggatgcgattgaaactctttagttgtgctctaaaatgcatctgtatttatagctatgctgtgatcatgttcaagacactgtcttatcatctttgcttgaacttattctgaataaatcattttctcggtattccatagtcttaaaaaaaatcatcggtagataatgccgctatatatatatattgatatataagaaaaatatttagccttgcagagggcattaaaatgactgtcaaaatgaaacctatttcttatttgagcagcttttataaaagccaaaactataggatatttcttatttgagcagctatatagaactataagatataaatttattagctaatcggagctgagatatgtttaaaaaaaggaggcaatatcaagccgttttaattaattacgataaagcgtgaatgactatatacatggtttctcatttatttagtcgctggtaaatcatgttttcccccaaaagtcgatactagatcatttgtaggcagggtttgtattatggttttacttcttttagataaaatatcagatatttaaagtatagtttttaaattatttcatttttattatactttctacataaaatgggtccaaaagtttttgaaaagttgactatttcttgagctggcaaagttagaatttaagaaattaagaaattacaagttataagcttttccatttggtctcattcaacggcctttacaatgatcgaaattgctgtcttgataatgtcagacaaccatcctccctgggcagatactccgtcaacttgctggtttcgttgtgccttatattgcctcatagcattattgatactaatcctttcctgaggtgtcaatcgtaggcgactggagtatttctcgtagaaggcaatcagcgtgggcaaattgcgagccttcgtgtatttatcgacggagggattgccgaatacttgggctatttctcgggacttggccgcgaattcagcttcactttggcagtgtcctgaacccaaaaggcagccaagaacaacgagaaggcagctaaaaatcttcaatattaaaccggatggatatgggaccaattggagtattgctcacctgatttgcagtgcggaattcatctttgatattgatgtgctgctgtgtactgttcgagtgttactcataagttgcagtatcaatcgctgcgcttttatatgtggattttcatcgatctgctccgctttcttacaaaaagtcttgaacatatttaacgaaatattctaagaaaaggtgcatttggaattttatacggttattagcctttttaaaaagtgatatttaaccactttcttaaaaacaagaatggaatcaaatgattttggtgccttactataaaattaaattctcgaaattagttcttcattcgacaaagaacttgtcggaatggagttttgcccacacatcggcgcgtttcattaaaaagcgcccacgtattatgaatgggaaatggaatgaaagtgcggctgtcagaggcttttcacattttcattagcttgcggttctgtcagcgcgtttgatctgagaaattaatgcaataccacggccggaacgaactgagctcttgtaaataggaacagctgtcgcgaagttcaaaagagtcgagcccccctgccatcgtaagaagaagtgaccctagaccatggagtctaagcctcggtcacgtagtgcagttggaaaatattttgtaattgaattttaatgcacgtcgctggctgtggcaacctgtcgcattagcgtcagtggcggagacacaggaccctcggcgagtccttgggggcaggagctaatcagttgcggcgcagacacctgcaggacataatttccgaagcccaacaagtgagccggtcttatgacgcctcaacatgcgttgtctagccatgaaagtaaatcaaaatgcagcagggcgcaaaaatacttcagcaaggctatggatatctgcgtggccagcgcagtgaaaaggggttaaattgtggaatccgaggcagacagttaggtgcaagccagacaggatgttcagaggggctgggggcacatatggcaatatccttgttggtccgacgacgctggccattggaaatc

SEQ ID NO: 33287 - DNA, 660 bp, DROSOPHILA
atgaattccgcactgcaaatcagctgccttctcgttgttcttggctgccttttgggttcaggacactgccaaagtgaagctgaattcgcggccaagtcccgagaaatagcccaagtattcggcaatccctccgtcgataaatacacgaaggctcgcaatttgcccacgctgattgccttctacgagaaatactccagtcgcctacgattgacacctcaggaaaggattagtatcaataatgctatgaggcaatataaggcacaacgaaaccagcaagttgacggagtatctgcccagggaggatgcttcctgctggcacttcttggatatttggaagcagaacatgcacagagtgatcctgaattcacggccaaggcacgtcaaatgctcgcagtcttcggcaactcagaggtcgatagatacaccaagtcccgaaatttgcccgcattgattgagttctacgagaagtactccagtcgtctgccactgactgtccaggatcggacctatgccaacaatgtgatcaggaggtaccgggcacacaacaaccaacaggtcgatggtgttcctgctcagggcggagttggtgtggtgttcgcgctacttcttcctttcgctgtgtcaattgtggaaggaatcgccaaggcgatcagagaatag

SEQ ID NO: 33288 - protein, 219 aa, DROSOPHILA
MNSALQISCLLVVLGCLLGSGHCQSEAEFAAKSREIAQVFGNPSVDKYTKARNLPTLIAFYEKYSSRLRLTPQERISINNAMRQYKAQRNQQVDGVSAQGGCFLLALLGYLEAEHAQSDPEFTAKARQMLAVFGNSEVDRYTKSRNLPALIEFYEKYSSRLPLTVQDRTYANNVIRRYRAHNNQQVDGVPAQGGVGVVFALLLPFAVSIVEGIAKAIRE

SEQ ID NO: 33289 - DNA, 3407 bp, DROSOPHILA
tggcacccaagtgtcatcgaaccgaaccgacaaaccaattgacaggcagactcagccatacgaatcggtttcgatgcgggatggggtatgtggcgactccatcggatctcgggatgccacatgcttatagatatgttcaagtgccgtttgtgtcagtcgaatgtgtcgcgcagatgataaaatacataaaacttcaggctctcggctgaaatgaaatatgagatatagttttggggggaagtaagcattaattgtatttgtttctttaggtatttgtatttagttatgtaatttctcgcagtgaattaaactgacgtttaatgagatacattttgtggtatctagtggatatttgttccctatcgtcttcacaactttccttttctttgaatgccccatgcatttaacacccactctaattttctgaacgatccaaaccttcaaccagccatccattcaaccagtatccattagactgccctccaaagtgctgctccatcaagagggtctaaggtgcgatagtttcgcttttattccacgtttctatggaggatgtccgtcaaaatccaacacaacgtgcgtcatgtgaaatagatgctaattaggcgctaatgagacaacttggccatagaaacgaacctaatttgagggacaggcacgagtgcggctttggagcgtagaaagatggggagttactggagtttggggcgtgaccgagttgaggccgagttcgttggaccggcggcttcaatttatgaatcccaggctcaattaaaaatgattgatgcagtcttatctcttaagtcccaatggggggccctagcaatgaacaatcgagtgcgcgagtggggcaaacttcatgtttgcttgcttataaatgataaacctcaatttgaatgctgcagcaattaatcagtgtttaaagtgaacgaaaacagagacggtccagcatgaaaaccctgtgagcattagttcaaaaactacagaaaagaacagaaaaatgtcggcagtcagtgcgagtaataggccgcctccatcgccgatatcggtgcctatatacgatggctatgccacgatacgagcccgcggattaacccgatcccgatcgataagggcggaatcggaaaatggtgcccaactcccgccggtcttgcagaaaccccgaaggcagaggaccatttccctgaggagtaactacagtctgccgggcggtcagccggaggagatctatgccagggcgaaacctgttagaacgccgaccatcggggatctggaacctatatacaccaatccctcggcgtttcgtccactctcggatgcctcgagttcctcgggaggaggcagtatgccctgtgattatcagaatgtgaagaagaactcccggttctcattggattcgctgcagagtagtgccactccaaagacgcccgactacaatactgccggtgaggaggagcccatcttcctgtacactgcacccgagagtccgaaacggagactggacagtggaatccggagctcctatgacagttcagatcgcggctgctactcgccatcgcccaggatgagcttcgacatgcaggagagggattgcccgcgtctaagaccgtcgaccttgcgtcacaactcggtgggttcaacgggcaataggcgtcccatgaccttgtccctgaacgagacaccaaggtcgcccacgggacttccaccaccggcgccagttcgtcgggaaagtctctatgccaagccaaagatttatgccacacccatgcgaccgccgaccagtccacgccttaatctgtacgagcttccaattgtgacccaaaggagcaacagtacggaactgctggagaggtcctgcaccagtcagagtctggccaccatcgaccaggacgagatgcttgtgatccccagtgccatgcccatgctgcccaatgcggtagataggcgataccacaccctgggtcacatgagggtcaagagcatgggcgctggactgcatcgcagcatggatgtgcccacgggctccatgctggacatggccagcggcggccactggcgttacagggcaggcaatcagtccgccggaaacatttacgcctccgccgaggcagccgtcagcgatctgaaccgcatggctccggagtacatggatccgttggactttaagatcggatgccaaaccacgttgcggagtaagcccttgattccctggtacgagctggcaatccgcagggatttcaagcggcaatcttgtccgccgatcagtggatccggcgtgggaggtggagtctgtggctctctgaccttggcaacctcgcctcaggaggatcatgaacaggtgaagtacagaactaattcaataatatggctaaatataacaagttccgttcatctacataacgtataagtcaatcaaaaatttcgtttgataagatctcttcacattattgtactagcataaatccacttcatcgttgagtcgccttgtttaaggggaagtaggcaaactgctttgagaaactcgagccatttgtgagagatgaagactgcctctgatatccgcttgacaagctgcatgcaacattcgatgctacaaattctatgtggtttgttgctgcggttatggattcaacgtggtgcgtgttctgtgcccgctgatgtcttcacctggaattcctcatccggctttggcattgcgaatgcagctccagctgcagctcatcgaatatggcgaagctatgtaggagcagcgcgcagtggacatgaacccgacggcaagttgggactaaagtggccacagaatacctggtgaggagcgagtcccattcagagttgccacaactgtcagtcgccgttagatgcgatgcttttgtgtgctgattgatttaatcaaagttgcatgagcagcccggctccggaggcctttgggcacgggtatatttggcctattaagccggcaggccaggctgagtcttcatccattagtttcacgtcccatggattacagttggcgagcgattggcttttaatcccacgacgacggcacagtcgcatctgtagctgttgtctctgcagtggtggccccagccgctgatgaccaaaaccgatgacctggtttcgtggaacatgcaattgatatgtccacgaaagaaatcagacatcgatgatggggtctgctagccattggaatgccctgcagtggcgatattgatgttgaaatccacactcgagcaagaatgtcattggtattgactagagtatttctctcacccaggatgctgttttaatatcatagtaatgtgtattaagtattacactttcgaaattaaagttatcaaaactagtctgcttagaattcatgttcctacatattacccattcatagcattgtatgtatatcttagtat

SEQ ID NO: 33290 - DNA, 1407 bp, DROSOPHILA
atgtcggcagtcagtgcgagtaataggccgcctccatcgccgatatcggtgcctatatacgatggctatgccacgatacgagcccgcggattaacccgatcccgatcgataagggcggaatcggaaaatggtgcccaactcccgccggtcttgcagaaaccccgaaggcagaggaccatttccctgaggagtaactacagtctgccgggcggtcagccggaggagatctatgccagggcgaaacctgttagaacgccgaccatcggggatctggaacctatatacaccaatccctcggcgtttcgtccactctcggatgcctcgagttcctcgggaggaggcagtatgccctgtgattatcagaatgtgaagaagaactcccggttctcattggattcgctgcagagtagtgccactccaaagacgcccgactacaatactgccggtgaggaggagcccatcttcctgtacactgcacccgagagtccgaaacggagactggacagtggaatccggagctcctatgacagttcagatcgcggctgctactcgccatcgcccaggatgagcttcgacatgcaggagagggattgcccgcgtctaagaccgtcgaccttgcgtcacaactcggtgggttcaacgggcaataggcgtcccatgaccttgtccctgaacgagacaccaaggtcgcccacgggacttccaccaccggcgccagttcgtcgggaaagtctctatgccaagccaaagatttatgccacacccatgcgaccgccgaccagtccacgccttaatctgtacgagcttccaattgtgacccaaaggagcaacagtacggaactgctggagaggtcctgcaccagtcagagtctggccaccatcgaccaggacgagatgcttgtgatccccagtgccatgcccatgctgcccaatgcggtagataggcgataccacaccctgggtcacatgagggtcaagagcatgggcgctggactgcatcgcagcatggatgtgcccacgggctccatgctggacatggccagcggcggccactggcgttacagggcaggcaatcagtccgccggaaacatttacgcctccgccgaggcagccgtcagcgatctgaaccgcatggctccggagtacatggatccgttggactttaagatcggatgccaaaccacgttgcggagtaagcccttgattccctggtacgagctggcaatccgcagggatttcaagcggcaatcttgtccgccgatcagtggatccggcgtgggaggtggagtctgtggctctctgaccttggcaacctcgcctcaggaggatcatgaacaggtgaagtacagaactaattcaataatatggctaaatataacaagttccgttcatctacataacgtataa

SEQ ID NO: 33291 - protein, 468 aa, DROSOPHILA
MSAVSASNRPPPSPISVPIYDGYATIRARGLTRSRSIRAESENGAQLPPVLQKPRRQRTISLRSNYSLPGGQPEEIYARAKPVRTPTIGDLEPIYTNPSAFRPLSDASSSSGGGSMPCDYQNVKKNSRFSLDSLQSSATPKTPDYNTAGEEEPIFLYTAPESPKRRLDSGIRSSYDSSDRGCYSPSPRMSFDMQERDCPRLRPSTLRHNSVGSTGNRRPMTLSLNETPRSPTGLPPPAPVRRESLYAKPKIYATPMRPPTSPRLNLYELPIVTQRSNSTELLERSCTSQSLATIDQDEMLVIPSAMPMLPNAVDRRYHTLGHMRVKSMGAGLHRSMDVPTGSMLDMASGGHWRYRAGNQSAGNIYASAEAAVSDLNRMAPEYMDPLDFKIGCQTTLRSKPLIPWYELAIRRDFKRQSCPPISGSGVGGGVCGSLTLATSPQEDHEQVKYRTNSIIWLNITSSVHLHNV

SEQ ID NO: 33292 - DNA, 2462 bp, DROSOPHILA
tcgaatctgtatcttactgtttgtgccaatcgtatccatcgtatggaggcctgtgcagattgtgtgctcggagatgacgctgtctttccatctgggtgtggttctggttacctctgctgtccacctggaggaagagcaacagcaggcaatggaggatgaggatcgcagcgggatagagccttggtcccatggctgtagtttgtggagtgacaaattacttatacgttaaatcacaattaagtgggctgagatgtattatggaaccaatcgatttcccattagtcacttatctcaaaatagaaaaaaaaacaacatatttttaaaagggggttactcattctaaagaaagggtcaatttatatttataaaatccatttctcctcatttgaaatgtatatcgcttggatagcaacaattaatgcgattcaatttattatttacacattcgaacagtggaaatgttcaattaagcagtgatccattgatatgatgaacaaggcttccgcttcccattgtctggcgagatccgaggcattatggccctgtgaacgactttgcaacgggccataagtaatcgcgtgcaatcccaaccttgtcggacatcagatggagttacgttgtttatggtggtgcctcacacgtgctggccagtttttccagcgcttttccttctcgatgttgtggtatccatcgtggcccacgacatgtctgggcactactagctccagggacaaaaagaggcactgatgtgaaaatataatatatacgataaaaatgttactatttctttatctctacttaccaagcagaaaaaaatcaaccgcattgggaaacaatagactggcgactaattcaattcgtcatctgtgaagttcttggtaaaaccacatagggtgttcccgaatttcgacggaatatattaaaattatttagttttttattcaataatcttcagagattggtcacaaaacgaaagggtataatgggatatacatatgagctagggacgtggcgtggtaaaggcatcgttccagcttgcccaatgcttctccgtcttcaggctgtggaagccatcatgtgctctaacgtgtcgaggtccctttatatggcttcctggcttcacaaatggatctcctccattttcagggtcaggcgagccgttcgggtctgggttgtccgtgctattaaccatatcggtgctatttgttggtgattctgtgacctccgaccccgcttctgtggtctgagttaattctccgatggaactggcttctgtaactggagacgtttcgccatctgttggggacgctggagatgattcagccgcaggggtttcctgagcctcgagcgcggctaccaagaatatagcgattccaatctagaacaaagaaacgttcgattatgtgcaataatgagggaatgccccattggcactcaccagcttcagttcaagtttcgccatgcctatcgtcacacctgacacatagtatgtgtacctatactgcgtcgaaaccagaagcgccgactgggcaaagccaccttttatagtcgctgcgcaggtggaatcgattggagcagttctaaattgattgcgggaatcgctgcctggttctgcgggcagaactaattctcttagtgaccaactgatagatggcgatctttaatttgcgaacgcagtccgggaaattccggcagacgcatccaacacctgatgccaatcgggtttttcgagagagatagagagctgattgctctggggctgtctgtaattgttggcttaccgatttccataatggtgggcgattctggagctatataagtcagctatggccggcagagaacaatcagttttcgcttggcccttgctagttgaactcagtcggttgggatgttcatcaagttgcttctaattagccaggttggtgccagatcttggccaggacaaaatggctcgaactatgattaacttaacatacattttaattctagctgctggcgctgagttacgctcagttgtcgctcgacgaggctaaaaagcaaatcgatgcctcgctttacagcgaagaggagactaccgatgatacgcatctgccggagccccacctgcccccccaatatcagcctcatcatccccacaagaaggtgaccaccaccactcccgagccggaaaccacaactccaaagccagaaaccaccacgaagcccgcaatagagcaggagggtgaggccaccgctgctcccgatgacggactgggtcaactggatgatggcttgcaacaaaacaatgatggatctgcgcttccagagtccaccactccggaaccggaaaccacgacccctacgacgaccaccaccacaacgccaaagccccataagcatgagccccactttcatccccattcttatccgcatcctcacccctatccctaccccattcagtatccctacccccatccaggagt

SEQ ID NO: 33293 - DNA, 402 bp, DROSOPHILA
atggcgaaacttgaactgaagctgattggaatcgctatattcttggtagccgcgctcgaggctcaggaaacccctgcggctgaatcatctccagcgtccccaacagatggcgaaacgtctccagttacagaagccagttccatcggagaattaactcagaccacagaagcggggtcggaggtcacagaatcaccaacaaatagcaccgatatggttaatagcacggacaacccagacccgaacggctcgcctgaccctgaaaatggaggagatccatttgtgaagccaggaagccatataaagggacctcgacacgttagagcacatgatggcttccacagcctgaagacggagaagcattgggcaagctggaacgatgcctttaccacgccacgtccctag

SEQ ID NO: 33294 - protein, 133 aa, DROSOPHILA
MAKLELKLIGIAIFLVAALEAQETPAAESSPASPTDGETSPVTEASSIGELTQTTEAGSEVTESPTNSTDMVNSTDNPDPNGSPDPENGGDPFVKPGSHIKGPRHVRAHDGFHSLKTEKHWASWNDAFTTPRP

SEQ ID NO: 33295 - DNA, 2222 bp, DROSOPHILA
cgatggcatcaccatagtgcggtccatatccgatgcaatcgagacgaatcacaacaagtacggagcggccaggcggaacaactgcttcctgcggcgtcccgatatcctggaaacggtatattcggtcgaggaggatcccgaacccaccacggacgtggcagagaagcgggacaagttcaagaaccgctccgacaaggctctcagctccagctcgacggagggtcagatagacgccgccagtccctcgaccgcagacaaagccaaagattcatcgcccgtcgacggcggatccaccattccaagacgccaactgggagccctcaaaagatctcccagccacgactctccgtgcaccacactcagtgtcaaggtcccccagctgcagccaccatctcctacaccatcgacacaaggagtccaggatccgcccaacggaaaaacccaggtaactgaaaagtaaaagattaaactgcaaaatgttgcacttaaattttaaatttcaggataatgttgagccaatggagggaattcccatattcttagattgcgaaatagacttatagcgtttattaaattatgaaactttactagagaaaagactttctgttttcctgcatagcactaaatctttgaattaaatgtattaaacgaatctttggcttttccaatgaagcatagatctttctatcttatatgcatagttaatgtatatatccttttccaggtcaccaactacaaccgggttatgctcaaccatcgctcggtgacgaagcccaaggacgtcaagtacaagcgcatcaacaaggcgaagtccaagagtctggaggagctgcgagggcgcctcaagaacctggtggagcggcctcctggcctggacggcggctactccggcggcatgatgccgcaggcggcgcagtcatatgcgtgacattcgcagcagccggacggagagtcccagaggtcaacggagggggtaaagaacggccagccggaggcggcgatggaacctcgtccgcggagggagagcgcggagccaatgacctcgacctcggccgcgacctcgacctcgacttcgatctccgccacccaggagccgcagggcagcagacatggctttcccaagaggtcgctgaccttgccacgcatcctggtgccccggcaatcggcagcgggactggcgggctcgagcggcggcggcggtggtgggcgtggcggcttctagcaattaaagaaatttttcatacgcaattgtgataaaaagtaaacacgttttcttcctccgtctctgtagtgccgacttcagttgctttaacatgattctcttttgtaacatttgtttccttgacatttatcctgcgcctagtttggtaaactatgcatttacttaagttatagcttaagtttttcataaaacggaactgcattttgacttaacattacatatagtttctcacaaaacaaataaatcattttaaaaacatatttttctgtctatgattttcacactttacaagaagcgtatgaaaaatttcgccaaccgtaagtcagatatatcttacaaaagaacggaaagtgtactcgaggacaatatttccaaatcccagatgttgaatggtgagtagctccagtcagtcccagaatcgtgggtgaaaataggctagaaaggatattataaaaatttactcaagatattactaaatagcccgtaagaacaaatgaatatttatgttttaagcaaagtgttaatcgttaatattacctatatacacatttctgcaacgtttaagagcttctctgaatcttcgtttacatacatatataaagcatttcgacatgcttttgaaaactatacaaccaaaacaatgttagaacatacttctctattgatattcgacctagttgtaagctctactccatggactgtcttctagataacagaatttacaattgatcataaatatatatgagtatattttcttactaactattactagccatttataagtatttaagaactttagctagcataagatagaagcatattatttttgcattttgtcacgattattttataacttgttatcgactattggggtctgcatggccccaatgtcctgaatgtcagatgtaccttgagaactcgtaaaatactgtaaagatttaatccaaatatcagcgttagtataagcaactgaattagaatctccttaggtgtgaactac

SEQ ID NO: 33296 - DNA, 222 bp, DROSOPHILA
atggaacctcgtccgcggagggagagcgcggagccaatgacctcgacctcggccgcgacctcgacctcgacttcgatctccgccacccaggagccgcagggcagcagacatggctttcccaagaggtcgctgaccttgccacgcatcctggtgccccggcaatcggcagcgggactggcgggctcgagcggcggcggcggtggtgggcgtggcggcttctag

SEQ ID NO: 33297 - protein, 73 aa, DROSOPHILA
MEPRPRRESAEPMTSTSAATSTSTSISATQEPQGSRHGFPKRSLTLPRILVPRQSAAGLAGSSGGGGGGRGGF

SEQ ID NO: 33298 - DNA, 3780 bp, DROSOPHILA
gaaatcaaaacctaattactttccagcaaaatcattaggcatatttaagtgtttgatttttcccacacctcggctaacgcattactgtgtaaaatataattaaaatcactcagctaatcgggtttaccagacaatggcatagtcataagctcataaattccaacctcactccataaccgcccccccccccccacgacaaaaggggaaactattaaagggattcccgactcttatctgtgggtgaaagtaaaccgcaggttgcagcattttacggtcagtttcacatttcagcttgggcgcgtcaatgggccacggactaaaatattcaaatcaaattgcatgtgtatatacttaaaacactactaattataattgcataaaggagcgcatagtgggtggcctgaataaatgcatcgaatgcaccgaattttactttaatggtagcttaatgtaattcattttatgcattatgacattttctgctcggtgcggcgctctgtctggcattgtaatggaatttgcattgtggcatctgtcgcatccgtgccatggggcgtatacgtaatttgagttttaaccaagctccctggggtgaataaggtactgttgaatacctccattgccgcccgcccagtcgaggcaaattattcgaatacacagaaagaaatagcaaactggacaatccagtgcccaaggaagcactcaaaaaggcttaagtttaagtaaatatgtgatggggattcaacatccatttgttgctgttattcgtttcactcgagctgtaaatattgactattattaaaaaaccccttgcatcctcttgcagtcagcacgttctcggctccggaccagtgcacatccatttttgcatgctggccgggcagatagccccggcgtgagcacacacatcgggctggaaaagatatagccatcgagtcagccagccagacagccaacgagccaaccagccatccagctgcatcgaatatatctcggccaaatgtacgccggtcgggcgacacaatttgccaaaaccatcagcagcatggcgtgcagcatacagaagcaacctcaagctccgcaatcagtggatcctggcactgcagcagtggatcgggtgggtggaggaggcggtggccccagtggagctggcaccgttccctccacgccgaaagccaagaccgcccagccgaggggctccctgccaacggacgtgaaccagccaccgttggaatttcagtggccaccgcccgttcccgtttcgatacacacgagcaacttgcgtctgaacatgatgaaccaggatcccaaggacctccacacagccagagccattatcgaggagctgcgctccaaggtgcgcttccagacggagcacatcatgaagtggcgcaaagcgtatgccatgcaggtgaggatatccttctattttggaatatttagaaatgtgattgctcaagtccacatcctaaatgcccatctttcattcataccctcaggtccagcaacactatcgttaccagaaggagaaatctgatcagatgaactcgttgacctcgcagctcttgctcttggaatcccgactgaagcggaagcagaagcagatagccagtctattgaaccatcgggagttgaccatccagcgccagcagaagatcatcgacaccctgtcctcccggctggtggatcacgggctggagaccattgaagctagctatgccaacgagctggactccctgaacgactcggattcggcggtggtgctggaggacattgactcggacagcccgatgacattgggcacgcgacggaagagtagtggcgctggcggattgggcggcgtgctgggcagcgatggcatcaccatagtgcggtccatatccgatgcaatcgagacgaatcacaacaagtacggagcggccaggcggaacaactgcttcctgcggcgtcccgatatcctggaaacggtatattcggtcgaggaggatcccgaacccaccacggacgtggcagagaagcgggacaagttcaagaaccgctccgacaaggctctcagctccagctcgacggagggtcagatagacgccgccagtccctcgaccgcagacaaagccaaagattcatcgcccgtcgacggcggatccaccattccaagacgccaactgggagccctcaaaagatctcccagccacgactctccgtgcaccacactcagtgtcaaggtcccccagctgcagccaccatctcctacaccatcgacacaaggagtccaggatccgcccaacggaaaaacccaggtaactgaaaagtaaaagattaaactgcaaaatgttgcacttaaattttaaatttcaggataatgttgagccaatggagggaattcccatattcttagattgcgaaatagacttatagcgtttattaaattatgaaactttactagagaaaagactttctgttttcctgcatagcactaaatctttgaattaaatgtattaaacgaatctttggcttttccaatgaagcatagatctttctatcttatatgcatagttaatgtatatatccttttccaggtcaccaactacaaccgggttatgctcaaccatcgctcggtgacgaagcccaaggacgtcaagtacaagcgcatcaacaaggcgaagtccaagagtctggaggagctgcgagggcgcctcaagaacctggtggagcggcctcctggcctggacggcggctactccggcggcatgatgccgcaggcggcgcagtcatatgcgtgacattcgcagcagccggacggagagtcccagaggtcaacggagggggtaaagaacggccagccggaggcggcgatggaacctcgtccgcggagggagagcgcggagccaatgacctcgacctcggccgcgacctcgacctcgacttcgatctccgccacccaggagccgcagggcagcagacatggctttcccaagaggtcgctgaccttgccacgcatcctggtgccccggcaatcggcagcgggactggcgggctcgagcggcggcggcggtggtgggcgtggcggcttctagcaattaaagaaatttttcatacgcaattgtgataaaaagtaaacacgttttcttcctccgtctctgtagtgccgacttcagttgctttaacatgattctcttttgtaacatttgtttccttgacatttatcctgcgcctagtttggtaaactatgcatttacttaagttatagcttaagtttttcataaaacggaactgcattttgacttaacattacatatagtttctcacaaaacaaataaatcattttaaaaacatatttttctgtctatgattttcacactttacaagaagcgtatgaaaaatttcgccaaccgtaagtcagatatatcttacaaaagaacggaaagtgtactcgaggacaatatttccaaatcccagatgttgaatggtgagtagctccagtcagtcccagaatcgtgggtgaaaataggctagaaaggatattataaaaatttactcaagatattactaaatagcccgtaagaacaaatgaatatttatgttttaagcaaagtgttaatcgttaatattacctatatacacatttctgcaacgtttaagagcttctctgaatcttcgtttacatacatatataaagcatttcgacatgcttttgaaaactatacaaccaaaacaatgttagaacatacttctctattgatattcgacctagttgtaagctctactccatggactgtcttc

SEQ ID NO: 33299 - DNA, 1413 bp, DROSOPHILA
atgtacgccggtcgggcgacacaatttgccaaaaccatcagcagcatggcgtgcagcatacagaagcaacctcaagctccgcaatcagtggatcctggcactgcagcagtggatcgggtgggtggaggaggcggtggccccagtggagctggcaccgttccctccacgccgaaagccaagaccgcccagccgaggggctccctgccaacggacgtgaaccagccaccgttggaatttcagtggccaccgcccgttcccgtttcgatacacacgagcaacttgcgtctgaacatgatgaaccaggatcccaaggacctccacacagccagagccattatcgaggagctgcgctccaaggtgcgcttccagacggagcacatcatgaagtggcgcaaagcgtatgccatgcaggtccagcaacactatcgttaccagaaggagaaatctgatcagatgaactcgttgacctcgcagctcttgctcttggaatcccgactgaagcggaagcagaagcagatagccagtctattgaaccatcgggagttgaccatccagcgccagcagaagatcatcgacaccctgtcctcccggctggtggatcacgggctggagaccattgaagctagctatgccaacgagctggactccctgaacgactcggattcggcggtggtgctggaggacattgactcggacagcccgatgacattgggcacgcgacggaagagtagtggcgctggcggattgggcggcgtgctgggcagcgatggcatcaccatagtgcggtccatatccgatgcaatcgagacgaatcacaacaagtacggagcggccaggcggaacaactgcttcctgcggcgtcccgatatcctggaaacggtatattcggtcgaggaggatcccgaacccaccacggacgtggcagagaagcgggacaagttcaagaaccgctccgacaaggctctcagctccagctcgacggagggtcagatagacgccgccagtccctcgaccgcagacaaagccaaagattcatcgcccgtcgacggcggatccaccattccaagacgccaactgggagccctcaaaagatctcccagccacgactctccgtgcaccacactcagtgtcaaggtcccccagctgcagccaccatctcctacaccatcgacacaaggagtccaggatccgcccaacggaaaaacccaggtcaccaactacaaccgggttatgctcaaccatcgctcggtgacgaagcccaaggacgtcaagtacaagcgcatcaacaaggcgaagtccaagagtctggaggagctgcgagggcgcctcaagaacctggtggagcggcctcctggcctggacggcggctactccggcggcatgatgccgcaggcggcgcagtcatatgcgtga

SEQ ID NO: 33300 - protein, 470 aa, DROSOPHILA
MYAGRATQFAKTISSMACSIQKQPQAPQSVDPGTAAVDRVGGGGGGPSGAGTVPSTPKAKTAQPRGSLPTDVNQPPLEFQWPPPVPVSIHTSNLRLNMMNQDPKDLHTARAIIEELRSKVRFQTEHIMKWRKAYAMQVQQHYRYQKEKSDQMNSLTSQLLLLESRLKRKQKQIASLLNHRELTIQRQQKIIDTLSSRLVDHGLETIEASYANELDSLNDSDSAVVLEDIDSDSPMTLGTRRKSSGAGGLGGVLGSDGITIVRSISDAIETNHNKYGAARRNNCFLRRPDILETVYSVEEDPEPTTDVAEKRDKFKNRSDKALSSSSTEGQIDAASPSTADKAKDSSPVDGGSTIPRRQLGALKRSPSHDSPCTTLSVKVPQLQPPSPTPSTQGVQDPPNGKTQVTNYNRVMLNHRSVTKPKDVKYKRINKAKSKSLEELRGRLKNLVERPPGLDGGYSGGMMPQAAQSYA

SEQ ID NO: 33301 - DNA, 3111 bp, DROSOPHILA
atgcaattcccatcccttcgagccgtgcatatactgggttctgcttataaataattcaattgccattttcctggccatattctatgggctgcaaagcgaacatatgacgcctgcaacgaattacaaaggacggaagggaaggcctcacatttgatgtgaaaaacatgagggtcctttgcattgtctagctcacgtctgtgctgagtgcgagctagaaattgcagttgtattgattatttttaaatttttaataatggaaaaccaatgacctcggccattagacaagccattaacccatgacatcatgacatcatttggtgaaatgtgtgaattccgacaaaaaaccgtggcaactaatggtgccattggcgcagctgttgggtttttctggctcctaacctttcgagggctttaacagtttaaatacaaaaaaacgcattgaacatgtttgagtgtgcggccccattgaagtgtagtcatgaataatattcgctcataaattgtttgccagtgcacaaaatatgtatttcactgtgaaaatataagttaagccgctttcatcatcagtgtttgtccaatgttcagtgtaagagttttttcaatgggaaaaatgtataaaatatagtttacaagtattttgaactatgaactttgttctttcatcttttggcttgacactagttgaaagaatttttatttgtctcttatggctcacagaaaaattaaaactaagaactgtcgtataaacatgccccataatattctatattcttgtaatattaacgatgaccatgactagaaatgtttaaggaatagattagagacaaatttattttttttattaaagtgtgataattaaaaaagtgaaaccaatttctagtgtaaatgtaaaatccaaccgacgacagctgtgcatctcttatgctgtatttttaatttcccatccttgttttctttcttacagtttcccatcaacgcgaggcaaaagtgataagtgaaaatgtttcatttgaagcgggaactgagtcaaggctgcgccttggccctcatctgcctggtgtccctccagatgcagcagcccgcccaggcggaggtgtcctcggctcaaggtgagcatctcgtgcagccgccacccgagaagcaatcctctaaagactcttttctaggcactcccctgagcaatctctatgataatctgctgcagcgcgagtacgccggacccgtcgtctttcccaaccaccaggtggagcgtaaggcacagcgctcaccctctctgcgcctgcgattcggacgcagtgatccggacatgctgaacagcattgtggaaaagcgttggttcggcgacgtcaaccagaagcccatcaggtcgccatccctgcgtctgcgcttcggcaggcgggatcccagtctgccgcagatgcggaggaccgcctatgatgacctcctggagcgggagctcaccctcaacagccagcagcagcagcagcagttgggtaccgagccggactccgatctgggtgccgactacgacggactgtacgagcgagtggtgcggaagccacaacgacttcgctggggacgcagtgttcctcagttcgaggcaaacaacgcggacaatgaacaagtaataattttcatttcgttttgcaatacaaataaccttattaatgaaaccattagagtagcatatagcacaattttagcaccatttttaaagtataaagatctggacatagttttaatactctatacattccattggccagattgaacgatcgcaatggtacaactcgcttttgaactcggacaagatgcggcgaatgctagtggccctccagcagcagtacgaaattccggagaacgtggccagctatgccaacgatgaggacactgatacggatctgaataacgatacgtcggagttccaaagggaagtccgtaaaccaatgcgcttgcgatggggcaggagcactggcaaagctccgtcagagcaaaaggtatgcatgaatattagatcctttttttgtgcccaaaccaaagtggttcttctaccaacataatagcatactcccgaggaaacctcatccatcccaccaaagacacagaactaaatttttcgaagccgccatgtgaaggatcagcaggagatcagcaggcatcaattacaagaaaatcgtcaacaagctacacggtcaataagatacagaaaaaatatatgccccgcgtcggaaaacgttttttaaagcatttttgagatcgcaggggctagaatacacacaaatgagcatatatattatacaaacacacatatgtatgattaaccacatagtttaactttttgatttgaatagttacaagtaaacgcaaacttggaaatttattctgttgtaatctttaacaatgcgcaggtaaaacaaggtaacaaaaattgaacttatattgaagtgtattcatttgcactgactttaatttcatttcatttcatttattttgctatatgttcgataattctgaatttttattaactcaaaaaacacttaagtctccctatttctaacatgctcaattaagcaaactttgaaactatttgaatgccccgaaaacttttagactcaatgtatatacaaaatggagaaaccttttaaaaaccagcgccaatttgttatgacaacagtagaatgccatacaacttattggtctattagtgacacacttcttgatttctaaactagtaaactagtaagcgaatttcgatttaacgttacgatggaaatgtttgaaaaacatagaggcccccgaaagctgtattactggaacacttgttatattatgggggctaaaacttataaatatatgtatatcaactattatatcgtacgactatatatatatatatatatatatttacgatgagcattgtctattgaaattttattgatgtattttaataaaaggagaaaacaattacagaggcaagcgagcataaagctgattgttgttagaacacttttgtatatttaatttacaccatcattgaaattattgtttaacaactaaaacattatgtggtgagcatccataaacagctgaaaattgcgaaaacagtttacc

SEQ ID NO: 33302 - DNA, 903 bp, DROSOPHILA
atgtttcatttgaagcgggaactgagtcaaggctgcgccttggccctcatctgcctggtgtccctccagatgcagcagcccgcccaggcggaggtgtcctcggctcaaggtgagcatctcgtgcagccgccacccgagaagcaatcctctaaagactcttttctaggcactcccctgagcaatctctatgataatctgctgcagcgcgagtacgccggacccgtcgtctttcccaaccaccaggtggagcgtaaggcacagcgctcaccctctctgcgcctgcgattcggacgcagtgatccggacatgctgaacagcattgtggaaaagcgttggttcggcgacgtcaaccagaagcccatcaggtcgccatccctgcgtctgcgcttcggcaggcgggatcccagtctgccgcagatgcggaggaccgcctatgatgacctcctggagcgggagctcaccctcaacagccagcagcagcagcagcagttgggtaccgagccggactccgatctgggtgccgactacgacggactgtacgagcgagtggtgcggaagccacaacgacttcgctggggacgcagtgttcctcagttcgaggcaaacaacgcggacaatgaacaaattgaacgatcgcaatggtacaactcgcttttgaactcggacaagatgcggcgaatgctagtggccctccagcagcagtacgaaattccggagaacgtggccagctatgccaacgatgaggacactgatacggatctgaataacgatacgtcggagttccaaagggaagtccgtaaaccaatgcgcttgcgatggggcaggagcactggcaaagctccgtcagagcaaaagcatactcccgaggaaacctcatccatcccaccaaagacacagaactaa

SEQ ID NO: 33303 - protein, 300 aa, DROSOPHILA
MFHLKRELSQGCALALICLVSLQMQQPAQAEVSSAQGEHLVQPPPEKQSSKDSFLGTPLSNLYDNLLQREYAGPVVFPNHQVERKAQRSPSLRLRFGRSDPDMLNSIVEKRWFGDVNQKPIRSPSLRLRFGRRDPSLPQMRRTAYDDLLERELTLNSQQQQQQLGTEPDSDLGADYDGLYERVVRKPQRLRWGRSVPQFEANNADNEQIERSQWYNSLLNSDKMRRMLVALQQQYEIPENVASYANDEDTDTDLNNDTSEFQREVRKPMRLRWGRSTGKAPSEQKHTPEETSSIPPKTQN

SEQ ID NO: 33304 - DNA, 4758 bp, DROSOPHILA
ttttttttttttttttttgattggtttattcaaaatgagttcgtttattccgattaatatcagtattatgaactcggaaaaatgtatactgacctattttaataatttttaattgcacttcttcacgagttgagatgaaagtgtcgattaatagaaagactttgaaaatacgttttgcaagttttttttagcatttctatttacagctttcattttcaaattgagcaatcttggtgcgcatcatcactaggaggacatccaaaattatgatagttagtcatttatagattggtcaaaggattggttaaaggttcagaacacgttcagaattccttactcatttttgataaaattgtgaaggataattttcaagaacaacactttaaaatgccataaagaatatatttatttatataacaataagacttccgatacaggagttccgaaatcgccaggcggtaattaaaaaaagagaatggcgcactttacaactgcaaagtttctacattacgtttacatttcacattgcttaacggtatagttgtgagcaacggtattttttaggggatttcccgccactatggacatttaccgttcgcttgcaagcggtcacacagttgttatttttgtttattattatcgcgtcgctcgttgcgcgctggtttattttttgaaaagtgcgttcctagcgcgagtggtcagcgtcccaaacgtcgtagattccatcgcctgagccatcaagaactaaatatttccttacataactgcggaatacttcgactctgcagtaagccacgcgacggaaggcaatcaacaaagacacgcaagtgcttgcacactgggctattatgcaaattgcgccactgcagctggtctaagattgcaaggaagggcgacagagcaacacacacacacacaaagtgcctgggcagaacgagcggaaccgcctccccaatcagctgtgatctctgcggtcgggcctccatcgagtgggcggagaatgggcgggatggggggcggcgggctgctggacatctacgccatggcctgggagcacctaagacccggaagctcgcccgtcgactggtgcgaaggcaactacttgatttcgtccaacatcgccgagttcgtgaacacggtgcgtatgtgcgatttatttaacgttgtatgtaatttgtgcgctctgctttcgctgccccacttagttgtccccgcagtggtcgtagttgctcttctcaccccttcgcagacagctgctagttttccctttgaataggccttgacctttttagagcgagaccgactggcaacgtaaacaaaagatgctgtttgccacgctttgtttgcgttggtgtgacgatgggctgggggtgggggtcattttcgcacccggaaaatgcgacacccggaaaattcagttttcttatcgccctgagcttcacacctgtccgatcgatataaaacttggtattgcggacagggcaaagcataatgaacactttgtcctcggactggaaacttgtgtctcttcagacttggccgctacacggacttcaaactaagtcctgcaagggctagcttctctcatttggttgttatcatctctttcatatataatatgatttatataactactttgaacccggctgtccgatgttattagatttgaaatatgtagattatacgctcgcgatttcatttagttagtcagccgtttgcatttgtcattatagtaaaacagcctaaacaaatagctgtgctggtggtaatgaatggcatccgcattaatataaacgttcttacaatcgtaactcgtaactcaatatgtgacgggctcactttcattaggccttatcaaggttaatcgtctgaagctaaccattgatagaaacgctgtttacgaaaacaacgcactaaaagtggatcaaaacaacattttttctgatattctaattaacaatataagtaagtgcaaactctaaattcgtaactaagattaagggaaatttctttattgtcgtatctaatctcaattagtttctataagatgttcgaaatgtaaataattttccagcctaatagttttttgaattcccagcaagaaatagaacgttctcaaagtgaactcaagtccaaaaggttatcgtatttccccatatttccccaacacgatgacaatagtatgtcgtaatttacaatcttgcgtttcaaatagaacgcagtatcatcagttcggtcaatgtaaactggggagccttaagttactttgtagaacggcctttcatatggtgcagatacacttccgctggctaacgataatgggaatggcttttaattgatttggtcgacatgagtaatcgttcgccgtggcccattgaagtgcacaacgcatttcggctttgtttcaactgagttgttcgcccagcaaacggagtgaataaccccgttcttgacactctgctgcacaataaccagcggcacttgtgttgatgaaatcgttaatatctctatagtgggaagtgtgaataattgcggcatatcccagtttcttatcactcactggttttaatagtatacgcatatgttaatgctgatccatgcaccctttagatgtgataattgctccacttctcgtccaattgcccactcaaaatgatttctgttcattcaatttgttcacacatttacgtgacacagtgcaaattgcccaagtgacacgtaaatgttaattatttagacagcccacagggagctatagcaaataggaaacattgtcataaaactttttaagaaaaaagataataatttccatttatttcatactccgattactaggagattaaagtgcatagaagattagctgaaaagtatataacaggtagagtaaagcatttccgaccttagaaaagatatatattcttgatcaggattactagcgtacgtatgaacttcaagatctcgtaaaatagaagatagatagaaaagagattctgattcttctttcggatgcagattccgttccgtgatattttgaatgatactttagctaatcaatacaaatctacgtgccaagattggttttatattttaagcctctttaaagttatcttatagtttaatgtatattatctgcttgctacaagagcaaagtagagggtatgtaatagtcgcgatacttgatcatggcgttcccccctttttaatttttattgatatataatcaacccatttacattgaaggaatgataaatattaaaaagtcgttctacttctttttgcctcaacagtttagcaacttcctgttcatcctactgccgcccgtccttataatgctcttcaaggagtacggacgctttgtgacgcccggaatccacgtcatctgggtgctgctcatcgtggttggcctgagttcgatgtacttccatgccactttgagtctgattggccagctgctggacgaactggccatactctgggtcttcatggcggccttttcgctcttctatccgaagcgatactatcccaagttcgtgaaaaacgatcggtaagcactgtgatcccctgacggctggcactatctaaatcccccgactttcggtttcctttgttcccccagcaaaaccttcagttggctcatgctcttgtcggcgattgctgcgacgggcttgtcgtggtggaagcccattgttaacgcctttgttctcatgttcatgagtgtgccgaccatggtaatgctctacacagagctgcagaggtaagttcacctagacgatatacacaactcgtaaatctgagggtcttaccgataagcaggcggctctgatttcccgcctggtgacccgaaattaaccgaaaggcccataaatcatgtatcctaacatcactcatccctgctatcacgtatgcttttttgttttatctttgggagccaaaactatttcaaccttatcagcacctatttaatcagctttattttctttgtcatcgatgatatgttatggttcgagtaggtcaaaaatcaaaacgaaggggtgtttccctgcactggcattgaatgtttgggaccaggcgtcggtgcatcaatcaatcatgtcaatcgatttcagtgtgtaattaagataaacctggagtagagtactctgctcgagggcttattgtttatattggcttaggtagtcaactggccactgattatttcctttgggacttacagttgtcacaaagtttcgtaatgtatgacgtatctgggttgcaactgagtaatggatttatacccttaaattgaatgtaggaaactatagaaaaagtaacgatagatatagtgggtacacaatggtatctttctttccttattatgaattatacaatttaaccagtgctaactaggcctacttaagctgtccttgcaaatgcaatacttcttggcattcttgcgatttatacagttggcatcattcttgtaggaggtcaatcgacttagctcctcgacatcgaagtgaagaagcctttgggttcgactattccagcgcacagtggcctcaaaaattgggtttttcgggacagtttcgaaaacaatgatgtaaacttgctcgtttttatcagccggccgaagtccgttggacaggatggttttgcgatctgctttctccacataatccaatgtgaaattgtggcaaagatcgctgagattatggctaattaagtgttcgttcattcgctggacaatagcctcggcaattgtgctcacatgcggggaat

SEQ ID NO: 33305 - DNA, 537 bp, DROSOPHILA
atgggcgggatggggggcggcgggctgctggacatctacgccatggcctgggagcacctaagacccggaagctcgcccgtcgactggtgcgaaggcaactacttgatttcgtccaacatcgccgagttcgtgaacacgtttagcaacttcctgttcatcctactgccgcccgtccttataatgctcttcaaggagtacggacgctttgtgacgcccggaatccacgtcatctgggtgctgctcatcgtggttggcctgagttcgatgtacttccatgccactttgagtctgattggccagctgctggacgaactggccatactctgggtcttcatggcggccttttcgctcttctatccgaagcgatactatcccaagttcgtgaaaaacgatcgcaaaaccttcagttggctcatgctcttgtcggcgattgctgcgacgggcttgtcgtggtggaagcccattgttaacgcctttgttctcatgttcatgagtgtgccgaccatggtaatgctctacacagagctgcagaggtaa

SEQ ID NO: 33306 - protein, 178 aa, DROSOPHILA
MGGMGGGGLLDIYAMAWEHLRPGSSPVDWCEGNYLISSNIAEFVNTFSNFLFILLPPVLIMLFKEYGRFVTPGIHVIWVLLIVVGLSSMYFHATLSLIGQLLDELAILWVFMAAFSLFYPKRYYPKFVKNDRKTFSWLMLLSAIAATGLSWWKPIVNAFVLMFMSVPTMVMLYTELQR

SEQ ID NO: 33307 - DNA, 2618 bp, DROSOPHILA
tcatcatcgagcattttacgggcctcaagccccgcgatgacgacctgaagtgggccaagaaactcacatagtttcactgcccagcgactgtatataggtaacttggaccaaaagcagcctttaattgctgaatatgtcacctttaaatgttttcatacaatcggaatgtcttacagaatgaagtagctttaaatgagacaagattgcatacataaggtttatatggttaatggcatagttctcagttgcatgtttgttaaaaatagttgattatctgagtttaagttcgtgtttttaaataccatattactattgtacacctgcacacactctcacaactgagcgcataaactaattgatctcgccacaggttgatcgtactacgagtgagccttaagtatacctaaataataaaatgaacattttactaactatcgagcacacgcttgtctgataaattttttaagatttacacacaataataatactcgatataacatatgtaagctaggcgagtaactgattttgaaccaggtccgagacaaaaagacattttaatactgtcaacaaacgctggttatcaaaggctataaagtgaataaatttatttacaactacatacatatacattcaaaagataattaaataaggcgctgtatgcaatcaaatacgtgacttaacctttgccttaaaacgtttttatagtataaactcttctggagaagcgaattctgttttagttggcacacttttagtggcgagtgttagtcattgtaagagaccagtttgtatattttactttttcattgtttttaatttcatttacaagaattaagagtaatcggcgaaccgaagaggtgttcttgcacaacgctgtaattctaagaaggcaatattctttgtgatctgagaaaataaatcaataagcttaaaatcttttatttatgcataaagcttgccattaaaggggcacatacaaatatttgtaaaataaaaggcatcacgttttggtagccttgtttacgttcctttggagcttatctctcttcttttgggcatctctctcccgggcctttgtccacatggcgatcttctgccgggtgcgttcctcgtgtacagccacctccatttcggcacgggcttggtactgtcttagctgggattcgttgtggaggaagaatggcctacagctcctgcgcatccagctcttgcagttggcggctctatttaatttctttttttgaggtaaaacggatggagcttcctggggttccggttttggaagctcaacttcctttaattttatgtttcggcgcttcattcgacacaagagaacgaaaagaagagcgattgcgcaaagggccagcaatagacccaccaatcttccgggatcgagaccctcctccccctcatccagatcatctaggtcatccaactcatcgccctcctcatcctcttcagacacttccttgcccaatgcccgcttgagccgatggcaatctaggacggtcatggcttccacatccgccttatagacaacaggggcattgtctagaccccaatggggcaatgtattagttttgaagagatcccgacatttggagtatacctggaccatccatttctggcactcaggcctattgatatcgacttggcaaatcggattcataatcattgagatgggcagaacaaattttttttattaagcagttgattacattttgatatcccacttagtttcgtaattttaaattttttattaattttaaattttctttctttaatctgaattgcaaactaaaatccttttaatagcttaagttagggctgagccttatcaccattcaactaagataagagaggtaattgtatgcattgatcatcaatagactcctgcaagcaatgagcgataccccacaagtttgaagaggtcggaaaagataataaccggaaaactcagaccacacttatttagttttcatatgcaataataaaaaaaacatgtaacgcagtatgcgcactttcatatataataatcgtggatagatgtaagagaaaatagtgatgtgaacaggtatgaagaaacgtaaaataaatttagaaaataaggtaaaaaccatgaagtaaacagaaataaaacaaaacacatttgaattcaaacaagcagcgcgcgcactgtacggcaagagagggtcactctaaccaaaaagtagatcgggcacactaatgtgttccaaatgagtcgagatatgcggtcacaccaggccaagccgctatataaagcggactacagcctttcgaagctcacttcagttcagccggcagttggcaccggtagactgttgtgagccccttaactactagggatgtcgtgatattatagaaatatcgtatcgatgatacgatatcattatcatcatcgtatcattaacttaatatattacatagatgtagatgggtcggagttttcattaattatctgaacatctgacttgaaactctttaccctccgtaaaggatttgaggaaggcgaagtgggaactaggaaggttcatctttattttgaagtggagaccagggtgccagactttgtcaaacgccggtttgatgtccagcat

SEQ ID NO: 33308 - DNA, 618 bp, DROSOPHILA
atggtccaggtatactccaaatgtcgggatctcttcaaaactaatacattgccccattggggtctagacaatgcccctgttgtctataaggcggatgtggaagccatgaccgtcctagattgccatcggctcaagcgggcattgggcaaggaagtgtctgaagaggatgaggagggcgatgagttggatgacctagatgatctggatgagggggaggagggtctcgatcccggaagattggtgggtctattgctggccctttgcgcaatcgctcttcttttcgttctcttgtgtcgaatgaagcgccgaaacataaaattaaaggaagttgagcttccaaaaccggaaccccaggaagctccatccgttttacctcaaaaaaagaaattaaatagagccgccaactgcaagagctggatgcgcaggagctgtaggccattcttcctccacaacgaatcccagctaagacagtaccaagcccgtgccgaaatggaggtggctgtacacgaggaacgcacccggcagaagatcgccatgtggacaaaggcccgggagagagatgcccaaaagaagagagataagctccaaaggaacgtaaacaaggctaccaaaacgtga

SEQ ID NO: 33309 - protein, 205 aa, DROSOPHILA
MVQVYSKCRDLFKTNTLPHWGLDNAPVVYKADVEAMTVLDCHRLKRALGKEVSEEDEEGDELDDLDDLDEGEEGLDPGRLVGLLLALCAIALLFVLLCRMKRRNIKLKEVELPKPEPQEAPSVLPQKKKLNRAANCKSWMRRSCRPFFLHNESQLRQYQARAEMEVAVHEERTRQKIAMWTKARERDAQKKRDKLQRNVNKATKT

SEQ ID NO: 33310 - DNA, 3108 bp, DROSOPHILA
gtcactctaaccaaaaagtagatcgggcacactaatgtgttccaaatgagtcgagatatgcggtcacaccaggccaagccgctatataaagcggactacagcctttcgaagctcacttcagttcagccggcagttggcaccggtagactgttgtgagccccttaactactagggatgtcgtgatattatagaaatatcgtatcgatgatacgatatcattatcatcatcgtatcattaacttaatatattacatagatgtagatgggtcggagttttcattaattatctgaacatctgacttgaaactctttaccctccgtaaaggatttgaggaaggcgaagtgggaactaggaaggttcatctttattttgaagtggagaccagggtgccagactttgtcaaacgccggtttgatgtccagcattatggcgcagcagtattgctttctttcgaacgtttccagtatgcgcttaacaagccggtggcattgctctggtgttccatggcagcgtctgaatccaaactggggatcagagcggcatcttccagtactggcaacactctgcgcaaaaatactctttcgcgtattttggagaggatttccagcacgataaaagcctagattggcttcaggtttaccaggcttgaggatggtgatatcactttggcgcgtttccagtgtttcgggaagtaccctagccgggaagcagctgttgaaaatgttggccagcaattgggaacaaaatcgatgagatcagggcctggagacttgccgttccttagtttgaaaaatggagagtatatctgcttggttggtcttgcaataaagctcgtcctcgggtttgttgttgataaggccgtttgcattccagatggtgatgtcttgttccgtttgcatagggtcttgcagacggttgccatcatctgagtcatttgactcatcgccttctccatcatactttcgaacatggcttccatcctgcccattattgtttccatcagttgtcagcattggcctgtggttgagggatggcatgaatcccatcaattgcctgcttggttgcgttggcataactaaagttagaagtaaccttgctgctgctcacggtgtaccgggcgcgtggagctgccgcctgctttggagcgaacatgcttttgaccttcttatatgcggtgcaaactttatatgaggctgcatgtagtccttcgctttgcaagcaatgggccggcatattattatttttgcactcaacggttgggtgaccgtcttcgcacttgacacacctgtgatctaggtggcagtaccgttgggtatgtcccaatccctgacacagatagcattgcggcaagtcattaaactttatcgtggggtaaatggtcaccactgagatggagagtcgcgtaactttataggcctccttgttgttcttggccggctcgagattggcaaaaaatatgttgagaggctttttggtacttctctgggtggggttgtagaagtctctgaccttgtgtccgtgacggtttagcccaacccgaatttcccctaggtccgttgaatagtgaagacctttgatgactactctgtaggcgctttcgtctcgggctggaaggtttgaaaccttttattggacttggtcaagaagtccttcagggcggagaagctttccttctccggggtcatcacgcgaacgttgttgttgcttgtcgtattaaatggaactccacgtctttgccaagcactccagcaatgctattaacgagagccttgatattggtcacatccggtatgaagattggaggcggcttgattgccttaggtttctccatttccttctcctggagaggagtcttggctggcagatcgtcgaacatctcatcgtcgtcatcgtcagatgacagaatcgcgaagctattatccgctagagcagcttggtggtgggtgggtgtggtgggtccgtctattggatgagagtgcttgaccagattcttcctttttaccttgactggctcgagtgtgtcgtaggagtccgaagaggaggagttctttttttcctttttcttccgtttgatgctagtcgcaataggcactgcttgccagtccataataaaggagcagcctgaagcgccaactgttggagctttacggaactggttgacaccctctggcggaggaattttaaactatagcgacagctatgtcgatactggttctacggtgcgaaaatacgaacgcacaatgctcacacagcacacaagcacacagaatgccaatttttacggtttaccgtttgcattctctttctactgataaaaacgcacgcagacaactaattttttcatttagtaaatggtattctgcttttgagcagaatttaaaaaaaaaattttttttatttattaaggcatatggggaaatcttggagcccctttgtgtccttcttttctattaattcatttgggcgcgccggctaactatagttagctttttctagtttacaataattttactacaatgacccttgtcaaaggagatcgggaaatgagatccctcggttgccttctattgagcctccttggtgggcgagatctgtttagagcgctggccagccgatttctgtggcgctccaacctgtcatggtacctgcttgagtgctggtttatctcgtcaaataccgttgcgagtttcaggtctctgtgcagggtggtgtttcgcacataccactcgcagccggtgatgagtcttgctaccttattttgaatagcctggatcctttttatttggctatcgcatgccaagccccagatttggcacccatacttccagtttggtgctaatatctgtttgtaaattgtcagcttgttggatagcgacaatttactgcgcgaacaaagaagtagtagtagtagtagtagtgcttcgccaccttagcacgtaggcgtgttctgatttcagtcacatgcttggcaaatgtgagtctgcgatccagaagcactccaagctactttgctgcgttcggctgtggtactggggcttcctcgatgtagacgggcggtggcggtccgctttaaagtatagcagacgttgttgaatttactgctattg

SEQ ID NO: 33311 - DNA, 1005 bp, DROSOPHILA
atggactggcaagcagtgcctattgcgactagcatcaaacggaagaaaaaggaaaaaaagaactcctcctcttcggactcctacgacacactcgagccagtcaaggtaaaaaggaagaatctggtcaagcactctcatccaatagacggacccaccacacccacccaccaccaagctgctctagcggataatagcttcgcgattctgtcatctgacgatgacgacgatgagatgttcgacgatctgccagccaagactcctctccaggagaaggaaatggagaaacctaaggcaatcaagccgcctccaatcttcataccggatgtgaccaatatcaaggctctcgttaatagcattgctggagtgcttggcaaagacgtggagttccatttaatacgacaagcaacaacaacgttcgcagtagtcatcaaaggtcttcactattcaacggacctaggggaaattcgggttgggctaaaccgtcacggacacaaggtcagagacttctacaaccccacccagagaagtaccaaaaagcctctcaacatattttttgccaatctcgagccggccaagaacaacaaggaggcctataaagttacgcgactctccatctcagtggtgaccatttaccccacgataaagtttaatgacttgccgcaatgctatctgtgtcagggattgggacatacccaacggtactgccacctagatcacaggtgtgtcaagtgcgaagacggtcacccaaccgttgagtgcaaaaataataatatgccggcccattgcttgcaaagcgaaggactacatgcagcctcatataaagtttgcaccgcatataagaaggtcaaaagcatgttcgctccaaagcaggcggcagctccacgcgcccggtacaccgtgagcagcagcaaggttacttctaactttagttatgccaacgcaaccaagcaggcaattgatgggattcatgccatccctcaaccacaggccaatgctgacaactga

SEQ ID NO: 33312 - protein, 334 aa, DROSOPHILA
MDWQAVPIATSIKRKKKEKKNSSSSDSYDTLEPVKVKRKNLVKHSHPIDGPTTPTHHQAALADNSFAILSSDDDDDEMFDDLPAKTPLQEKEMEKPKAIKPPPIFIPDVTNIKALVNSIAGVLGKDVEFHLIRQATTTFAVVIKGLHYSTDLGEIRVGLNRHGHKVRDFYNPTQRSTKKPLNIFFANLEPAKNNKEAYKVTRLSISVVTIYPTIKFNDLPQCYLCQGLGHTQRYCHLDHRCVKCEDGHPTVECKNNNMPAHCLQSEGLHAASYKVCTAYKKVKSMFAPKQAAAPRARYTVSSSKVTSNFSYANATKQAIDGIHAIPQPQANADN

SEQ ID NO: 33313 - DNA, 3347 bp, DROSOPHILA
cgccagacaaagccgcccggtgcattcaccactttcggcggtttgcctctaaagcgcaaatgatctgggctacttggtacctattccataggattatgttcatactcatggaaaaatatataaatattagctattattccatttctatgttctatgttctagatcgaagaggacactcttcatgattctccatgttgtgccccctagttgtgcctcatagttgtgcctcttagttgtgccaccaagttgtgcctcctttatgtgccccataacccgtgctgatcgaaaggtcatgccataccgtgtaatgccacggaggttcatgtacttattttatttttaaaccctgtcgctgcgggcatgctgggaaatcggtcgtaaagacagagtcggagagcaggttttgcggttaatgcgataatttaattgtaatgcgggtctggagtcctgtgcgccaataatttaacttgcaatcagcgcggcatttattgggttaaacatataagccaagcgaagaagtcggagggcgaagacgcatacttgcatgcccacggagtgaatgaaccccaaggatacgcggctccggctacagatacaactacaggcacagatacgcagcgaaagggaaaaatgaaagagtaggacccaaaggagccagaggatggcaaataaattcaacgatttctgtcctgcgtgcaataaggggtctgaagcagtcagttgggcattttcgcacgtaagccacgaggacgatgacagcaatgaaatatgcaagccaggtctcagtatccaagcatttttccaagaacgaggcgtacatgagtcagaagttgaaagccggctgcggggtgaagatgagtaaaaatccgagttcatgttgaaagccaaacatttataaacttccacagcctagcaactgttgctagggagggggcagctacatggattggcttccaaaaccctttgtctcgccgggcaacacatttcggtattagttgccatgtcgcaaggacacacggcggagcaattgctggagctgcgacgcatcctcctgctgaccgtctataggaacacattgaatcagcttgtactgcagcagcgttcccagcgcttaaatgccaggaaaccgctttcactgccggcttctcttcgcaggcgacgcagttcgtcgatgggggagcaggagaggccggaacgtgtcctcattacgggcaaggtgctgcctagactggaatccctgctcggtgagcaggagaacgatgccgatctgcttgatgaagatgtcctagatgcactgaaattcgaaagggatatggatgccctgcgagcgattttcgaggtagccatgaatgatccggatttggcagagaaaaattatacgcaggatcaggatgtagaaactaaaagggagaaagaaaaggatctagaaggtgaagatccgcaggattctgccgatatgaaaattatgtgtctgaaaattaatgaaaatcttagactccttgaggatgaacagttcgaagataagaaggatgcatttaaactagagacaattgagtccttcgatgacaaggagatggcaaaccttgaggtgaaagtggcggaaagtccttgtctcgaggataagggtctggaaaacattaggcaagcgatagccgcgttgtgtggcaacaagagtgaggagtctcaggctgcccagcagctacaggagtccaaggatgaacttaaaaaactcaaggaggacctcgaactcgaaaagcgtgtcaccaaggaaaagctacaggacctggaggaacgcattgccgacaccaagtacaagttgcgctgtgtctcccgtgtcaatgacctcgagtacagcttggtgcagcgctgggaggagggtcgtctggcccaaggaaccatttggggtgagaatgctgagcgtgcctacctacgcgacattttggacatcaagcagaagctggcacgtgaggagcgcgtaagcgctgagcttcgctccttccgccagcgggaaatactggagctgcaggccaggattaaggagtggcaggagcggtatgtcagcgagatgcgacgggtggatcgcgaagctgaagcctgggagctacgcatcctcgagcagaagaagctgctgcagaagcacaaggagatctacgaggagcggatgacctatgtgcaggaataccgcgcccaaaaggaggaggagcagcgactcctcgacctgcagatgcaccgcatccagtgcgccgtcagattgcaggcctggtggcgtggaaccatggtgcgacgcggtctgggaccattcaagaagaaaccgaaacgcggcaagcggggcaagcccaagaaataagggattatagatagtaaatacatctaaatcatgtcagttaatgaaatatccagatatcttgttagctatcaactttactttttaagcgtaggatcgattttactttccttgctctgtttttcctgcattttccctgtgcttttctaccttattttttctccactttttttgagctttacccctgctttatggaaattaacttgtgacttaaaaccaattaaaagttggacgcgctgcagttaacacgtcagcggtcgcccttaatgacatgccgccagtgtcaacaggcacaactcgagaattgtttacgcgatgcgataataatgctccaagtggaccagtggatggcgtactgtactggtgaccacccattcggcggcaggagtgagcagcagttgaagttgcagctggagttccattgtttcagcactttatttgttttgcccgccgtcgtttcttttcttcgccgcatttatttatcctttatgccgggcaatggccaaaagtggtttatttgttgcgccgcattcattggcaacacaaatgggcggctcggcagcccgtggggcatggcagtgtgccactgcgactatatgcattttgttttcgatgcgtgcggaggagataaactgcgacaatttgctgcccggtgaatgagtggaactttttcacttcgttgtcgcagaaaaaaaaagtgtggagggggggggggggtgcacaaaaacaaaactttcccactggagtgtgccagtgtggacattgcaatttaaaatataattaatggtcgttgccgtaatttattgaatttgcatggcacaaggcatggcatggctgtcatttcttgtttgccgtttgccagttggaggtccctgttttgcgaatgtccttgcgagccgaacggagtgtccgcacatgcactcacttttgttttaatgcactccgcccggtcggtcgtggccgatccttcctcggcattgttgctgcctggctggccggtggt

SEQ ID NO: 33314 - DNA, 1347 bp, DROSOPHILA
atgtcgcaaggacacacggcggagcaattgctggagctgcgacgcatcctcctgctgaccgtctataggaacacattgaatcagcttgtactgcagcagcgttcccagcgcttaaatgccaggaaaccgctttcactgccggcttctcttcgcaggcgacgcagttcgtcgatgggggagcaggagaggccggaacgtgtcctcattacgggcaaggtgctgcctagactggaatccctgctcggtgagcaggagaacgatgccgatctgcttgatgaagatgtcctagatgcactgaaattcgaaagggatatggatgccctgcgagcgattttcgaggtagccatgaatgatccggatttggcagagaaaaattatacgcaggatcaggatgtagaaactaaaagggagaaagaaaaggatctagaaggtgaagatccgcaggattctgccgatatgaaaattatgtgtctgaaaattaatgaaaatcttagactccttgaggatgaacagttcgaagataagaaggatgcatttaaactagagacaattgagtccttcgatgacaaggagatggcaaaccttgaggtgaaagtggcggaaagtccttgtctcgaggataagggtctggaaaacattaggcaagcgatagccgcgttgtgtggcaacaagagtgaggagtctcaggctgcccagcagctacaggagtccaaggatgaacttaaaaaactcaaggaggacctcgaactcgaaaagcgtgtcaccaaggaaaagctacaggacctggaggaacgcattgccgacaccaagtacaagttgcgctgtgtctcccgtgtcaatgacctcgagtacagcttggtgcagcgctgggaggagggtcgtctggcccaaggaaccatttggggtgagaatgctgagcgtgcctacctacgcgacattttggacatcaagcagaagctggcacgtgaggagcgcgtaagcgctgagcttcgctccttccgccagcgggaaatactggagctgcaggccaggattaaggagtggcaggagcggtatgtcagcgagatgcgacgggtggatcgcgaagctgaagcctgggagctacgcatcctcgagcagaagaagctgctgcagaagcacaaggagatctacgaggagcggatgacctatgtgcaggaataccgcgcccaaaaggaggaggagcagcgactcctcgacctgcagatgcaccgcatccagtgcgccgtcagattgcaggcctggtggcgtggaaccatggtgcgacgcggtctgggaccattcaagaagaaaccgaaacgcggcaagcggggcaagcccaagaaataa

SEQ ID NO: 33315 - protein, 448 aa, DROSOPHILA
MSQGHTAEQLLELRRILLLTVYRNTLNQLVLQQRSQRLNARKPLSLPASLRRRRSSSMGEQERPERVLITGKVLPRLESLLGEQENDADLLDEDVLDALKFERDMDALRAIFEVAMNDPDLAEKNYTQDQDVETKREKEKDLEGEDPQDSADMKIMCLKINENLRLLEDEQFEDKKDAFKLETIESFDDKEMANLEVKVAESPCLEDKGLENIRQAIAALCGNKSEESQAAQQLQESKDELKKLKEDLELEKRVTKEKLQDLEERIADTKYKLRCVSRVNDLEYSLVQRWEEGRLAQGTIWGENAERAYLRDILDIKQKLAREERVSAELRSFRQREILELQARIKEWQERYVSEMRRVDREAEAWELRILEQKKLLQKHKEIYEERMTYVQEYRAQKEEEQRLLDLQMHRIQCAVRLQAWWRGTMVRRGLGPFKKKPKRGKRGKPKK

SEQ ID NO: 33316 - DNA, 2294 bp, DROSOPHILA
aggcgaacgattaacaagcaaattagcatgaaattatttcaaaacaggcgcacacagtaaataaatcaattagctcaacaacaaaaaagagcaatcagcagcagcaagtgccgagcttcggcttcgaaggaggtcgcgacagctgcctcattggtaaacaaaagcaaacaattaaaagcttttccagcatatgcacaacacattgttgcacttgggaaaacaaacgccataatgaggaaaactcatttgccaaacttttatcctaaaaatggctatgaaatttaaactgggggattacaattggattagaatttacgcatatatgcactctgaaactcacaaagctgaggaaatctatttatttatttagaaacatttattaataatttcttcgtattttgctgaaatgtctcttaaacaagctcttttttctgcgagtgtgggtgggagtgtaggccaaaaaattgggccaaagtgcaagtcaacgcgacggcgagttcccatgacttggcatctgcatatgcacttgtcatgttggggggcgttcgaaagttgcgcttgatggcaaacgcagatgcagctgcagatacagatactaagatatctgcatatacttcagatacgcgccggcaggcaggcagctgcacttgccccgtcacattattttaattatttgtttacgcaaggccaacaaacttgctggcggcacttgtcttgtcttgtttctgcatcatcgttaaaagttacgagctgctgtttttgagctctgaattccgagaactgggtgctgactgctggctgctggaagctgggaactggccgaaaacaaagccaaggcgcctaattagccttcgcgcttcggcgtcatgcgaatttgtcaaattaagcagcagacgctgcgcactagctccaatgagtcagctgttcggcatggcagtgtcagaattaacgttccccaaaatgtgcaggcaattatcgagaccagcgctggcagcaaaaaatgaagcagaagcaatgtaaatgcgaggaccaactggccttctggccaggcgaaatggaggagatgcaggatgcgcggcgccaacatcatctgctggagaaacagcgaaatgaaaagtcccgaaaccgacatggggaaatggggaaatggggaaaggagggcaaggagggcgaagacagctctagtgaagcgacactgattaaaaaattgtttgacaagaaatcagcgcgacatttgtccaactggcgagtggaaaatggagccaggagactgcagtcgcctgtcgcctgttgactgcctctgccatctgtgggataaaaaacactgaagtgtcgctgttaattcggcgcaaatttaattgtcggctataattaaattgattttcactccggtagcaaactgctgactggaggcattgctcgaatgactgccatgcgttggcccaaagtggcgcccaatcaaccttcatttcgcagtcttgcttttcattttggcgcctacttattttctcttttttttcacaaaatttgatttatttaaatcggaattactgggctctctacggcaaacattaacgaatttttctgtttctgtccaaatccaaatatgtccctgggcccccgggtttccccagaagtattgtatatacaaatatatatatatatatttttttttttggtgcgtgggcaacgaaattaaattgcattaaaaacacataaaaatattttgggccagctcgtgtcagggggaaattttcgaagcggcaaagaaaccattgaagtgtatagtatagtgtaaatgtgtgtatgggcctaagttctaaatcggtggtacctagcacagagtcatgggctagggggtttctaagaattttccaattgggtcttcgatctataaatagtttatttccttagtaattaaacaagactgccatttaaacttcattttgtggtgtccaaaataattgttgggaatattcccttctatctagtttggtactacgcccctgacctaaccgtagtgctcagatgccagagggccgagttttgttgtgcgttgtgctgtttcgaaaaactggcacaaattcaaaaatgatttttacgcaatttaacgacaacttgaaaaagaacgcactataaataaatagcccgttttgctgtgctcctactgctgctgcctctgacatgagtcacaaaaggcaggcggtcggtcgctgtcgcatgtttacctacgaaattcgccctgtgcattttaattgaaaataataaacacgcgtgtaaataatgtgccatgc

SEQ ID NO: 33317 - DNA, 294 bp, DROSOPHILA
atgaagcagaagcaatgtaaatgcgaggaccaactggccttctggccaggcgaaatggaggagatgcaggatgcgcggcgccaacatcatctgctggagaaacagcgaaatgaaaagtcccgaaaccgacatggggaaatggggaaatggggaaaggagggcaaggagggcgaagacagctctagtgaagcgacactgattaaaaaattgtttgacaagaaatcagcgcgacatttgtccaactggcgagtggaaaatggagccaggagactgcagtcgcctgtcgcctgttga

SEQ ID NO: 33318 - protein, 97 aa, DROSOPHILA
MKQKQCKCEDQLAFWPGEMEEMQDARRQHHLLEKQRNEKSRNRHGEMGKWGKEGKEGEDSSSEATLIKKLFDKKSARHLSNWRVENGARRLQSPVAC

SEQ ID NO: 33319 - DNA, 6187 bp, DROSOPHILA
catacattttttccagcgtttttttttgctcgctctctaatcccatttacttgcgctgaaaatcatcaaagagcggcaaaaaacgacagcaaaaaaaaaacgtgttttcaagtttatttcgcaaaaaaaaagcgtggccagagtatggtgtcgcttaaaattaagccataaaggctgatccgatcgagttcggaatttaaactgcataaaaaaagagcagagagcagagagcagagctctgctgctcggggcaatttaaacacacagttttgctttaaggaaccagataacgaggcctccaaacgaagcgacagccgcattattgtacaggtggagcaaaaataaaagaagccgctcaggcggaaacaatgtggaaattttacaggttgccctgttaaataaaataacacaaaacatgggcccagcgcacaaattcacaagaaatcatttttttttgtgtcgaatcaaaagcaaggaagcaaaatccgtggcaggagaagccgacaaggaccaaaaaagaaacatcaagctcgacaacggcaaacgacgctagtgtcgacaaccggcgaacggaagcgtagcaaggacaatgcgacaacggcggtacaaggcggtgggcggcagtgggtgtcggagggcgtggcctgccagcaggtgtgggcggtggggcgttgaccgttttcgggtgagcggcggtggcgggggcggcggaagcattgtgttaaaataacaaacaatcagccgaatcatgcaggaagtgcaaataataaataaatatatatcgcactgtgaggcatttctccaggatcaacatcgattgccggcgacagctaataaaataaaagaaaaagcgaataaaaaatacgtgggaaatcaatatgctcttaaaaacacagtagaaatgaacagcgatccataaaataatatttaaaaagggtttcaataaatattatgaaagttatgataattttcccttacagacctttaatgaaatactagtatgataggtataaagataggtttgcgaaatctagaaataatatagcatattcccccccaatattataatttatttatttatgttatgttacttaattttcaggagtttcttcaagtgcagcgctataataaaccttctttatctttcagtacccgctcgattggtttgggccgctttgggcaaaacggtggagctgccctgcgatttgacgccgcccacgtcgcaggattcggtgaagctgctactgtggttcaaggataccacgggcattcctctgtacaggtgagcgaaaactactgctttatatgtgcatacatcccgggggtcactggtgcgcaatcatccactccaaaaagcctacgagacagccatccatccatccgtccatctgtcagttcgtccatccatccatcagtccatcaggagcgtgaaataatcgtcagcatccttttgctacaccttacgtgttattttttcctcgccgaacgcttttggcttatttccggcagctgccacatgtgcgtacaacgcacagcagtgtatgtgtatgtgtgaggttgttttggggcaaggatgcgcccgtcataatccactttgttataataaatgtaaagcacatccgattacggctgtcgttgctaaagtgtagcaaattttcacgcacacacgcatatggagccgtagccatcatgatattttccagcttttttgtttttccataaatttgcgctgataaattttcaatataaattgtggcagccagcgtgtgccgtgcatgccaagtggcaaatgccttccgactttgcgtgccgcagccggcagccgggaaacactcgcaaaactctcgggagtactcattagaaggggttttatggatggcaaaaggggccggatctatgtcagcccaagtcgtgcacgtgaagtggccggtactcgataatcatgagcgggaaaatgcagcacgagcaatggcgctggccaccccagagtactgaaataaactgagtaatttactaaaacagcaacaaattactgcaatttgcgcaaagctgccaaagtcgtggggcaggcgaaggagctggaatataggagcttgtcctggagcactccacactaaactcctggctcatggtgtgcaaattgagcgtcattttttatggacccaaattatgcgaggggcgctgctctcttcgcatatgcttatttatgagatctaataatcgctacatgctgccacgccccctcacttacacttgtactttcacctccccccctatttttcaccttacagtctggactcgcggggcggaaacgtgaagttggcgccacatgcggccatagctagcgatctggggcaacgtctgttcttcagcatcggcgataatcccaaggattcgcgcctgcaaatcaacgatgtgaagccggaggacggaggcgtctatcggtgtcgcgtcgacttcttcaactcaccaacgcgtaacttcaggcacaacctgaccctagttggtaagtagcaatggtgagcattatggaatcgcctgaccgctaaagtggcatattatcttgcctccatttcagtgcctcccgaggagccgcgcatcttcgatgcccagggcaaggagatatcccagatggcaggacccttccgagagggctatgagctcttcctctgctgtcaagtgaggggtggtaagttatcagtttcaagttgcaggctgtgcctgtcaggcagcttttcattagctgcatgctggaaaatattgttttaaaatatttaaattacttatttacaagaaatcgcagtaatatctgaaaaaaatagattaaaaactagccggtttttaagataattaaaaataaaacataaatggtatttaatagtgcaagctaattgaagcctatgttagcagacacaaaaatacattttttttgagtgccataagcaggttaatcctctttaattttaaccccctctttcttttactgtgcactcgaacgaactttacgcggtggtttgacccacttaactgtcatgcgttttactgtgtttgtcagcgccacagcaaccgcagtcagacgcattgtttaccatcgcactcaggagtgtcaattgcaaccggttgcaaggatactccacacaacctgcagcaactcaccgggcgttctgtcctctcactctctctccttgcaggacgacccccgcccaaagtcacctggtggcgcgacgacaccgagctaatcggcaccagccacacatccgtggaggagggcgccaccgtgatggttaatcagctgctgattggaaccaccacgcgggacttctacggaatacgcatcgagtgccgggcgcagggaactcgactggtggatccggtccgcaaggatgtcaccgtgcaggtttactgtgagtcatcaaccccacaatacgtccaataaacatttgcctttcattaaaactccgcgagctactcggcaataaaagttttgcatttcacttggtgatgtgaaaacatacgttgattagctgacttgttgaccaaaaaggtccttttattgaacttcattatatattttatatatgtatatactttatacaattgtgcacttcaacattcgcagtgaaaccggtgcgcgtaaagattgcaactcccaacgaactgctgaccgctggccaaccgatgcccattcgctgcgagtcctggggctcatatcctgcggccaagatcacctggctgctcgacggcgagcccatccgcaatgccgaggtcaccgttcacagcgacaaggaggtgagtaaatgtcctggccaaattgcccgaaaatgtctgactattttatggagcatggagtgcatggagtgggtagctgggtgcggagaaagttttcgttcttgttgtcgttcccaggacatcgcaactttgtgcccggaaaatttgcttcgagcgtttgacatttgatagctggccgcagtgcagcaggcacttctacaacgttcacatcccatataacactgtgcggcacttaatagctccagattctcggggcagcaacaaaggcagccgaggcgaccactgggtgaccctaaatgcgagccggacaaacttttgccgccagccgcagagggatagacaaaaggacgaagggacaagttgactctccaccagccgccgctactttgatgaactgcaatggcgaaaagttttcgccaaactgcacaaatttgcactccatgcggccaaaggccaatgattcggctaatgtgcgaatttttattggaattcatcgtcctttgcgctcgcatctgctggcaaatggtagcgatttttttcccaccaaatcgcatttatcagatcctttcgcctacccactgaaggtatcggagatgtctcagttttcggcatccattagttgccttttttgtggagccactggctttttcgctttctaattatgccatgtaaatggatagttgctgccaaacgttgccaggcattagtcaactcgtgcataaccgactcgacttccaattgaggaacagatttccacacacgaagagtcctgcgcttgttagtttgcctggcccggcatcgattgttgccaaaacgtggctcgactttggggcttggagctggtcgatgtcgtaacttaatacccagtttgccatgagatcctctgctccgcttccacatcgcctaacgaagggctaacgaaggccggggctaacgaaggccgcctatcagacagggacatatggcagatctaagggactttaagtttcaactaaaaatccgaaacatatcacagtaacatgatatatcgatatactgcttattatgctatattttaatataaagaatatggaattcctgtcatcaatgagctcttctctgttgacaaaagccgcttaagtattaagaactaatatttaagattacatttttaccaacgtatcctttagctaatacgccatccttttgcctcccgtttactttccgcaggacgggaatatcacaacgagtatcctgacattgaaggtaacatcggagaacgataatgccgagctgacgtgtcgcgccacgaatccctggttctccggtggcgccatcgaggacaagcgcatcattcgcgtggcatgtgagtacatactccagtatattcctcctccattgcgacaggtgaactggtagactgctatgagcagcagtgtggccggtggaagatgggctgctgggtatttaggtctgggcttgggtctggttgttggctctgaatccgggccgtggccttcggaggcttttgtgtattcttagcacaactgcccaggtcctggcctatttcagtgtgcatgtgtgagtttccgtgagggcttgaccgaggaaagtccaattagacgcatattacggccagagccagcgtaattttattaaggccaaaggatccagaggaggcaacggatccgaaacggagccaaccaagttggctggaggccacatcaacctgttggccacctcttgctaagccgcttataaaatgcagtcaagttgacttcaatgtcgtgttctttgacttgccttgattaaatttgcaccgttatgtttctattgcttacctttatttttttttgtgctggcctctataatatttgcaacatccgcttccgacttccgctttacattactgccccccacacagctttcgttgaagttttcttgtatggcagtgtgcactgggaaaaacaggctaaggattacgttcgtattttaataaggcttatgcttaagttttttgttatcctataagagacaaggctataaaaaactattagataaaagctgcagcttttactttccgtagactttttgattcttataaggaaacgatccttttttcgaggtgtattaaatgaagaaaatctgaattacctgcactcaaatcagaccagcagtcgactcgatttgccagctcttcattttgtgtttcgttttaataattcagcataaaggtcggttatttttttttttttttttttgcgaccgttcagcccacgtcattgacatttgcgagctgtagcataaccactatagttcgtcccgctccacgccaaacttttgaggatggcggacaaaagactggctggggccaagtggcgccaagagtctccggcgcgtattagatttttacaaccgt

SEQ ID NO: 33320 - DNA, 1050 bp, DROSOPHILA
atgataggtataaagatagtacccgctcgattggtttgggccgctttgggcaaaacggtggagctgccctgcgatttgacgccgcccacgtcgcaggattcggtgaagctgctactgtggttcaaggataccacgggcattcctctgtacagtctggactcgcggggcggaaacgtgaagttggcgccacatgcggccatagctagcgatctggggcaacgtctgttcttcagcatcggcgataatcccaaggattcgcgcctgcaaatcaacgatgtgaagccggaggacggaggcgtctatcggtgtcgcgtcgacttcttcaactcaccaacgcgtaacttcaggcacaacctgaccctagttgtgcctcccgaggagccgcgcatcttcgatgcccagggcaaggagatatcccagatggcaggacccttccgagagggctatgagctcttcctctgctgtcaagtgaggggtggacgacccccgcccaaagtcacctggtggcgcgacgacaccgagctaatcggcaccagccacacatccgtggaggagggcgccaccgtgatggttaatcagctgctgattggaaccaccacgcgggacttctacggaatacgcatcgagtgccgggcgcagggaactcgactggtggatccggtccgcaaggatgtcaccgtgcaggtttacttgaaaccggtgcgcgtaaagattgcaactcccaacgaactgctgaccgctggccaaccgatgcccattcgctgcgagtcctggggctcatatcctgcggccaagatcacctggctgctcgacggcgagcccatccgcaatgccgaggtcaccgttcacagcgacaaggaggacgggaatatcacaacgagtatcctgacattgaaggtaacatcggagaacgataatgccgagctgacgtgtcgcgccacgaatccctggttctccggtggcgccatcgaggacaagcgcatcattcgcgtggcatgtgagtacatactccagtatattcctcctccattgcgacaggtgaactggtag

SEQ ID NO: 33321 - protein, 349 aa, DROSOPHILA
MIGIKIVPARLVWAALGKTVELPCDLTPPTSQDSVKLLLWFKDTTGIPLYSLDSRGGNVKLAPHAAIASDLGQRLFFSIGDNPKDSRLQINDVKPEDGGVYRCRVDFFNSPTRNFRHNLTLVVPPEEPRIFDAQGKEISQMAGPFREGYELFLCCQVRGGRPPPKVTWWRDDTELIGTSHTSVEEGATVMVNQLLIGTTTRDFYGIRIECRAQGTRLVDPVRKDVTVQVYLKPVRVKIATPNELLTAGQPMPIRCESWGSYPAAKITWLLDGEPIRNAEVTVHSDKEDGNITTSILTLKVTSENDNAELTCRATNPWFSGGAIEDKRIIRVACEYILQYIPPPLRQVNW

SEQ ID NO: 33322 - DNA, 2304 bp, DROSOPHILA
ccttcggaggcttttgtgtattcttagcacaactgcccaggtcctggcctatttcagtgtgcatgtgtgagtttccgtgagggcttgaccgaggaaagtccaattagacgcatattacggccagagccagcgtaattttattaaggccaaaggatccagaggaggcaacggatccgaaacggagccaaccaagttggctggaggccacatcaacctgttggccacctcttgctaagccgcttataaaatgcagtcaagttgacttcaatgtcgtgttctttgacttgccttgattaaatttgcaccgttatgtttctattgcttacctttatttttttttgtgctggcctctataatatttgcaacatccgcttccgacttccgctttacattactgccccccacacagctttcgttgaagttttcttgtatggcagtgtgcactgggaaaaacaggctaaggattacgttcgtattttaataaggcttatgcttaagttttttgttatcctataagagacaaggctataaaaaactattagataaaagctgcagcttttactttccgtagactttttgattcttataaggaaacgatccttttttcgaggtgtattaaatgaagaaaatctgaattacctgcactcaaatcagaccagcagtcgactcgatttgccagctcttcattttgtgtttcgttttaataattcagcataaaggtcggttatttttttttttttttttttgcgaccgttcagcccacgtcattgacatttgcgagctgtagcataaccactatagttcgtcccgctccacgccaaacttttgaggatggcggacaaaagactggctggggccaagtggcgccaagagtctccggcgcgtattagatttttacaaccgtaactaatagtcccatttggcgtgtggtcaagaggacgaggcctgccatgcctcagcccaaaggatgtagagcagctggggctaagtacattacgcaatgctgttggccaggagtcggagttcacctcctcctgggccattgccgtttattattttgacttttattcagcaattcgctgcgctcattaagccggatgccacacttacttacttactaactctcctacctctgcttcattccaacagatccgcccacggtttcggtgcatttggccaacgaggatcccagccggctggtgacgcgagccgagggccagaatgtcactttcaaatgccgggcagatgccaggccgccggtaaccagctactcctggttcaagaatgtaagtaagaccaagtgatttctcccactgcccactccattcagcactaccactcatcatcatcgtctattttcacaagctgacgtgtatcggacacttttcgaaatttttattttcaattgttgttgcgaggcccccaaggcgtccacattcttgtggctctttataagcagacacttttgcggtttaattaaatttgtcagaatgctgtaagagtgaaaatgcttcgcattcctgctgggcccaaggataatgggggtcaggaagtgtgcccagcaaatgctcggctcatttttcaaacgtcttataattggctcatgatgtccattgaagtccattcgtgttgcaaattatttaactatttatcatgcaacaaataaaccgaaaacgattgagattgccccagacacagttggatatttttgtgctatttttgtgccaattttgtgcgagttttgtgctggccaaccattgttgaccgcctgcctgactgtgactttgtctttggtttttattattaaaccgcatgattctgacatcctttgacagttttgtccacatagtcacatcatcatttttcataacaggcaaaaaccataaacccgagctcatatttttccgacctctcattctccgcttttagtcgagcagttaacaaattgccaaaatcatttgtccgacgagggggtggtcttcgaaaaacttctctttatttagggcactttgatttttgattttcggttcgaccacttctggcagtgccattaataggctacggctaaaatgagccaaggaattatgaaaaacgactggccaaatgtgcgcaaaaaagttgtaaagagccaacgttcgacgtcagtttggcgtatatagattgttattatcagactgtttttcgccagctttcttttgcttggcaaactttttgcactgggccaacttaaaacttttccaagggctcatgccctcaaataaatgaaatcccagcaaggaatcgaattaaagccactttcgagcg

SEQ ID NO: 33323 - DNA, 171 bp, DROSOPHILA
atgctgttggccaggaatccgcccacggtttcggtgcatttggccaacgaggatcccagccggctggtgacgcgagccgagggccagaatgtcactttcaaatgccgggcagatgccaggccgccggtaaccagctactcctggttcaagaatgtaagtaagaccaagtga

SEQ ID NO: 33324 - protein, 56 aa, DROSOPHILA
MLLARNPPTVSVHLANEDPSRLVTRAEGQNVTFKCRADARPPVTSYSWFKNVSKTK

SEQ ID NO: 33325 - DNA, 3490 bp, DROSOPHILA
cgtgtcgccggtaagtcagctcacaaaaactactttctcttgggacacagtcgaaaaaatcaatgtttaaactaaagatattacctataaatataagtcaaaatcagctatcgttttgtctaacccctttttcaaagagtcatgttatcaattggtataacaattgaaatttaattgatttcgttaaatacattgattgttgttcggaatcaagttcaaagcagctatttctctgtgcttcgtactggggcaaaggtacatgcctcgtccggaatccaaaccgaacttattgtgtctgtaattatgccgggaaacgtgctgcagccggagcctttgtcgcaattactcggaattccagccagccagccagccagtcggtccggaagaatagaagggtgtaggaacagataggtggcatgggtggtatggtgccaagttcgaagtcgggtgctattagcagaacttgtgctaaatactcgagggttgtctgggattttcgttcgacaattcagagcagacgaacaatggttgaggtagggaatcgggcgccgtacgtgactgaattaaaatttaatcaaaatgtataaattcggaatggtggggcaaacatagcgacattcgagggaatttaaaatgcaaaccgtttaggtgcaaaaccgaggactgcagaactagcagaaaatggcaaaaaaaaaaaaatggggagaaagacagatggaggaggaaaaataccagaatggctgaccaaacgaaccgaaagacttgcatatgtgagtcgactttccttgaaatgtcggttctgggacagctgtgcacaataaataaagtaattcatttaccgcaaaagttatttgaaaatctgcacgaaacccgatggccggctggccacaggatgacttattccgtctccagctcgattcgtttggcttgcaataaaaacttatttgccttcaaatatttatgcccacccgagctgggattcgtttttggttgaatgcggatgctctgggtttgctttgatttcaattcgatttggttcgctgcgaatcgagtgggttagtgcatctggtccttctgcctacgttcgcacaatgaagccgccctaatccctgtctatttaccctacattacaggtgctcaactcgaggatacagtcgaacggactggccagcacggtgacgtacctgccccaaacggattccgagttaataacgctggcctgctgggccagcaatgctgtgggacgccaaacgacgccatgtctggtgcacatcctgccggcaagtaagtgaaactggaagtggaggaatcctgcccctcctactcaagtcgagtcgaggaagttgttgccacaagatgccggcacttacctccatcttcgccgcaatttaaacagtactggtgtcggcattgccaccaatgtcggcgtcggagacgtagccgtagccggagacctccgtcctccgtccgccttcctacacccggactatctcttatgcacacataaggatctacttacataattggcgagtgtgtgccgggtgcaggacgggttggactgaaaggaccgggtggcattgccgtcgccggcaccggtgtagtttggcaaaatgttgccaaataatccgcaggttgaactgccagccgttgcctcaggactttgccaatttcgatggttattaatgcaaagtacacagaagcatggtgatgcactcaggcaaagattttcgaaacgtttcagaaacaaatatataacacttaaataatgtgctaattcttaagtatatattcgcttggttacaattatatcatcactactgcaatacaaatcaacattggatcgttggaaaaatatgtttcttcgttattttaaagaaaccttcttttacttcaccctaagtttgttaagcttttaaagacagcatagaattatagaccaattgagttacacccactttgtgcatcgcacccttgggccaaaattaaagctgacttaataattttaggggcgtagtcgccagtccttatttttgttttaacgggggcaacgccttcatttgcggcaaagtggcgctttaaggcgacaggagctgcgtttaaatgcaattacggatggggtggccgttgggccattaagccccagcttgtctatgactatgactaactgctatcaggataccctctcataccgcccttttcattggaaccttttccgcagacactccggaggcaccgaaggcctgcgaattgcgcaacgacaccgtcctggaggtggtttgtgtggcgggcagtgacggaggactttcgcaatacttcatgctggaggtggtgggcggagacccactctactctggagatccgggtggatcggcgggccagggacgaggccagttcagcgaggccatcggcctgggcgacaacgagatatccacgctgaatgatcaggtgagtggcgctgcatctggattcgcccgaatccagttagtctaagttgataagttccggcagggtaaacgcaaattgctcaattaaattaaaatttactcacggttcggtaaacagccggcagctaaaagcgaaacagaatcaaaatcagaagcagatacagaatcagcttcagatttagaatctgggtgaatgtaggatagagctgagagtgtggagcctagagagtgtgcaataattcacttgaaatccatatggtcaattagtgtgcatgtcctttgacttttctgcttgaattattaataagtattttgggaactgccatgggggtgtatgaccgggagttttcttcagctccactcgagtgtaaaagggacaacataattaatgctatgggtccagtccccaggttcaatgattttaccctttgtccagccactcggggagtgcatgctgagttattaaattatctctgtcactcctagatgggaatatcatatgaaaatttcatttcatttcgtttggctgctcctctcaacagccttgatgaagcgctgaagctggccgggcgagtttattagcaaagtagccaagcgcaaagctcatcacgaggatggtcatgaaaatgaaaatgaaaatggtacgacgatgatgaccgtggtgatgatgatggcccgacatcatctccggactctgacccacgccctgcttggtcctttggctggcagctttaaagtttcatgctagataaaggacacacacactcgcacttcggtgttggtgggggggggggggggggggcaaatgaagcccatgaaaagcgaaatgaaaatggccagaggagggaaaatggaagtggaaatggtaatggaaatgcagataaaaataaaaatcagcatgaaaataatgacaacattgttgtcgtactcatcgtaattgtgtgcgaactgagagagctgaaaatggcgaaaggaacaataaaagaaaagtgtctacggtggccgttaagcaaaacgaaaattgaagcaattccgcttacgcttgg

SEQ ID NO: 33326 - DNA, 432 bp, DROSOPHILA
atgctctgggtgctcaactcgaggatacagtcgaacggactggccagcacggtgacgtacctgccccaaacggattccgagttaataacgctggcctgctgggccagcaatgctgtgggacgccaaacgacgccatgtctggtgcacatcctgccggcaaacactccggaggcaccgaaggcctgcgaattgcgcaacgacaccgtcctggaggtggtttgtgtggcgggcagtgacggaggactttcgcaatacttcatgctggaggtggtgggcggagacccactctactctggagatccgggtggatcggcgggccagggacgaggccagttcagcgaggccatcggcctgggcgacaacgagatatccacgctgaatgatcaggtgagtggcgctgcatctggattcgcccgaatccagttagtctaa

SEQ ID NO: 33327 - protein, 143 aa, DROSOPHILA
MLWVLNSRIQSNGLASTVTYLPQTDSELITLACWASNAVGRQTTPCLVHILPANTPEAPKACELRNDTVLEVVCVAGSDGGLSQYFMLEVVGGDPLYSGDPGGSAGQGRGQFSEAIGLGDNEISTLNDQVSGAASGFARIQLV

SEQ ID NO: 33328 - DNA, 2813 bp, DROSOPHILA
acttacactctaaaatgctgttttcctggaaacaattaagaagtgaagaaatgcaaattctcagaaagctgacagaatatacattcatttattaaaatgtttattctattaaatgtttttctattaaatgagatataatggaaacaagtcactgtaaaagtgtatctttcaaaaacattagtttacgtatgaacccctgacagattggccatgcgttgccaacaagcccaagccatgagcataagtatccccaggacctccccgcgtccttagtccagaatcctgaatcctacacgaacggtcagtggccgttggcaaaagtttataatagaatttttaagcatgaataattatgtgaagtagactttcggccagctgctgttgcttgctgctgctctgattgccccttgtccttttttgattatgcacgggcagacatcaattttgctaattaggttaattgactttaatttaataagcacgcgactagactgctcaacaataatcgattcgaagaggtcatttaaatgggggcacttgtggatgtgatgttttgactcatttgctcattgctcatttttttggccctgaagttgatgctgaactgaatgcagattacaatatagctgatcattccaaaaaagaactaggaaagtaaattgtttgtagtttttactaatgacactgctcaaatttgcttacctttcccagcatttctgtgtttatgtccaccattcctccggcactaaatttatatttctcctgactcaactgaaggtttagacttcttagagctgcatttagttgactactacgtcgatcggtagtgactgtgtagaacatcgataggaactttcgctgcattgcatcacatcgcgtgcagagatagcagggcactacaatctctaagagtttgatgcactcaaccgtagcgacgtctattggggaataatacataaacgataaattagctatatatacttattttaatgggcctatactaacagtgctgcacagccacccttgtgtgctcaactctgctgaggtagagccagtatggcaaagcagaagtatcgatgaagaacttcatgagcagtgtgatcaggctcagttgaaagtagcactccagacaacggatagcctgccacaaagagttatggattgcctgtaacttggccaatttctgcagggataaacggcgtatggaccacatctcatatcgggttctgtacaattcatccagaacattggagcctccaacgataagttcttgataaataaacaaaatcacagcacagtacagtgtgaactcggaaaaacgagccaggaaaaccaattccgagtaggtggcgttaatggtaagagcacgattactatatatagtcaccacgataaatattagccatcgtatgattagggatccatagatccaattgcagtatctccgcacacgatccgtgctattcgaagtacccagttgcagttttatttgggaatggatcgcctgcagttgcctatccacatccttgctgcaatttccccacaatagctccaatacgataatagcatgacccaaaactagggcaacaaagttgctcaggtcgatggtgctggagaatcgatcgtttaggaaatcatagtcaaattcataatcgaagctgaagcgccagtagctcgaaaatcccagtgacacaaagagtagcacatagcaaaaccctttcgagaacagattctgaccgaaaggcagcattcccaaacacttcatcagtcgccgcatgtaaagcaacgaggcagcgtgcagttctcccgacatttgttccattactgaaaattacccctaaggtcctttcagcggtttctgttttgtaattggctaattgctgttatcgtgcagggaactcatccaatgaatatgttagagggaacactttgaaaaatgaaataaattaggtctcaaacaatctgcattacattttatgaaaaatgttttaatttgccgttcccaagtgaggctgcctgcctgctgataagatccttttgtaatcacccgaaatgacacatttcccattcaaattagcatcaaagtgatgttagagccaagtggaagcagatgccccagtggccataagtgaaatgatttgttaatttcatttcgccaccactcatgcacacacacacacacacaatcgcagctctgggggcgatgaaaattgcttatcaaaaatatggaaaagccgaggggaaaagggaaaggggcggctggggccccacataaatttgcatgcctttattgcaaccacaacgaggactggcaaacaaacggggagccatacaaacacgcatgcgaagcccgttgccacagaaggcagacacttacatccgctttactggcttttatgcaaccaccgtggcactttgtttgcacacttgtaaaacacctgcagaacgaacgcctttggctggcatatcagtatgtgtttgtgtacgaagtaatgacttaattgcctcgccctcctgccacccaaaagccacccaaaggccacccaaagaccaccccgaaaccaagtagcaaccacctaacgcgattgatccacccgcgtttctccatctgcgagtgggcttcataattccgcgcaggtgtcgagaacgctttgtctttgattgttcgtctggagtgactctaatctctgccagccacacaccatcaccgtcaggaatgttcggggtatacactcatagtcgtactacccgtacttctgcatgacaatcgcaatcttgggctcttgaagctgaagcctctggtctgggttcaa

SEQ ID NO: 33329 - DNA, 813 bp, DROSOPHILA
atgtcgggagaactgcacgctgcctcgttgctttacatgcggcgactgatgaagtgtttgggaatgctgcctttcggtcagaatctgttctcgaaagggttttgctatgtgctactctttgtgtcactgggattttcgagctactggcgcttcagcttcgattatgaatttgactatgatttcctaaacgatcgattctccagcaccatcgacctgagcaactttgttgccctagttttgggtcatgctattatcgtattggagctattgtggggaaattgcagcaaggatgtggataggcaactgcaggcgatccattcccaaataaaactgcaactgggtacttcgaatagcacggatcgtgtgcggagatactgcaattggatctatggatccctaatcatacgatggctaatatttatcgtggtgactatatatagtaatcgtgctcttaccattaacgccacctactcggaattggttttcctggctcgtttttccgagttcacactgtactgtgctgtgattttgtttatttatcaagaacttatcgttggaggctccaatgttctggatgaattgtacagaacccgatatgagatgtggtccatacgccgtttatccctgcagaaattggccaagttacaggcaatccataactctttgtggcaggctatccgttgtctggagtgctactttcaactgagcctgatcacactgctcatgaagttcttcatcgatacttctgctttgccatactggctctacctcagcagagttgagcacacaagggtggctgtgcagcactgttag

SEQ ID NO: 33330 - protein, 270 aa, DROSOPHILA
MSGELHAASLLYMRRLMKCLGMLPFGQNLFSKGFCYVLLFVSLGFSSYWRFSFDYEFDYDFLNDRFSSTIDLSNFVALVLGHAIIVLELLWGNCSKDVDRQLQAIHSQIKLQLGTSNSTDRVRRYCNWIYGSLIIRWLIFIVVTIYSNRALTINATYSELVFLARFSEFTLYCAVILFIYQELIVGGSNVLDELYRTRYEMWSIRRLSLQKLAKLQAIHNSLWQAIRCLECYFQLSLITLLMKFFIDTSALPYWLYLSRVEHTRVAVQHC

SEQ ID NO: 33331 - DNA, 3588 bp, DROSOPHILA
ataactgctatagcaattaaatatatttaaaatacctttgtacttgtgctgccgtcgaactcgaatcttaagcctttaaagcgctttatggccacacggcgtatgcgttatgcgagtgccatgagcatggagccgccatgaatatacgtttgcattttgcattaattatgtgccagggcgtagggctttgacagtgttaagactgcctgggcatcactcactctgggcacaataaaatggggtaatgaggcgcggctgccattgctaaaagcgggcgtaggcacacaaatgccggccaactcacacgagtagtacacctttttatgtgtctgccggtcgttttggctgtggatttggatctgggtctgaacccaaaagctgctagcaagccatgccatatcgcaaatgtgtatgcctacataccgcaccgtggcgcatgacttcattagtgtaatgaaaacagaagctggcagcaaaaatgtcaaggttgatgccccgcctcctacagccaccattctccattcgccattctccgtttggcgtgcaaatcgtcgccaatccgacggctggtccattttcgaaggcttaacgtggtcctggacagcggaaggaggccgggaaaaaggttaacacttgcaaaatggctagcaaggacgtgcccgagcttcgttttgaataacaaatttaattagaattaatacatgcgggcctgagctaaagctaaaggcaaatgggtgtggagcggagtggtttggagtcctgtcgttctgccggtaattggtaaacgctgagcccagcaataaggataaaaatgctatcagcatatgcaatgccaaacgggtcgcttcattatggtacactcccatgaatagttgaatctatagatatttggcaaaatggaattggccaaggagaacctaataataatgagccagctgttgggattagttagtaggtagattattagttttaaaatgtatgtgaggaaagtttgtcgtttttagattgcctccaccttcaactgaattccgcctttaattccgagtaaaatggcggaatgaggatcgaaggtcaagggatctggtgtcgctgagcatggggagaatgtgaagttcttaatgagcatggctagtccaatacgagcctgcatctgtccaaatctcagtccaatgcagttgcgaggaccttctccgaagggaagccaggcaaccgagggacgtttggcggattcttctggagaaaacctctccggtcgaaactcattgggttcgggataaatactgggatcgtgatgtatggccgatgatggaataatgaccgactgtccagcctcgatgacaaatttgggattgcccggaaccacaaaacgtttggcggccactcgatccacattcggtacaatggtataatggcgtagagtttctgaaaggacattttatgatcctttgggatcgctggaattttaaaaacacaccgctcaccatttataacttggtcgaggtactttagatccttgatgcactcgtaggtaaacttttgatcgtgttgctccagaacctgccccaactcagctctcaccttatcctggatactcggattcttggccagctcgtagagggcaaatcccatggtggaggatgaggtatcaaagccagcgatgaagaacacaaaagcttgggcaacgatctcatccatggttaggcccttaacaacctccccattttcaagagtcatattcttctggtttttcaagccgattagcatatccatgaaatcattccgttttatattctccttttctcgcaaagtgacagtctctttaactattctttgatagaactcctgaatttgagccgtgtttcggcaaaggcccagtcgcctggccaaattgggatagctgcgcatgaggccacttactagattaccatgacgagaatccagcaaagcccgcctgccaaagtgcaaaaactcggccttctcatctcgcagactattacatttgatgccaaaggcacaggttccgatgacatccactgtgaacctggccaccagatcccgaacgtccaatatggagttttccgataccttctcgtgcatcacagccataaattcctcagccacggacacaaccgtcggatacatgaacttcattttgcccgacgtgaatgtcgaggatagtttgctcctaagcaaacgccactggggtccatccaaattaaagagatgcgctgacatgggatcatctttctcgttgtagtatattcccttgtcggtgaaattggaaaagttcttgatcagtatttgcttggccagctccagatctataacaaatgcggcgggcttctgaaacagatagaatcccacaaaaggagccttgctatttcgatatttgttgtagtattcctggtggatttcgtgaacggtcctcgttttcttatatccctccatatttcctctgagaggatggggtttatcatacggaatgccacgcctcttaaaatacgttagtttgcgatggagtatataggtcacgatcgccagtagggcgactgccacttggaagagaaagtatgtcagctgcatattggcgacgttgtttcagaaatactaactggagaaatagaccgtgaacacctatttaatgactttctttatcttctgtttgtatctaatgtttgcagacaactaaaggcccctggagactgcagcttttatcactccatataagtctataaaaacgtgtattatatagcgattaagataatcaactgctctgctctgattaccaaacgtggtaaagatttcgaaaagtggatggtcactgataaattatccaatctctatagacaacaccacctttggagtctactgcagatatcaccataaagggctgctgagttgaatgctacagtagagcatcgagaactagaccaaatatatttatttaaaatagcgaaaatgctttgctaggcaaatgttgtgtttttcatcagcgatttatttatttatttttgttgttactgtatgatataacatacaatataaaagaaagtaatttaatacgtcgcttttttcatagctactagcagctttgaacatttgtcacagccacgccaacaagacaaatacacaagaatttaagtaaacatgttaaaaccataaaaatgcaagtttacaaggaagcagctggaaaaaagtttgtcttagtgcaaccaaaagtccaatgcaaaaaagagcgcgcgctgcagaaaaacaaaatcgggcttcagcgtgtaagtgtgtgcgtgtgtgggtgtcctagggactttctcatccttagaaagcacacacacacacacagaggcaatattttttgccaacaatgatgggcggtgggcgtggttcgaaatatgtgaaatcatgaataaactgccatgtgcacaacattcaacattttgcattcttgcagcaccagcagcactacttctctttccctttgagctctgttttttttatttcctctgggctctttgttaccgcttttccgtaagcaaaggcaaaggaaaacgctgctgccgcattgtatgcgctcactttcgtttttcgcca

SEQ ID NO: 33332 - DNA, 1529 bp, DROSOPHILA
ccaatatgcagctgacatactttctcttccaagtggcagtcgccctactggcgatcgtgacctatatactccatcgcaaactaacgtattttaagaggcgtggcattccgtatgataaaccccatcctctcagaggaaatatggagggatataagaaaacgaggaccgttcacgaaatccaccaggaatactacaacaaatatcgaaatagcaaggctccttttgtgggattctatctgtttcagaagcccgccgcatttgttatagatctggagctggccaagcaaatactgatcaagaacttttccaatttcaccgacaagggaatatactacaacgagaaagatgatcccatgtcagcgcatctctttaatttggatggaccccagtggcgtttgcttaggagcaaactatcctcgacattcacgtcgggcaaaatgaagttcatgtatccgacggttgtgtccgtggctgaggaatttatggctgtgatgcacgagaaggtatcggaaaactccatattggacgttcgggatctggtggccaggttcacagtggatgtcatcggaacctgtgcctttggcatcaaatgtaatagtctgcgagatgagaaggccgagtttttgcactttggcaggcgggctttgctggattctcgtcatggtaatctagtaagtggcctcatgcgcagctatcccaatttggccaggcgactgggcctttgccgaaacacggctcaaattcaggagttctatcaaagaatagttaaagagactgtcactttgcgagaaaaggagaatataaaacggaatgatttcatggatatgctaatcggcttgaaaaaccagaagaatatgactcttgaaaatggggaggttgttaagggcctaaccatggatgagatcgttgcccaagcttttgtgttcttcatcgctggctttgatacctcatcctccaccatgggatttgccctctacgagctggccaagaatccgagtatccaggataaggtgagagctgagttggggcaggttctggagcaacacgatcaaaagtttacctacgagtgcatcaaggatctaaagtacctcgaccaagttataaatgaaactctacgccattataccattgtaccgaatgtggatcgagtggccgccaaacgttttgtggttccgggcaatcccaaatttgtcatcgaggctggacagtcggtcattattccatcatcggccatacatcacgatcccagtatttatcccgaacccaatgagtttcgaccggagaggttttctccagaagaatccgccaaacgtccctcggttgcctggcttcccttcggagaaggtcctcgcaactgcattggactgagatttggacagatgcaggctcgtattggactagccatgctcattaagaacttcacattctccccatgctcagcgacaccagatcccttgaccttcgatcctcattccgccattttactcggaattaaaggcggaattcagttgaaggtggaggcaatctaa

SEQ ID NO: 33333 - protein, 507 aa, DROSOPHILA
MQLTYFLFQVAVALLAIVTYILHRKLTYFKRRGIPYDKPHPLRGNMEGYKKTRTVHEIHQEYYNKYRNSKAPFVGFYLFQKPAAFVIDLELAKQILIKNFSNFTDKGIYYNEKDDPMSAHLFNLDGPQWRLLRSKLSSTFTSGKMKFMYPTVVSVAEEFMAVMHEKVSENSILDVRDLVARFTVDVIGTCAFGIKCNSLRDEKAEFLHFGRRALLDSRHGNLVSGLMRSYPNLARRLGLCRNTAQIQEFYQRIVKETVTLREKENIKRNDFMDMLIGLKNQKNMTLENGEVVKGLTMDEIVAQAFVFFIAGFDTSSSTMGFALYELAKNPSIQDKVRAELGQVLEQHDQKFTYECIKDLKYLDQVINETLRHYTIVPNVDRVAAKRFVVPGNPKFVIEAGQSVIIPSSAIHHDPSIYPEPNEFRPERFSPEESAKRPSVAWLPFGEGPRNCIGLRFGQMQARIGLAMLIKNFTFSPCSATPDPLTFDPHSAILLGIKGGIQLKVEAI

SEQ ID NO: 33334 - DNA, 3926 bp, DROSOPHILA
ctgtgtcaaaggcttaaaagcttaatgaaatgaattgaaaacatttcaattaatagtatgcattgactattttcggggcgaaagaaactcgagaaatatcataagcttaaaatttatattgtaattgaatatcgtaagacatacacaaagaatttagttaacttagttccaaaaatatactagggctcagtttctgcggctgccaaattgcttcgagtagtcctggctctcttttgtcctggcctttccatcgtggtgttggccaagaagatcttagccaaacttatgcctaatagtagcatgaagttcacggcatgggttagtaagatctgatccagaaacatgcgaatttttcgccaagatccccgattgcggataaagtaatattgatatagacccatggcattgctgatcataaaaatggagattagaattgatctggcatttttccggacaaatggaaccatagcatatagagcacatatgaaaatcacggatggtataaaaatcttcagcaatacaagactgccggctatgtatagggaaaaatgcgggtaaaatagtcgagcggttgtcggtttgaacaaaaatgaggatatccaatgtccagccaggaagaaggatacatagaaatagaggagaatcatatatccatatcgataaaatccttttaggttctgaagagaagtgtgctcgtctttcgcatcttcaatttctttagtttccttggtttcctcataaatctggaggccgaatataaattcagttatcgcaatttggaaattcaagcagccccaagaattggtcagcagactgagaacagtaatcatgttgatggtaataagttccaatcttttcctggcctctggcagagattttgcaaaatacacaatcgagagaaaggcaaagaaaaggaatgaccaagtgacgacatagacataggacgatacagattcatagaacttatattgataaactccaaaagctccgaccaccagcgttagtgaattgaatgtccagactcggggatcatgtcgatgtcctaagatcaaaggacgaataatagccaaaaccatgcttacataaagaacatggtaatcttttacgggtatagtcttcagaccctttatagtgcgttgctccataaatagaatggcagttactattaaagccagcgaaagccaaatgaatagtttaatggatggctttcgaagggctcggcggttgttaaggagtacggaaattccatatagcacccatagatgcctgataatgaaggtcatcgacattattagaacagcgggcaccaatataaagccaaaattccataaaggatgaaatatccaatagcctctcacaggacgttcagcctgagccattatcaacattccaaccggtagtattaaataaaatgctgcgatatgcggcaccttttgaagttccatcatggcaattaataaaataccgatcatggctaatatcagggtggaaacagtcataaatccccttctttgcatcttttcctttttcgataatcttgtcagctgtaggagaaggcagtagaaccaaatcatgtaggacattgaattggccacaatcaatggtgtttgataatattggttgtagtaggtcagacatttctttgccagttttccatactccttacaaaactccattgcatccgttaaattcccctccgattttaggatatcaaattgtgctgcatactgatctattacgcctatgtggagttctttaaactttggcagccacttgtaaaatatcgctttttcgtgacgtcctatgagaatttcagcttgcgacaaaagttgcaagacgttgagatgtaaagccaccgcttgatactcatcactcacgttgagataacccactggcattagggctagattgttctttggaggtggaagtccaattaaagatgacatcagtggcgccagttgggtctgatccacctgggatatattgggtttttcggggaaattggcttcagcatcgatttcatctcgtttaacaccagctccccacataaacaatggtgtttctacttccaagggggaaccactaccatgtgctcctgaaaagtactttgtgatttaaatattcctttgatacttacatagttaccttcattattcattccatgatcggatgtcatcaaataagctgttctactatcattgaagacacgttcgaaaagttcatacgtattcctaataccacgctgtgtatactgaagttttgcgaagaacttcttacttagtggcttgaaccgatgagcagctatatccatgtcagccaaatagacaaagaacacagccggcttgtaattgcgccattctcgaacattgtcgacgttcctcaagaaattctccaccttatcgaaggcccatttgtcacatgtcagcttttctggcaggtccctttccatatatgagtcaaatctcaatggggcaccaccatgcgacagttttacgaaataaccgacaatgtagctgtgggcccagccgatcatatttctgctgcgattgaagacggtatcgaaatcgccgggattgtagcataaatgcatcaaagaagcagctggatcttcatggaagccggcaaatatggctatgtgtccaggtcgtgtcattgtcggcgcacaagtgcgggatattccaattcgtccctgctgccggtatatatccttcagatccggaacatcgctgccattgttcgccagaaaggtggccgcacgcagaccatcggtcacaaataccaccaatcgatccgctggaggttctaggcccaattcgcgcatcgtcttttggggcacgaggttgggcagtagagtgtgttggaagtatgtgttcaagatggcgcccatcaacaagatgtgcaccacaagtgcctgaagcttccacattgtcggaagtaagaacttttaagatataagaaaatttttaaaccaacagaatggaggtgtgacgtattcctgaccagctgctgttaaatgttttttgaagtgaatatccctttcatttagccctgaaatgacttttctagccgaagaaatcagaatatcttgggtttctacccaaccaaaatatcgagtatatgcaggactttgtcacggatgcaatattttaaatttaaattcatgtatgattttattatgtaataattttatgtgttatatgcgactatataactgtgcacataaaatgagctgatctgttgtcgtcgcaccaccatcagttagttgtccttttcccctttactatctggcacggttaggactcttttttttttttatggatgccataactctgcggccttgtcaagcaatttcaatttgccgcttgatttgtgagctggcgcctggacgcgctgccttgggcgccaaatgctgcatgttgccgccttgatttacgcgcctgcaatttaaatgagctgcaaattgctgcatcaccagcgaatccatgagtcttggggcagcttaagtctttaagggttttatcaatctgggcgaggtcgcgagaattaattgcctcgtataaatcgtgtctcttgcaactttttgcccatcagccccttttttgtcgcttgactaattcacgtagacaattcaggtgctccaagctgtacttttgatgctcatttcgctggaatgctagttagaccagaaggcttaaagcccagccatttgtcaggccaagtcgagttgtgctctgacagttgtaagccagtcgacaaatagctggccggatgactgaatggccagctaacagtttcgtctggcaattaaaggcctgttttgcgtctggcaatgggctaatttaacagcgaacaagagttgggcgttttatggccaacagtcgcgtgtttgaagcgattgagaaatgccattgagtaattgggcagag

SEQ ID NO: 33335 - DNA, 1428 bp, DROSOPHILA
atgtggaagcttcaggcacttgtggtgcacatcttgttgatgggcgccatcttgaacacatacttccaacacactctactgcccaacctcgtgccccaaaagacgatgcgcgaattgggcctagaacctccagcggatcgattggtggtatttgtgaccgatggtctgcgtgcggccacctttctggcgaacaatggcagcgatgttccggatctgaaggatatataccggcagcagggacgaattggaatatcccgcacttgtgcgccgacaatgacacgacctggacacatagccatatttgccggcttccatgaagatccagctgcttctttgatgcatttatgctacaatcccggcgatttcgataccgtcttcaatcgcagcagaaatatgatcggctgggcccacagctacattgtcggttatttcgtaaaactgtcgcatggtggtgccccattgagatttgactcatatatggaaagggacctgccagaaaagctgacatgtgacaaatgggccttcgataaggtggagaatttcttgaggaacgtcgacaatgttcgagaatggcgcaattacaagccggctgtgttctttgtctatttggctgacatggatatagctgctcatcggttcaagccactaagagcacatggtagtggttcccccttggaagtagaaacaccattgtttatgtggggagctggtgttaaacgagatgaaatcgatgctgaagccaatttccccgaaaaacccaatatatcccaggtggatcagacccaactggcgccactgatgtcatctttaattggacttccacctccaaagaacaatctagccctaatgccagtgggttatctcaacgtgagtgatgagtatcaagcggtggctttacatctcaacgtcttgcaacttttgtcgcaagctgaaattctcataggacgtcacgaaaaagcgatattttacaagtggctgccaaagtttaaagaactccacataggcgtaatagatcagtatgcagcacaatttgatatcctaaaatcggaggggaatttaacggatgcaatggagttttgtaaggagtatggaaaactggcaaagaaatgtctgacctactacaaccaatattatcaaacaccattgattgtggccaattcaatgtcctacatgatttggttctactgccttctcctacagctgacaagattatcgaaaaaggaaaagatgcaaagaaggggatttatgactgtttccaccctgatattagccatgatcggtattttattaattgccatgatggaacttcaaaaggtgccgcatatcgcagcattttatttaatactaccggttggaatgttgataatggctcaggctgaacgtcctgacatcgacatgatccccgagtctggacattcaattcactaa

SEQ ID NO: 33336 - protein, 475 aa, DROSOPHILA
MWKLQALVVHILLMGAILNTYFQHTLLPNLVPQKTMRELGLEPPADRLVVFVTDGLRAATFLANNGSDVPDLKDIYRQQGRIGISRTCAPTMTRPGHIAIFAGFHEDPAASLMHLCYNPGDFDTVFNRSRNMIGWAHSYIVGYFVKLSHGGAPLRFDSYMERDLPEKLTCDKWAFDKVENFLRNVDNVREWRNYKPAVFFVYLADMDIAAHRFKPLRAHGSGSPLEVETPLFMWGAGVKRDEIDAEANFPEKPNISQVDQTQLAPLMSSLIGLPPPKNNLALMPVGYLNVSDEYQAVALHLNVLQLLSQAEILIGRHEKAIFYKWLPKFKELHIGVIDQYAAQFDILKSEGNLTDAMEFCKEYGKLAKKCLTYYNQYYQTPLIVANSMSYMIWFYCLLLQLTRLSKKEKMQRRGFMTVSTLILAMIGILLIAMMELQKVPHIAAFYLILPVGMLIMAQAERPDIDMIPESGHSIH

SEQ ID NO: 33337 - DNA, 2842 bp, DROSOPHILA
gggctaattgcatttgatacgcaaatgttcgattaagcgcactcactagattttcggagcgcactcaattcgctggcgaaacctatttacatgaaacaacagctgcccggcttttctcgtcgagttacttatgtatgttaatgggctgccgcagactcgtaaattcggcctctgtgattacacaaccgagaccatggactcggcacttcctatttcggtggctggggatccttctaatttatgcggaattttaacagccacctactagcccacgcaggtttttgattctcgccggcatatgtgagccgataaattgcaaagccgtgggtcgttgccaccaaaccgaattcaagaatataaataaaatgaagccaaatcagctgacgctgatttaaatcagtttacgcagaactcatcaagagaatttattacactttgcgccgggtaaggaaaacgtgaaaaaaatatcaggcaaagtggcaatgtggcaaagtaacaatgttgggaaaggcaaaacgaaggagcaaactgattaaaaaaccggctgagatgccgtgaaccatggcatcagaagccagccgattccagtcgatccagatccagtgcaaaaggccgggcaataacaaaaattaaattgagccgcaggtgtaggcaatttccactcaaacgctcacttcaaaagccacaacgatgggacggagcaaggagcaggtcatgaaaatctgaaaaccagaaaacctgaaggtaaggagctggtcctggcaatgtttcaattctgaggccgttgctttgacggcccgcaaatggagcggaaacgcttggatgccaacgaaaatggaggggctggcattaacgaatgtctggcataaatcttgcccggggatcatcttacaatcagtttggcccgggctctgggatctgggccctggggcttggctcgcacattatgttgcaatttccgctggctggaaatctaataaatataaacaatgcctctcacatgttgctcataattgccggggctttgcggcaagtgccatcagctctaatcgctggtaataagtggccaaaatggcctttgattttcataatttctcctccgcagcagccactatttatcataccaccagatctcccataacagagcacccagcgatttggctaatttcgattttcaacccaattggcccgctcacaagggtcggaatgggaaaacacaataagcaaacagtcaaaagcaatcagttaggcaaaagaacacggcagagcacagcaaaacaaataaataaataaacggcagcgaggcgaggcaaacagaaatcagcaggagcatcaaactaattccgagcaaataacaaatcattgctaggagccctcaaactatcagatgctccacctacgatccatgttggtgcactggaaaaagtaaaggcggatatgggactcttaagaaacgttgcaagcatgttaaatattaaaatgtataaatagtattaacgtttagtgcctaacttttggttgtattatttttgttcagtgtagtaatagtatccctcttctctccttccagacgaatccattctgtccgaggacccaacgcccgcagaaacaacgcatcatggaggcggcggcgtgggcggcagcgggagctccagcggcctgggcaccggcgccagcacgggcagcggtccggagaagcaatcgacgctgctgatactcgccgccgtcgtggtgataggcgccgtcgtggtgacgtcaattatcgtggccggcatcgtcgtggtctgccggcacaggccgcggccacctgagccgcaggaggtgcgcaagagcatgcggtaagtccgggagccctttgttttgtggtcttcacattcacatccacatccatccggaagctgggaaaactaataatgaaattgttggctgcgtgtgtgtgtgtgtatgtgtgtgcagaaataattactgaattatttatgtggggcacgtgactgacgtggcgaggatgaaggaaagccgcgtggaagttgtgggcggaaaacgtagcatacttgcttgcgcattccacgcttatgactattacgcagaaagtaattaaatgacagccgcgcaaaaatgtccgctcaatcaatgggactccactttaaattcacctgccggcagaaaggttaaaaggccaatccggacctgatggtaaatgtcgggttcattaagacgatcgcctaagcactttgaggccgccaatcgattagagccgagcacgcacctgcccagtaaattatgcttagtctgtaattaaattaattaaacctgcacctgacgaccggccgggcagcccaacagggtcaaagtccaacggaaaagaatggccgtaaacgaggtccggaaacgaggcagccgcacaagttagagtttccatttaagataggaaatcagcgctgtatctgcgaaagggtcgcgccccgtgggtggataattaagcagctgcttagctgacgtactcgtccttacccccccctttcgcctgccggctaatgaaaaataaacacagagcaccgccctcctgcttttgtatcgacgtggtacagttccaatgccgatggtatcctccgttctttgatttcggccaggcccactgattgaattcgggcaaccacttcaaagcagaatccgacgaaatattaattatagttgccgaaaatagtcgcgggcacatcaaagcgaatcgcatgcgggtcattaaatggtcatcacaactgtcaaacgctctccatgccgtgcataaataaaacgggcccacctgcgattcgaaatatactctcccacttttaatacacggtta

SEQ ID NO: 33338 - DNA, 327 bp, DROSOPHILA
atgttgctcataattgccggggctttgcggcaagtgccatcagctctaatcgctgacgaatccattctgtccgaggacccaacgcccgcagaaacaacgcatcatggaggcggcggcgtgggcggcagcgggagctccagcggcctgggcaccggcgccagcacgggcagcggtccggagaagcaatcgacgctgctgatactcgccgccgtcgtggtgataggcgccgtcgtggtgacgtcaattatcgtggccggcatcgtcgtggtctgccggcacaggccgcggccacctgagccgcaggaggtgcgcaagagcatgcggtaa

SEQ ID NO: 33339 - protein, 108 aa, DROSOPHILA
MLLIIAGALRQVPSALIADESILSEDPTPAETTHHGGGGVGGSGSSSGLGTGASTGSGPEKQSTLLILAAVVVIGAVVVTSIIVAGIVVVCRHRPRPPEPQEVRKSMR

SEQ ID NO: 33340 - DNA, 2258 bp, DROSOPHILA
acccccccctttcgcctgccggctaatgaaaaataaacacagagcaccgccctcctgcttttgtatcgacgtggtacagttccaatgccgatggtatcctccgttctttgatttcggccaggcccactgattgaattcgggcaaccacttcaaagcagaatccgacgaaatattaattatagttgccgaaaatagtcgcgggcacatcaaagcgaatcgcatgcgggtcattaaatggtcatcacaactgtcaaacgctctccatgccgtgcataaataaaacgggcccacctgcgattcgaaatatactctcccacttttaatacacggttatggtggtgaccccctttttcagtcgcatgtgcgtctatgcataaattttaatgatttgccttttgcggcaaagtattagtgcaaatatttgatgcacacatttgcgcgtatctgactgataagagagacacagatgccgcgtgcgtcgtaattagctccaccgtcggcattggtttatatttaatttacaatggaccatcgagcaggctgatgaaaattcgagggtcctcgagaggaatggtaaaattgttgccaatatttatcaatgcgagtaccgagtcgatagcgaaaaaccgcattaaatccgctttggaaaggcgcaaaacgcgaatattgcgcatccgccgtgtgcaacgcagcggcagcggcaaccgaacgaatttattttattctctagttttaccaacccgaccgccacccacttaaaaagttgcccagtcgttccccaggtgattgcggtgctttgaatgtagctgtttatattgaaattcgagtcgcctgagagccgtcagctggcttagtttgtccagtttgctaagctgtttcgccgcaccttgggaactattagctgctaaactttttcatgccatttattgtatttttcaatgtctgatttttttgcattttttctccactttctaggccggcgagaaacgatgtgccgagcatgtatatcgaggaggacgagctgaacgagctggaggagggcggcggacgagcggcggatattagggcacgggtggccccgcccaactcgcacctgtgcggtggcggcgggatgccgatgcccggtggcgttgggtcaagtggcggggccattgtgggcgtggccggaccccatcactacatctccgagagcttcatccagtacgcgcagcccagcctaaacggtactattccaaaatctatactcaacaagctgtagtagtatgtagtatgtagtggttatttatccgtagttctagtcaagtagtcatcaatttatcaatccctgtatctatgcatccgtgctttgaggctgcgattgcgattgtgattgcaactcccaaattggttgtgctcaagaacttttgaattgcaactcgagtgcgccctcgatattaatttgtatttgtattcgtagttttagttgattgttttgccttatgtagaaatgcacttgcctgtatatatttagtacacattactcacctgatttgtagccattatgaagattagtttaacatcttgtttctcggtaaaactgtgccaagcgaataaattgccaaaatcgttttggaatgcacacgaacacgaatttgtttttaaactggcaactgcctgttggccactcatataacaagacactcaatgtttttaatattttttgattgtgcaaaattgatttgcaatttaatatttagtgaagtaccaggcatgtgagtagtttgcgtggtggccgcgcaggagatcaacgcaccacaggcaaaacaattaggttggcttgagctggcgctaatgatgcggttgaacaccaaattggctggcaactaatgaattggagcacatgtaaatgaaaaactaattgcccctcatttggcattcacaaaagtagcttatggcatacgagtacactcttttccaattagcgcagatcaaagtatttaatgtcgttacatttgcgttgaatcgcattcgatttgatttcaatttcgattcgatttcgaatgagttgagcgactgaagcgtttagagtcgagtatttgaaagatattttgcaattgacgggcacccgatatagacaacacccttccactaagttcccgcctgacctagccatagtactccccctcactttctctatatctctattgctctctctcactctgtctccgaatctaactaactctgtaggtagcgaaacactatccacttgctttccaact

SEQ ID NO: 33341 - DNA, 258 bp, DROSOPHILA
atgtatatcgaggaggacgagctgaacgagctggaggagggcggcggacgagcggcggatattagggcacgggtggccccgcccaactcgcacctgtgcggtggcggcgggatgccgatgcccggtggcgttgggtcaagtggcggggccattgtgggcgtggccggaccccatcactacatctccgagagcttcatccagtacgcgcagcccagcctaaacggtactattccaaaatctatactcaacaagctgtag

SEQ ID NO: 33342 - protein, 85 aa, DROSOPHILA
MYIEEDELNELEEGGGRAADIRARVAPPNSHLCGGGGMPMPGGVGSSGGAIVGVAGPHHYISESFIQYAQPSLNGTIPKSILNKL

SEQ ID NO: 33343 - DNA, 3836 bp, DROSOPHILA
tggtaagccgagcgttaataacaacgcttatctgcggcattaggagcacgccagcccccctccaaacaacaggacccagcgactgcgacaaaaaatgataatgaaaaactgaaataaaagcgcagcggcagtgccaacggacaaacaaacggacagacaaacaaacaaacggacggcaaaaaagaatacgaaatacaggcaaacaacgcagcgcggagctgaggaacccaacaactgagcaactgaacaactgagaaactgagaaactgagcaactgaagaactgaacatctgaactgtccggggttggaggaccacataatttaagctgccgttgccttagcaattgctggtgcttctgcttatgcttttgcttttgcttttgccgctgccactgctgcctgcatcgctgctggcgtgacaacttcaactgacagccgcagagcagagccatcatccattatcagcagttggccatcttaaagtgcagcagaaacaacagcgatggacactcgcataccctgtaatcagcaagatatagcaataagcagctagctatgaaggcttaaattaaacttaattctttctcaacttatccaagtcaatgtattttaagatgccaaagagtttttaaggttcaagtgctgaaagagtttgatttcgccaatgtaattggactacccagcagaagccagcattttccgtggcattactacggcatcaggacaggaagcgaatgcaaaaaaaggcaacgcggacaacgggtggccacaacaatggcaacaacagcggcgggagcagcgacacaaaatgttgcgatggcattgttttaatgcatttggagcagcagcagtggcacaaccagcgacggcacaaaaacagcataacttgcagcctggagatgcgggcgcttgatgcctcgacgatggccgatggcttatacgcaccgtgcgccacattacgtatacgcattcgcgtgtgtagtacgtcgccggtgggcactacttgccgctcgctgaattgccgcactgctgctgatgctgctgctgctggtacgccgatggccccgaggagtccttcactgtgaacgtgacgtaatatcgtttgttgctgtccagcttttccgcgggcagtgaaattagctgtttgttcttgccgtgcgacaattccagagccaccttgtggttacagcggctaccgctggcacttccaatgccgcccgccctgccgctggaggcgcggccgctggtcaggatcttgggcagaaaaaagctgctcacgctgccggtcttcttgtacggtccaaagccgaactttggcatcgtgtggtgattcatcatgggaactgcaatgcaaagaaacgttggcacacattagattaatgattcgggttgatgatcgcagtgaactacaatggactaccatcgccaggcaggtgtcctgcaggtgcaacactcagctaaattgcatgtgcaaaaacaaactagttgtaagacatagagaagcttcctggcaacccatttttcgacgccggattaagggccatctcggcgggattaccatggctactttcagacaaaaataactgtgcataaacaagggcacgttaatgaaagcggttgcgagcggtaaaatgaatgcgtttttaatttggcataagctcgacgcatccttttgagcattccgcctccgagtgaagatgtaataaaagctgaaaaagccagaaatccagaaagccgggtcgagaacacttttttaatttgccccagcaccgaataaactgctcgtaattaggatttatatttttatgcccggcagctggccaagtagctgctttgaatacgagtgtccgattgtccgctccctcctcgcttgacccactcttcaacccggcgaaagtgttgccaacccgctggccaggcgatttgactctttggcccggccaaaagcctgtctggtgccatttttcacgcttgcacagatccgcttaaagccctcaagcaaatcggagcagcaagatgcggcaccaaaagaaaaagttaaatgccgaaacaaaaatattccgactctttgaataatttgtcgttagtgctgtcaattgtatattttttaccaagctaaattaaggcgattgtaaaggttattttaacgtcaaattcattctgctatggaaacactttttatctacctggtatgtttactaatcttgacaaaaaaaaccgtattaacttagaagaagatatattaattgaaagtaaataaaaatcttaataaccgggatttcaacttttgtcttgttagcactgagctttcgttcgtttttgaacgtttaatttagcaaggattatatcttcaggatttattctcaaatagataacatactgtaggcggcacaaggtattcccgtgtaggcatgggccgcatggagacatcggtgcgtcttggtggtgcactgcagcgccttctcgtaggcattgtagtccggactcagccggcgctccgcctgaaaatgggatgcaattggatgagccagctggatgagcggcacttaatcatcgacccacctcctcgtacacctcgttgatgttctggaagttgttggtgccgggacgctggagtcctttaagcgtctcgtagaggaagagctcgaagttcttaaacgtgtactcgctgaagttgtagcgcctgagtcgcgtgcccgtttcgccgcccagaaggacacaggacttgtggtagtcgtccaccgcccgcttcaccagcaccgcctcgttcagcttactggagcgaatctgcagcgacttgagctccaggagatgctggaagatcttgcgctccatgtaatatctgcgaatgaaggagattgaaagccattaacattgttcccatcatctccacaatccgaatctgaatccgaatgagaataagaaacagcgtgtcggggccttgcaaaataaatgttagcaaatgtacgtaaattgtcattttgatatttcgcgagtcacagacaaaggcagtccgctacccgctgttctaacaatgctgacaaaggaccttcctctgctccatccaggatccaggccggagcgcaataaaaggcatcatgttattaaaatttcaaaaatactaaagtgcgtacgcggaaaaaattctattaataattgaggagcggacgggggaaaaaaaaggagcgagcgatcataaacgaggcgagtcaaattaaagccgccaacggcgccctctaagccataaaatgttattagaaatttcattaaaaattaggtaaacagcgaaattcagcgcttaaggggcacaaggatgcggataaggatgtgcatcttgggtgaccctcgaaagttgctcccttaactcgactgcgggccagcgcagtcttctaaatcaacgaatgacgtccgagccttttcgccgcaagaggagcggcgcattcaccgaaaaaactaagcaaatttgtcgagtgcacttggagtgcaaaaaaccaggcggcggagctggagcggcgttttggaaaactgtttacccaacggcagctgcctttggtgaggaggagaccgcttgacactgctcgccacttggctgcgctgcgcgaaattatgcaaaacaatttgactttgaaacaaaagttcattgctcgtggaatggatgcttggcgggatggtcggatgaaaagggcgggcaataaataggtaagaatccttgtgagccaaaagctgcgtaataaattggccaaggagccaagcgaaatccccgtagaacggacttcaaagcgggccagcgttcttccgcttgttttgctgccccaccagtggtcatcatcggtgg

SEQ ID NO: 33344 - DNA, 738 bp, DROSOPHILA
atggagcgcaagatcttccagcatctcctggagctcaagtcgctgcagattcgctccagtaagctgaacgaggcggtgctggtgaagcgggcggtggacgactaccacaagtcctgtgtccttctgggcggcgaaacgggcacgcgactcaggcgctacaacttcagcgagtacacgtttaagaacttcgagctcttcctctacgagacgcttaaaggactccagcgtcccggcaccaacaacttccagaacatcaacgaggtgtacgaggaggcggagcgccggctgagtccggactacaatgcctacgagaaggcgctgcagtgcaccaccaagacgcaccgatgtctccatgcggcccatgcctacacgggaataccttgtgccgcctacattcccatgatgaatcaccacacgatgccaaagttcggctttggaccgtacaagaagaccggcagcgtgagcagcttttttctgcccaagatcctgaccagcggccgcgcctccagcggcagggcgggcggcattggaagtgccagcggtagccgctgtaaccacaaggtggctctggaattgtcgcacggcaagaacaaacagctaatttcactgcccgcggaaaagctggacagcaacaaacgatattacgtcacgttcacagtgaaggactcctcggggccatcggcgtaccagcagcagcagcatcagcagcagtgcggcaattcagcgagcggcaagtag

SEQ ID NO: 33345 - protein, 245 aa, DROSOPHILA
MERKIFQHLLELKSLQIRSSKLNEAVLVKRAVDDYHKSCVLLGGETGTRLRRYNFSEYTFKNFELFLYETLKGLQRPGTNNFQNINEVYEEAERRLSPDYNAYEKALQCTTKTHRCLHAAHAYTGIPCAAYIPMMNHHTMPKFGFGPYKKTGSVSSFFLPKILTSGRASSGRAGGIGSASGSRCNHKVALELSHGKNKQLISLPAEKLDSNKRYYVTFTVKDSSGPSAYQQQQHQQQCGNSASGK

SEQ ID NO: 33346 - DNA, 2469 bp, DROSOPHILA
agcaagttaataaatatacattatcactcttatcgttaagaaacacaaactaaggcctatgatatatgtaggtatttaaatatatatatatatatgtatttctgtatgagtagtttagaacttacatatttggatttggctttatttggattatttctcaactgtaaacccgtcttaactgatcagctaactaaattatgtatcaacagttttcgcttcaatcgtgaatattcgtaattcatatttgcttagttacttatttaggttaatggtttttgattaatgcattttaggtgcctgtttttcagagtatttaagcctttcgctttcccgttaaatatctagttttgaaatggtttgatgcctactctcgtacaaatgaacattcatttctagtgcctataacgagtacataatttacaattgcatttggggttttatccatgcatatacgcgcttatttacagttggaggtgagtgagtagtgctctctttttaacaatttggcatcattcgaagggtatactattttttcccacttgtatttatgcaaattaattgattttatatctaactaaccaggatttatgtgctttggtttgcatcgcatgtttgctttggccctgccgaaatgctttttacaacattcttcgcataccctcaccgatggtatagtggttttaaaaccaaacgaatttttagaaaatattttagagtgcttccgaacgaatggtaaacaaatatgcgaggttgattaatttggtaactttgtttgcctaaaaacacgctgtggttttcgccaccaaacgtaatcaaatattaatgggctgcatagggagtttcggggaaaaccaaagcttgacttcgttaacgtttgcaaattgcaattcgcttaattaattacacagttgttatggctaatcgtatgcatcggcttcgaacacctttcatttcgactgtttgtaatggcactttattaaaatggaatcgcacatagttctcaaccacacgagtgtgtcgtcagcagtgcgaggatgcagcagatgaggggccaactggacgccattaggttgccatgactcccgctgctcttgcccttggaccaatcgaatcccttgggactgctgcccgtcagcttctgcttcgacttgtcgatctcgttcagattcgataggtatttaatgctcgctgcaattgataatgaaaagtgcaacgtgttcatttgttctgccaacatcaacatcctatgcattttttgggcactactcacatttgccggacgcaatcaccgaatttgtgggtccttcgcccacaatgccaatgccattgccattcaggggcgtgttgatgtagccgtccagtgcgatttccgccgcggttgttgtcgtccgccgcagcgttgtggttgtgggcggcggttgtgttgtcggcggactcgacactacacgtagagaaatattggcgtacatgagtggtagaaataattcaataaatagaagctatcgcaaagtggaactttaaaggaagtgtaacgctacatgtcagaaatgaatcctttttcttttatacattttttttgcattattttatctactttctgtcagtgtagtaattaaaataaggggtaagagcgtgatgtctgcgccaaaaaacggtaccgaacaaaagtggattgctcaatcggaaacaatccataaacaacttaaattaactgtgagttataagccagtcctgccccaaaaatgtgcgccccatcagtgccgaaactcctttgctcgatttctaaacagatattttcggttacccagccgcattgtcttcacttatcagccatcgtaaattcagtgcaatcccttttgcccgcccttcccccccgattcttttcaatttcttggccatctccccggggaggattaacaactctcggttccttttctcggctggctgccctccgttggcattattgaagacaatttgtagaggaaatttattgggcttgacacttggccttgcctcggctgggaatcacgaaactatagcccactccaatgcctggttgatgtcgcctttctgcgactgtatcgcctcctgaccactcaataaaattgtcacaggttcattgttctcattgtcggagctgccccttctattatcgatgcggccattgttacctttaattggtagaatgacgcccacttttcgatgggctacacaggccattgttgtggcagcagaatgaaaaccgtgtatatataaattaagttgtcttttcacattcgccattcttggtggcgttgggctcttgtcaccacctcacaacctcaccaccaacaagcgggcattttattttgttttatgaacttttgtaatcggaatcgctgctgccgagctgagctttaatggcccaaacagtgactggggagtaatttagcaaattgacacaatattgacactttattgacactacag

SEQ ID NO: 33347 - DNA, 387 bp, DROSOPHILA
atgtacgccaatatttctctacgtgtagtgtcgagtccgccgacaacacaaccgccgcccacaaccacaacgctgcggcggacgacaacaaccgcggcggaaatcgcactggacggctacatcaacacgcccctgaatggcaatggcattggcattgtgggcgaaggacccacaaattcggtgattgcgtccggcaaatcgagcattaaatacctatcgaatctgaacgagatcgacaagtcgaagcagaagctgacgggcagcagtcccaagggattcgattggtccaagggcaagagcagcgggagtcatggcaacctaatggcgtccagttggcccctcatctgctgcatcctcgcactgctgacgacacactcgtgtggttga

SEQ ID NO: 33348 - protein, 128 aa, DROSOPHILA
MYANISLRVVSSPPTTQPPPTTTTLRRTTTTAAEIALDGYINTPLNGNGIGIVGEGPTNSVIASGKSSIKYLSNLNEIDKSKQKLTGSSPKGFDWSKGKSSGSHGNLMASSWPLICCILALLTTHSCG

SEQ ID NO: 33349 - DNA, 4541 bp, DROSOPHILA
ttgtgtaagcatttttgagttatccctcaaaactccctcatctgtcttacagtgaaaacatgtttttcatcttcgctaatcattgaacatttgttacttggtctttgagcgggcataatggaataatagcttagcactttaacacatttacagctagggactgcaaacgcatttccaagttctgtgaccataaatgtcagagttcaaaaggcaagacttctttagcttgctgttaacatcgctatcttaagaagaggatgctgcaatacaaacttcattaaagagaaatttataaaagaacttggtttctttgctctacatttccctttataacccctaacaaagctcacacaatttggtcctacaagccttaacatttcccattttacaccccaagcaaagcttcatcatgtcggtcctgcaataccctaacatttcccgttattacccctgataaagctactgctagtcgaaagcgctccgtgccgtgaatttattaactttgagcgtccgtctaagctttaagtagtgacgaaagctcctgtcacaagacgctttgctctcctgttgactttagccacttgacagcgcaaaacgcgaaagccacaacactcagtcgaaacagctgactctcaaaaggtggccaccacccaccacccaactgctgcagggccaaacagaaactccgtcactaggcttacggagcatttagccaagaaagcgtgggggcgtcaccgtcactcactgacgtcgacgcactcggcgcatgaaaaacagttacgctctgtgccgcggagtgtgtggagttgcgttgaaaggggctccggagtccaaaagggtaatcggaaagcccacgggaaggggccatcaccgcggagccttgacccgagcgtaatgaaatgtggcgcctggctggcgaaaaagtgacgtgaaatgccaagtgcagccgcatcgaagccagcaaggatcttgtagcagcgacaggagcagccccttctccatgggttcatgccttggcagctgtgccacagctgccgccgcaccagcccactccgcctgcacctcaacgtccgactccaccacccactcgacttcctcgacgtcgtcttcactgacaactccccccacgtcctgggtggccaacagctggctctggtgagtggggccaattagttgaagctcaactccgctgactttcgttcgcgcgcaaatccgctgaccaatcaatagtggctaagcacggggtggaattggctagttgggggtcaacagcctaaaactatgcaacggccgctggttgccacaaaacaatgtgccacaggcgggcttcccgcccaagtgggtgcttactgcaaccaaatacgtaaacagtaaatactagttatatgtgatattctttaagagttaacaaaagcttttactttataataattattaaaaacatctttaataaaaagtggtatctttcatcttctaggcgaaagaacagatctgcaggaagacaagatccagaggcagatctcttatcgaggaccaccaggcagcgctgccaacggaacggattcatctaccgcatcctgcggctcaagaaaaggcagcagtgtcccagcttcctggacaagtactgggagcagcagcccagctacgccaagctgccgaccacgtatgttaagtctcctaaggtgcctcctagaaataaaaccaacttaatccttgcagcgccatggcggacattcaaatgcagaacctggacgccggcaagttgctcaacgcccagaccacgcccagtcgggagacggagatgggacttggagcctaccagcgcatggccaactcgcgggccagctcctccttggatctcgagtgggaacacgagtactcacagctgcggcagtatcagtaccagtgccagcaggtgcccaaggagctgccaccaacgccaccaaagccgcgctacgcatccttagaccagctggcggcagccaatgcgatggccaccagccaaggacgacacatggcgcgccaagccagactgagttgccagcgccacggaggttcgctcacgcggaactcgtgctgttcgtctacgcaaaactcctggtcgcacatatccacgccagagtcgctggaatgggacgtggacgaggagcgagagcagcagcgtcagcttcgtctggaggatgacaatctggatgatagaacgctcaagttgctgcatcagatcgagcaattgaagcaccatgtactgcaggagactggcgatggactcagcatggaatcagctgcggtcgaggagctcaccgagggccttcagttccgggcaacgcacttcgctggcgactcccagctggaggcccatgtaagttgattggaatcactttaagacgacctatcatgcacatagtattaggttaagaggtgtacatagcagacttaatgagcagttgtagtttcctgtaaagagcacgtctttgaaagacacattgaaatccgtttccgttttaattggccaggaatactggccatctgagtcttattaattttggctgaccagttttcctatcttaaagactttatctgtaaactaatgttccagtctattctatgcacttatgcttattaatcaagggatcaaagtttaaatcattaaaaaacacggtctgaagtaaatatatttagtttgaattgtcattttctattttttaattttgcgccaatttctattattttaaatattgatttgtttaggtttgtaaaaatgtcgtataaaatatgcaattaatcgaagtttttagttaatgaagaaaggacttgcaatagataagcataagaacaaaagagatatatcttatttcattacatattgcacctggtataagacacataggttaataagttatgaaatttaagtgcctagcctaagtccgatccgagttcaaaagtttaagtactccaataatatcctaaactcaaaatgattcctacaaaaaaaaaacagatatatcaagcaaacagtttgcattattagccacacagataactcaattctatacctatttatatatatgtgaactttaagggcttgaaaatgatttttattgcaaagatttataccaaaacatttagttttagtgaaaaatgcaatatatttactttctgctccaaaattgtgctttttggattaaatccgaatcaaaaatgtaaatgcgttcgatatagtaagagcttatcagagcactatataagtgacttcgttaaatttttaaaaatagtctatagaatcgcacctacttgaaaattatagtacttaagctactttaaactttatagaccagatgcccttagcctcctttttaattggtaaataacacaaaaaccactctatctttttatcagtgtaatatctgctatattgtgttaagtttttgttgatagtttcttggaaaacgtagagaaaaatattttgtaaatttttaagtttaactgataccaaagatttattttgaaacttgaatgttactctccatagactacatactagtatttaagtacgttcactattttcgctgcacagtaaatgtcatttatttgtgtcttaaactaagaggattaaagaaagatttgtagaaaatattaagatttgtattagttgagagtttcctctcgggtagtaactttttagttctgactaacaacagtccgttgatgaatggcagttaattggtttgacctctagccgagcttctcctttagcttttcccagaacgacggctctgaagtggcttccacctccacctgttggaagagtaccatcattgagtttccaatgtcaaatcccctcgtgaatgcttaccttcgttgcttgctgcagaggttgactcctgctgttgctgctgctgctgtgaccctgcgtctggtcgaagtggaggtcatcctcgacctgaacctgctgctgctggccgagatcctctgcctgctggttccagtccgtgtcctcgacttgcgtctgctgtccaaggtcctctagcttttcgttccatcccagctcctcaatttgctgctgctggccgagatccacttcctgttgcaatggctcgtccccagaagcccggttccactttcctaagcttgcgcttgcactggctgaggagccggtgggtccaccgctagccgaggcggaggctgagccaactggcacgttgaaggtgtagtcctggcgccggtactcgaaaccaccagacggtccaccacgggaatagggaagcggaggctttggcgtagacacaatgggtgcgggattcgggggtctgggacgagcggtctcgccctccagtcccggctcgtcaccctcgacaaaggattcatcgtaagtgtggggcggctggtcaccgcgatccttggagaatattggtttgtagacagcagtggcattggtgcttcctgcatccaccacataaccgccattggagccgctgtccgcgggcaggtcaatgagtccctggctcagcaggtagagtgtgcggcgccaggcgaccagctct

SEQ ID NO: 33350 - DNA, 993 bp, DROSOPHILA
atgggttcatgccttggcagctgtgccacagctgccgccgcaccagcccactccgcctgcacctcaacgtccgactccaccacccactcgacttcctcgacgtcgtcttcactgacaactccccccacgtcctgggtggccaacagctggctctggcgaaagaacagatctgcaggaagacaagatccagaggcagatctcttatcgaggaccaccaggcagcgctgccaacggaacggattcatctaccgcatcctgcggctcaagaaaaggcagcagtgtcccagcttcctggacaagtactgggagcagcagcccagctacgccaagctgccgaccaccgccatggcggacattcaaatgcagaacctggacgccggcaagttgctcaacgcccagaccacgcccagtcgggagacggagatgggacttggagcctaccagcgcatggccaactcgcgggccagctcctccttggatctcgagtgggaacacgagtactcacagctgcggcagtatcagtaccagtgccagcaggtgcccaaggagctgccaccaacgccaccaaagccgcgctacgcatccttagaccagctggcggcagccaatgcgatggccaccagccaaggacgacacatggcgcgccaagccagactgagttgccagcgccacggaggttcgctcacgcggaactcgtgctgttcgtctacgcaaaactcctggtcgcacatatccacgccagagtcgctggaatgggacgtggacgaggagcgagagcagcagcgtcagcttcgtctggaggatgacaatctggatgatagaacgctcaagttgctgcatcagatcgagcaattgaagcaccatgtactgcaggagactggcgatggactcagcatggaatcagctgcggtcgaggagctcaccgagggccttcagttccgggcaacgcacttcgctggcgactcccagctggaggcccatactacatactag

SEQ ID NO: 33351 - protein, 330 aa, DROSOPHILA
MGSCLGSCATAAAAPAHSACTSTSDSTTHSTSSTSSSLTTPPTSWVANSWLWRKNRSAGRQDPEADLLSRTTRQRCQRNGFIYRILRLKKRQQCPSFLDKYWEQQPSYAKLPTTAMADIQMQNLDAGKLLNAQTTPSRETEMGLGAYQRMANSRASSSLDLEWEHEYSQLRQYQYQCQQVPKELPPTPPKPRYASLDQLAAANAMATSQGRHMARQARLSCQRHGGSLTRNSCCSSTQNSWSHISTPESLEWDVDEEREQQRQLRLEDDNLDDRTLKLLHQIEQLKHHVLQETGDGLSMESAAVEELTEGLQFRATHFAGDSQLEAHTTY

SEQ ID NO: 33352 - DNA, 2819 bp, DROSOPHILA
ccttctatcttatttcacggcaacaatggaaacgggcaactggcgaggctggggcaaaggaattcctgagctcaggtttatgcatagctccccggcacaagcaacccgaatgcgaaatgcttgtgatttaagtttaaagagccgtaggagaggtttaaggtcaacagagtttattgcttaaaactggcaagttggaactgggactggaactgggagaagggttgcccatggcagatgaatatacaataattaagggttcggtcggctgtcttggaaaaagcttaaaaagccagctgggcctgctaattaaacgaaaacattattaccatttgagaatttaatcttgcagacacaatattttgagtcaagtattaattatgccctattactaatccaggcgatcataagatagatgtggtctctgggtcgcctaactgccacattttcggcactccaattgaaatccaactttgcagcgaataatttcaagttgtctagctccggagtttgcccattgagaaagttttccgggtgaaacaataactgcagctgctcatcacgcccaacttctgtcccagacttctagataccagaacccaatcccacaccccgcccatcaccggtgccacctgtcgtggcggagagcaacagctcctcctggtttttggcagatcctggcttacaccaggttggggaattgcaaataaatatttcaactgcagttgcagattattttagtgctacggcaactgggaaagtcgtaacaatgcagaatggcagcaactaaggcaaacagctagccaggtccggagtagctcctctggggggcagcaacttggcttagatttctccggggacctatgataaagtgctccccataatgaagacaaaatacggagatgccgagaggagccaactttatggggtgtttttgggcaaggtgcccgctatttattcagcctcgcacaatttcaatttgtatctgctcgtatccgttcgattactttctgttcagattgtagttcctcagatagatgccagcgagaacctcctggatgcggcgacgtcgcttgtcctgcatcagtatggagaccagatgcttgggactcaatcccctgttgctctggcgatccatggcatcgatctcgtcctcgctgatcacgtcctcctcgcgatcatcgtcagcctggctgattggtccatcggccaggggaatctccgcatttccatcctcggccgcgttgaccacctcggaatcatcctcgaagagacttccatcggccaggtcgtccaggttgaggccctgcagcaaatcggaaatggtgggcacgaaggcgctgcgccgtgagctagtggagttggagctgttagagctggcgggcaggtagatgccctgcatgttgttggggttgatgatcaggtaggtggggcctcctcccacagtgttccagtccatgccgggaaacggtggcggaggacggttttgaggtggtggtggtgggtagtacgggtagtagggatagttggggttgtggtggtggtgtctatccgattcctgattcgagctgggctgctgcactatgatgatgggctgctgggagttgcggtggctctcctggtcgccgcgcttgatgttccacagcaggcgaggaacgatcttggagaaggctgtccagagacgagtgttggatgagtgtcctctgggttttattcatattgacttaccattttcctttctgttcttgccgttggaggcctgctgggctgcacaaaaggcaaccagagtggcgaggagaatcaagacgctcagggttctcatggtatgtcaatcgatagctgctggagatgactgtgctcatccactggctatctattgctatttatacaaaagaacttcttctgctgaaagttcagtgcgaatttcacaacctaactgggtaactgggcatactcggaatttattcatatcagctcgtaaatcaactttggcccaacgcactcctgcctcacgtttattacactcgtaaagtgagtcttttgaatggattcacgggttttctttcgccctcggccgctttcatgatcgatttagcactaagtagtctcctacagtttattttaaatgtttgtactttcagtgcctctgggcgctaatgtgtttagtttatagtcgtcgtcgacgtagatatttatgatctgtgtacaaaggccggcagattgccgatcggatctttgcgaactgaattagaggacattagccccaacatttgaatcattgaacttgggaagagtttagaaagccagtggtctcgtttccaaaaatataaatagatgactagtgctgagctctaggtataataaaaataaaagcatgtctctcctcctacggatgccatttgattcaccataataaacccatttcctgttttcggactgggcaaacagggccaatgttaaaagagcaaatactatctgaacgaatatccgttaccagaggcggtaaaagtaaaagttgagaccatttcatcctgtgcaatcaaaggccaaagacaacaatgagtcctgtgtatagcacacgaggtaaatattatttaagaaatcaaaacacgtagcctacacaaagtacaaatcgcactcaatcaaaatcacctcaagaccgcacacagttccaaagcttcccagatggaatcccgcctttcagacggagcacttcgagtagcagtcgtaagtaaaaataaataagaggccacaggacttcagctggagcagaggggcatcggcaaacagcaacaggagcgaaaacagaggacccaaaaccc

SEQ ID NO: 33353 - DNA, 762 bp, DROSOPHILA
atgagaaccctgagcgtcttgattctcctcgccactctggttgccttttgtgcagcccagcaggcctccaacggcaagaacagaaaggaaaatgccttctccaagatcgttcctcgcctgctgtggaacatcaagcgcggcgaccaggagagccaccgcaactcccagcagcccatcatcatagtgcagcagcccagctcgaatcaggaatcggatagacaccaccaccacaaccccaactatccctactacccgtactacccaccaccaccacctcaaaaccgtcctccgccaccgtttcccggcatggactggaacactgtgggaggaggccccacctacctgatcatcaaccccaacaacatgcagggcatctacctgcccgccagctctaacagctccaactccactagctcacggcgcagcgccttcgtgcccaccatttccgatttgctgcagggcctcaacctggacgacctggccgatggaagtctcttcgaggatgattccgaggtggtcaacgcggccgaggatggaaatgcggagattcccctggccgatggaccaatcagccaggctgacgatgatcgcgaggaggacgtgatcagcgaggacgagatcgatgccatggatcgccagagcaacaggggattgagtcccaagcatctggtctccatactgatgcaggacaagcgacgtcgccgcatccaggaggttctcgctggcatctatctgaggaactacaatctgaacagaaagtaa

SEQ ID NO: 33354 - protein, 253 aa, DROSOPHILA
MRTLSVLILLATLVAFCAAQQASNGKNRKENAFSKIVPRLLWNIKRGDQESHRNSQQPIIIVQQPSSNQESDRHHHHNPNYPYYPYYPPPPPQNRPPPPFPGMDWNTVGGGPTYLIINPNNMQGIYLPASSNSSNSTSSRRSAFVPTISDLLQGLNLDDLADGSLFEDDSEVVNAAEDGNAEIPLADGPISQADDDREEDVISEDEIDAMDRQSNRGLSPKHLVSILMQDKRRRRIQEVLAGIYLRNYNLNRK

SEQ ID NO: 33355 - DNA, 2303 bp, DROSOPHILA
ccttggccgccgctgctttgggatgtcaaaattttaataaagtcggggatgccacattggccgactgccatccacttggctcctcatcctgggcggtgtcatgcatttttgttgcaaaaaaaaccgaccaccgacgtttttcattttatcgagcgtcctgtttatgaactccgcgaactaagcgggcacttaaattgtctttacgccttgggggctcgtcttctgctccttaagacgtcgtcctttgacaaaacctccttctgagcccctttttttgtctcgggttttcccagaattacatccttttgggagtggaatttttggtaaaatttagtttatgtcggtctcgttcgtttatctttactgattgcacttttagcctctgtttcctgggggaaattaaaatgtacttagcgatgtctgaaaaggcgttaccaacttgaccttcgttttgtataatttacgtaactaacattgcgcttaataaattgtgttaagatcctacagtttcaaataagttctgtaaaaacggaaaattagagcgcattcattttattaacattttaattcattttgataaaacatcgacattagtcgttcttttttacttcggcgggcattccctctcctgtataagtcttcttagtttcctcgtcccgtgtcattttgaaccaaactaaagtcacgatcccaaggatgagtcctatgattactccaaggcaagcaacggcagctatgaaggcgacgaagtggacttccgttagtatgtaatccagtaaatcaatgatcggttggaccacgtggacgcagacgatttcaatggggttgggaatcattttggcacttgtgatagatacaatacgaactagttagactgagagtgaaaatcgttctgagccctgacagctttttcactgctacagatttctgtcgcatttcaccttgcaaagggcaggcgcgtagaggagcatcagatctaaaattttcagtttttgacattatggagtatcagcactatttgcagaatgagctgaccattttccactaccacctactcttcgactatggagcaccgatccaggtggccacttgcattgccttcggcgtcgtctgcggctggataatgagcctgatcacattcgttgtctacaaggcagcaattggcctgggcgccaaagccacggcatgtgacaacgatgataagtacgatgatctcgacctggacatgcatggggagtatgggtatgaccggatgttgtcccagtgccaggaccttagtgattggcttgtgaggacacagtagcttagacaggataacgcctgagggggcattcgattcgccttctctgtgcatgagccccaatcaaagtatctccacgccacttagaccgtctcgagtgcgctgagtgaatttttcagatactgttacagtggcagtatcggatattttctctgccgttctcgaagtcattagcataatgtatctcgacactgtcatggccttaaattgaattcagcatgcaccgcaggccgtcatttatgcaagtttatttctatagacgaaggccggaggttccaaatatttaataaaccaaaccgtttctgtttgaaaaattccctttttttcgtgttgattttactcaaacagctggaagctgttttccccaatttaatttaacattttgcctgttgcttttagaggaccttctgtgtgctccagcgcttaaaggtcaatcacttgttagcaaaaaaaatgggtttttaaatcagaaattcacaactgcatgctcgtaaacaccattttgtgccttgatgggtatgtaataaaaaatgtttctgaaagtgcacggcttatattaaaatagcaacaattcaaacagtagcctatcacgcacgattcattttttagaaaattgtaaacgtgggaagcactgtcttctcatggaggtgaaatattcaattttagatactttttgcaagtaaattgaatttattttacaaccccgcgtcaaccagcaaaacgacgagcaacccctcaccgcagacgataaataataatcgatttgactttggttagagtttggtcacagtggggagccaactctcatgctatacacagtaaaaaaatatttaaagcaacataaactttgtattaattcatagcaataaattcgtctgctttggtggttgatttaaaattgatctatattcatctatatctatctatctatatgtaaattcaatatattaaaagcgatttctatattaacgaattcagtacaaaaactttttgagatatgtaa

SEQ ID NO: 33356 - DNA, 303 bp, DROSOPHILA
atggagtatcagcactatttgcagaatgagctgaccattttccactaccacctactcttcgactatggagcaccgatccaggtggccacttgcattgccttcggcgtcgtctgcggctggataatgagcctgatcacattcgttgtctacaaggcagcaattggcctgggcgccaaagccacggcatgtgacaacgatgataagtacgatgatctcgacctggacatgcatggggagtatgggtatgaccggatgttgtcccagtgccaggaccttagtgattggcttgtgaggacacagtag

SEQ ID NO: 33357 - protein, 100 aa, DROSOPHILA
MEYQHYLQNELTIFHYHLLFDYGAPIQVATCIAFGVVCGWIMSLITFVVYKAAIGLGAKATACDNDDKYDDLDLDMHGEYGYDRMLSQCQDLSDWLVRTQ

SEQ ID NO: 33358 - DNA, 4572 bp, DROSOPHILA
gagctcagctaattcgtttgatctccgaaaggtataatatcctgttgaaatcaggatcgacttcgttgtaaagttaataaatgttataattacctgttataaaatcctggaatactatttgtacaaatacatttcgaaagtgaaaggcatgtttattttagaaaattcgatcctagtagagtattttgaatttctactagtaagacctaacaactttagtgcaacttcgaaactggagggtcctgattgctcggctacatagacactcatatacgtgcacacaattgtagctagcactcacacacgtgcagacattcagaggacttgcatacgaaattcgctcgttcgtcgaaaagttttgtcattaacgttcgttgagtgcctgcgactgtccttgtggctcgactgtggcccaatctgtctcccgtcttctggctgttatgttattatgtccttctagtatttctgttccacaacgaatgcgaaagaactgtgaggcgaacaaattgacaggcagtcagcactttcacaacaaccgtaatagtattattctaagaactaaaaacaagatttgcgcttaaatctatttgtaagaaatggaatgaagattcttaaaaatccttaaatcagaaaacattaattccttttgaatactttcgttacaaaatgtactattattgagcccaattttgcacctaaaatttgataaaagaagctcgcttttattccacagtaaaatcatgggcgtcaagttgcaattaatttcatttagtttttagccacacgccgtttttcctatccctaaggttcaacctctcatctggccaaatgctcctccattgtgccatccttcctcttcttcgcacattcctttttccttatggctaaatgggaaaagtttgaagttgaaggcagaaaagacttggacagaacaaatgaaaccgacggaaaagcaggaagacgaagatttgtaagagctgagaaagaaaacattcacaaaatgcaaactattgcactttgtgagcaaactgtactgaatcatatgcagtgggaagcaaatactttgtttttatggccgacatgcagttgcttgaacatttcttgccttcaactacgcatcaagtagtggttaaccaatgaaatattcgggaaaattcttttcatttgtcttaatattaggtaaatattttccatttgcgtttaattctaccgtttgcaaaactccttaaagattatgatttttgctaatcagatgcgaatagttctatatgtgaacagatttccagggatctaatggaacgattggcaaacacaggctgtcctttattgggtttttatcgcacaaaattagcactaacccgtctccgtctaattgcagatgtgccggacattgtgtgccaggactatgcggtgcctcacatgcagcagctgctgcccaatgccccgccatgcggttcgggatgcggaacaggcacgggcacaggtcctggaagggggtcgagtcctgaattcgttgttgccacaggcaaagtgaccgccagcgcacgcaactctcttaatgcggccacactgccgctaccttcgccgcccgtgccaccgccgctggagaaatattacgcagcaacgccagttagcagcaaacccatgccagtggcgccgccgggatcccagagtagtggatcccttagttcttcgactacggctgcgaccacgcccaccagtggggtggtgggcgtaggcaaaccgcatcattacaatttggatatgagcgcaaatttcgccgacattaacgaggagcgggccaattgccaagtgcaggagtttccacgtcagtcgctggtcatcgtcgagaaactgggctccggcgtatttggtgagctgcatttgtgcgaaacaaatgtgctgaagtaagtactgcacacagcaaacggaatgcccaccaactccgcactccatgcacaaacaagcattccactttgggatgggggcaaatctttagtgtaaaatttgcagatcgaccgaaactagttgctatagctactaacagccgcaaggtggagctagcatgccaagagtatctgatagccgtggcactcccatatcgtttactcttgttcttattaaattcaaccaacaattgccagataaagcaattaaatcgtagatttacttgattttaccgaaactttatttctgtgtggggtaatttactcaggataagtctgcttctctgattctagcttgtaaatggtgggttgacaggcttatgcatcccatcaagtatgctataaccgcaagactctgtatgtatagatgtacacataacctttgcgcccagttctattattcttccgcagaccaacctcctttcatcacttgaaatatatgcccatgactattgtaatccccagaattcaacgtctacgtccacgacgtccctcgtcggttttcatgcgcaaaaatcaattagagtcaagcttcgaacaatatcctggtggcaggccaatattctgcttctggcacattttaatacgttacgttacgtaacaattcgatttgccagcttgctttaatagttttgcggttggaaagccacaaaacgtattacgtatacgtaatattgcccagccagcaggcaaagttgcccagcactgcggcgcgtggcacgtggaatgggagtgagtccctgcagtggctgcaaaaccatcagagaaacctccgagactcagacagatgtatgcaaaataattaacacacacaaccacacacagccatagcgacccgaacataacacacatccagacagactttaatatggcatagggcattttgcggaaggcagctgagaggcaacttcgagggcgttcccattgccgcccccaagggcctgacagtctgctaaaatattaatggacagttggagagacagttatcagacaaaagatagattttattgtcctggaccgcaggtgaaaattataatagacgttgaaaatcaaagccacaacattacgaatggacgcaacaaaaattgaacaatttctttggtatttgtatatttcggcactgagccaaaattgaattctacgcaggctgaatggtgtaagaagtgcgtgcaggggtagagactactgtaaatatgcatatagcaaggcgaacagacagtattggtgtgctcttttcgattggctattctatagaaacttgagaaaggaggtgaatagctatttagttgcaatcgttactattctgaagctgtgttagatgtttttcttgatcataatcctagtgatctaaccgaatttgattcccattgcagcgctaccctcgtggcagtggccaccctgcgtcccggggccaatgaccatctgcgtaaggaattccgcagcaaggcaaagcagctggcgcagctgagcgaccccaatgtggcccgcttggtgggtgcctgcctgcgggacgagcccatctgcattgttcaggactactcgcactgcctgggcgacttgaaccagttcctgcaggagcacgtggccgagaccagcggactgatggccaagaagagtcttaggtaaggacccttcgcacaaaaaaaaaaaaaaaaagaaaccgtcgaaagtgctttccaactaatgcgttgtttctcccccctttttttctgggtgcgttttatcgtgcttcctgtaccgacgccttttgccgacgcgacacttccggcctcgtgttcaatgataacaccgatcccaaccaaccaaccaacccatggaccaaccaccgaattgcgccaacggatgtggaaacttcgttacttggctcgctcaccccaccaactttggcgacgttgtcgcatttgaaaacttttcaaattctcatttgacgctggcatcttccgcatccgctccgtactcccccggactcctcccccgcgtgctgctccactcggaatcggaatcgcaatcggaatccttacacgtctgcggcacagcttcgggtgcttagtctacattgccacccaaattgcatcgggcatgaagcatttggagcaaatgaatttcgttcatcgggatctggcgacaaggtaagtgccaaagataagaattcccatcgaagtggggagcaggtgatttccctgccaccttttcgcactccaagcagacacgaatttctttcatttaaacttgaagttattttgtgtttatgggcacaaagagaaatactttaagaagtgtcgcccggcttaataaaaatgaaatgaattattttgacacaggtagacagtgtgccctgcaggtgtgtttgctattataatacgaataattatacttaattataatatattggcaaaacataaatcgaatctggctggaatatgccaacttcgactgcaaatccgctgggtatcatatgtaatgcaatactttttagccagaagccaagcgtgtttttttgcagacaccattaacttttcgcccctgggagaagtcaggctaaaagcccaggtttttaactcgacatccacgaattcatattgtatgatctttggaggcatcccctcaaaagttgctttaatggaat

SEQ ID NO: 33359 - DNA, 801 bp, DROSOPHILA
atgcaaactattgcactttatgtgccggacattgtgtgccaggactatgcggtgcctcacatgcagcagctgctgcccaatgccccgccatgcggttcgggatgcggaacaggcacgggcacaggtcctggaagggggtcgagtcctgaattcgttgttgccacaggcaaagtgaccgccagcgcacgcaactctcttaatgcggccacactgccgctaccttcgccgcccgtgccaccgccgctggagaaatattacgcagcaacgccagttagcagcaaacccatgccagtggcgccgccgggatcccagagtagtggatcccttagttcttcgactacggctgcgaccacgcccaccagtggggtggtgggcgtaggcaaaccgcatcattacaatttggatatgagcgcaaatttcgccgacattaacgaggagcgggccaattgccaagtgcaggagtttccacgtcagtcgctggtcatcgtcgagaaactgggctccggcgtatttggtgagctgcatttgtgcgaaacaaatgtgctgaacgctaccctcgtggcagtggccaccctgcgtcccggggccaatgaccatctgcgtaaggaattccgcagcaaggcaaagcagctggcgcagctgagcgaccccaatgtggcccgcttggtgggtgcctgcctgcgggacgagcccatctgcattgttcaggactactcgcactgcctgggcgacttgaaccagttcctgcaggagcacgtggccgagaccagcggactgatggccaagaagagtcttaggtaa

SEQ ID NO: 33360 - protein, 266 aa, DROSOPHILA
MQTIALYVPDIVCQDYAVPHMQQLLPNAPPCGSGCGTGTGTGPGRGSSPEFVVATGKVTASARNSLNAATLPLPSPPVPPPLEKYYAATPVSSKPMPVAPPGSQSSGSLSSSTTAATTPTSGVVGVGKPHHYNLDMSANFADINEERANCQVQEFPRQSLVIVEKLGSGVFGELHLCETNVLNATLVAVATLRPGANDHLRKEFRSKAKQLAQLSDPNVARLVGACLRDEPICIVQDYSHCLGDLNQFLQEHVAETSGLMAKKSLR

SEQ ID NO: 33361 - DNA, 3592 bp, DROSOPHILA
ttccatcgacgctatttgcatattaaaatcaaaccccgaaaagtctacaaaaaacttttgttgccaaagaaaataaaaggcggcgaaggcgggagagaaaccgaaaacacaagcgaaaaatcaatgccaagagctgttcaaattagcatatccccccgagttgttaaatgttttttttttttcgactttttctaaatttatacaaatttgtccgtttttgtttttaaatatccagtgagcagggttgagccatcgctccaggcggaaatgcatctggacgatatggaaaaggatatagaaaaaacaaagtcaacagaaagttgggtaaacttttctggccattggtctagtcggtattgttgtcgctcatcgttattgacgactgtctgggttttcgatggatatattgtatgtttggtctgcgtcggggcaaaagtcaacatcgagtccgcggaggagcaaacaatcgccgacgcacgctccaacgcctttaagtaaacctacagctcagcgtaatgcccctttcacacttccgcttctcgcggatttcccaccccacttgtcattgctcgtcggggcgatgatatgacgtaaggcactcggtcatttttcatcataataatcgctcttcgtcgccgcgtctcccagatgccacatttcccctaattgctcacaggacccattagtggaggcagtttatcaaggcggacagcatccacgcctcgtgcggagtaggtgaacttgcttttttcgaacctcttaaaaagtgcggaggactccaaaaagtagaacaatcctgggtttacggatacagttctcaataccctgcagggaaagcaattagtcttgatctgagcatatttctcacttaattagaagaaaagtactcatatttataaacttactatttaacttttagctcctgtggtcggcaatttcacggacgaactagcgaacggcgagaaacagtcggtcacttcagagtatccgttgcagcgagatgaagtcggacgagcaattagcagcggaggtgaacgaagccagcacacgactcaaggtgggtagagtatattgtactaaaaagtacccccgatttgtttcaataaagatgagacttggctaatttagtcaagaattccattgatgtcgcttttagccaagctaatatcacgatgaagcgaatttataattactataatcattccatacttgttctttattaaactcatagtttattttcatttaaatatatctttaaaaacaataaatacaagtttattactttaggcaaaaatatcttccgaaagttaatgcaaaatcccttaaatctctttattagttatatctccgaagcctattgaccaccaggaaccggagacgagcttcgtcggcgtcataatcacagtgctgggcacaattataatgctgctggtggcatttatactactgatagtggctcgcaacaagcacgttaggagcagggagaacggattggatgccttccagcacaacttcagcccggacacacttaacggcaacggtgtcctgaaggtaagcgcctaagcgcaatcctcaagttgccattaatgtattccgccaaactcgccgggttatgtaacatgcaaagtgcataacaaccctggttcccgccggcatcctacggcgaagcttggtcagttggatccttggaccattccggatgcatgtcagcagccccgggggccaacagaacagcacagaacccaaaaaaatagatcggcccgagcacaaacgccggccatattccagaaatcatgattaaaaactgtagtaaccggacagcgaaatgcaaaaagagccccgggcaacacatgcgtttttttcaccatctactaccaatttttttttttttttgtaccccccaggtggtcacaacaatggatgacaatgagtcgtccattgacaagaacagtctgtaccatgagcccttcaacgcgaacatgtacaccagtgcggcgagtgcttgccccatgaatgacctgcagcgtcagcatgtatcacccgactatacaggtgagtcggtcaacgtgcactgcgagaaaagtttggtactcggtggagagagcttggtggggtttattttaaaattgtttgtttccaaattgttttcatcaaacatttttaaacaatgcagtagttccttgctctaactctttcaacttcattctctgcatctagctgaaccacatatttatagttaaattaaaaactattattattattatttaattttactcattatttgagtgattttttggcacaatgcaacgaagtgcgttaacccactaaaacctgtgtgctgagtgttaggagatcctgatggcagatgcacctatgacaatgatgtgtgggcacttgcccccagccatggaactactgggctcccagcacttgacggcagggctctcctactcccaatcccaatccgactgccaatcccactccccatcgctgtacgactggtacgccgggctgttggtgtcgctcttgatgagtttgatgttttgcgtcctggctgtgacaggacatgcagatgttcctgcggcacgatagcaaatggcaaactagcgcggggagcagcgggggggggggcaggaccgagaacgcaatgcttaatttagcggacaacatggatccgaaagtttggtggtgcggcgttcacagcgatgtatatgctgctcggcaaagaaaactggacggggctaaaaaactggtcggaagagagagcgttgttggcaccgcaggacataattttgaattgctgagccaggcggttttttcggaattttttgcagggtatgcaggctgaataggaggtatttaaaacaaaaagaaaaaaatgtacaaataccctaaacaaaatgcttcaacatttaaatactttccctaaatataataaatttcattatgactctttataaaccattttgtttaacaatagtataccctattacctaggttcaaacataatgtcaaaggattctccagcttgtgctaccgcttatcccggcaaagtcactggattccctaccaagggtattaccagttcatccggctagtacgagcatgttttgtgtgcccttttttttgtgtgcgacatgtgcacggttttaattgccacacggacataaaactgcagttagaagttacgacctgtgctccgtaaattgtaatgaattcttatgctcctctgttggcccgcaggggcaggttacaaattttttttttttttttttgtggtatccagcttggggtggtccttgtgtaagatgcgcttatctgcttcacataaaatcgacaacagccatgcagtacggattgttcgaggacattctcgttgagattccccaccaggcgatctgctcatcctgctcatccaactcctactcccactcatcataaacgtttgcagcacgcctttcatgcgctccagtcatttgccaaaaagtttcctgacgttgcctttgtgtgcattttataactgggcagcaaatatttgtcatggctccgctccactccgccctgcaattcctcagtctggctctgcctggtg

SEQ ID NO: 33362 - DNA, 702 bp, DROSOPHILA
atgaagtcggacgagcaattagcagcggaggtgaacgaagccagcacacgactcaagcctattgaccaccaggaaccggagacgagcttcgtcggcgtcataatcacagtgctgggcacaattataatgctgctggtggcatttatactactgatagtggctcgcaacaagcacgttaggagcagggagaacggattggatgccttccagcacaacttcagcccggacacacttaacggcaacggtgtcctgaaggtggtcacaacaatggatgacaatgagtcgtccattgacaagaacagtctgtaccatgagcccttcaacgcgaacatgtacaccagtgcggcgagtgcttgccccatgaatgacctgcagcgtcagcatgtatcacccgactatacaggtgagtcggtcaacgtgcactgcgagaaaagtttggtactcggtggagagagcttggagatcctgatggcagatgcacctatgacaatgatgtgtgggcacttgcccccagccatggaactactgggctcccagcacttgacggcagggctctcctactcccaatcccaatccgactgccaatcccactccccatcgctgtacgactggtacgccgggctgttggtgtcgctcttgatgagtttgatgttttgcgtcctggctgtgacaggacatgcagatgttcctgcggcacgatag

SEQ ID NO: 33363 - protein, 233 aa, DROSOPHILA
MKSDEQLAAEVNEASTRLKPIDHQEPETSFVGVIITVLGTIIMLLVAFILLIVARNKHVRSRENGLDAFQHNFSPDTLNGNGVLKVVTTMDDNESSIDKNSLYHEPFNANMYTSAASACPMNDLQRQHVSPDYTGESVNVHCEKSLVLGGESLEILMADAPMTMMCGHLPPAMELLGSQHLTAGLSYSQSQSDCQSHSPSLYDWYAGLLVSLLMSLMFCVLAVTGHADVPAAR

SEQ ID NO: 33364 - DNA, 2423 bp, DROSOPHILA
gttaagttaaggcataaggtccttggtgcctggtgtgcttttaactaactctattcctgcgttctgtgtttccaggccaatgtggacgacaacgattcgattggcaagaacagtctctaccacgaacccttcaatgtgaacatgtacacgtgcggtgtgaacggctatgcggcggttaatgatttacagtgtaacatgacgcccgactatacaggtgtgtaagcccccccttgaaccaccactccctcccccttgaccccttttaaccaccatccgtctgcggaggacgtttccgctggctggcgcgcaaagtcataaaatatggcgtcgccggcaactaatgcaaataaatttttgtggcaattcccctgactaagctgactttttccccttgtttcctcccttcctctctgctcgtttctcgaccacagatgtgccggaaggtggttacgccgtgccccacatgcaggattacatgccctcgtcgaaaatgggaggtggagcgcccggcggtggtggctatgtgaatgtgcggcgcaccccacctccgccactgagcagcatatttccgcgaccacccaccgttccgccgccgcccatggagaagtactacgccaccacggccatcttcaagccgctgaagggtccgggctcggagcgtagtggctgcagcagcaacaccaatacggtgagcagcggcggcggcaagagcagccacagccacagcagccactgcagcaccggtgggccggaccatagtggcatctacgacgacggcatcggcaccatgaactccaaggctaccgcacccatgatcaatccgtacagcagcgggaacagctcctcggccgccgccgccgccgcagcggagttccagcgcgccaggacctacaacttccgcagctatcccgacaacctctagttcgaagcctcgctgaagctggtggccgcggctcccaagcggatcactgccgccaccgcctccgccggcagcaccaccatgcccaagaagccgcagcacctaagcctggtcgccagcacggcgggcggatacgggtgcggtaccagcagcaagcccaagtacagcctgaccctgcacaacagcaaactcgccacggggggcaagcacctgcgcgatggcctccagcagcgccagcacctcaaggccgtggatggggttgggctggtgcccgtgcccgttaccctgcccgtcgacgaggtggtgggtgtgcacctgaaggccggctccgaggcgggggccgccacaggcgaggcttcgggcagtgtcaccaggcagatggtggagagcggcagcagcggcagcggaaaggacggcgccaaatgcggaaatgacaatgaactggggggcggagtggcaaacggtgtcatgaggacacaaaacaacaggctgtggtatcattgatgaaaaccccatattgaatggatttgaggtgagttttattagtacacaaattcaatacataagaacttttgaactataaagtagaacttatgaagtagtaaagtaatagatattacaggtgatgagatatccattaaccccattgttttattacttttatttcatctacagcgatatcctctaaacggaaatcgaattgaaaattgcaacaagtactaaaaaaaagaggacgttacgccgaaattaaaaatcaccgagttaagtctacgccaaaaatggcgaatcggacagaaataaagtcaagcacaaatagttggattgaaaaggcccaacaattgaacccactgagcaaacaagaaacgcagcgaatcgaatcgaatcgaaaacgaatcaaatcgaatcgaatcgaaaacgaagtcaagtcgcctaccaatcatttatagtgtagggtcgagaatatgccaacaacgtagctaatgaaacatgttaagaacaccctgtaaatatacgagtttaggaatcgatagtgaagaatctgcatctgatggcaaggagctgagttgcacggaggaatccaggacatcatgcaaaagaaaaaaaaaaaataaaacaaaaaactcacgacaagattatacacgaatcatgagaatattgagacgaatttaaggtctagcatttagcgacacaatttgtttataaaacgaagcaagaaataatattatattgaataacacctatacgactaactagcttataataatgtttaactgatttgtagtactctttcgggaagaacactgcgatctgcgaactaactgtacatgcctgtgaacctaccccgactaaacctgaactatatgaactatctgaattatatagtatgaactatctgatgaaccctataagcgcctacactcacactacttaagccccactgtacattttctgtgtataaacttatagacatagattgtttgctatagatggaaacacgatgacg

SEQ ID NO: 33365 - DNA, 423 bp, DROSOPHILA
atgcccaagaagccgcagcacctaagcctggtcgccagcacggcgggcggatacgggtgcggtaccagcagcaagcccaagtacagcctgaccctgcacaacagcaaactcgccacggggggcaagcacctgcgcgatggcctccagcagcgccagcacctcaaggccgtggatggggttgggctggtgcccgtgcccgttaccctgcccgtcgacgaggtggtgggtgtgcacctgaaggccggctccgaggcgggggccgccacaggcgaggcttcgggcagtgtcaccaggcagatggtggagagcggcagcagcggcagcggaaaggacggcgccaaatgcggaaatgacaatgaactggggggcggagtggcaaacggtgtcatgaggacacaaaacaacaggctgtggtatcattga

SEQ ID NO: 33366 - protein, 140 aa, DROSOPHILA
MPKKPQHLSLVASTAGGYGCGTSSKPKYSLTLHNSKLATGGKHLRDGLQQRQHLKAVDGVGLVPVPVTLPVDEVVGVHLKAGSEAGAATGEASGSVTRQMVESGSSGSGKDGAKCGNDNELGGGVANGVMRTQNNRLWYH

SEQ ID NO: 33367 - DNA, 4166 bp, DROSOPHILA
attctgcgcatttaaaggtttctaaaaatacaaaggccaaaaaaaaataagaaaacaatgacgggaccagagagaaaggccccggggacacacaaagggaattagttataaagggcatgcgacagcagcggcgagatctgcgctctgttgcaaaggatatgcggcatattcgccattacccacggagtcctttccccctcccctctcccctctctcactctcgggcactgcgtgtgataaatgtggcacgaaatattttaattattttaaacgttttatggccctgtggtcgctcagtcggatactcccaagcgagaaaaaaggggaaaatagcgctgccacccgaaggacaatggcagtgtcgaaacaaaagacaacagccagtcctgtctgagatccaggcgcatagctcaaaacagcaggctcaactccacgacatccccacaagaacttcacacagtaattacgccatttactgtctaagaaacgaggtcacccactcgagatggcatttgtgttttgttatgcccccaagatgttagcaggataaaaatcattccgcaaaacatacgctgcacggtatgggaatcctcggagatcaaagcgagctctgtggctgaaggtgggcaatggacaaatgtgcaggtgttgcttcaaaggatattagctatttcgggttacaaaagtgttagcatcaaatggattttcacattgtaaattagcttactcttatcattaaatgatatcaatttggtttaccgagtttaaactcactaattagaagcaaacatatataaaattgtatctgtatattacaaaagttacataacctcggggatgataagctattaaggtcgctgggatagataatatggctctatactacagctataaagcggatcatgccgtaatccgcttacatctatcagttacttgaatggcttccaatgagctccaatctaactctttgcgttttgccctctaatccccagtgcccgccatgggaaatttcaccgacgagcaggagcagcgcagcaactcacccagccaggcgcaggatgtccacgatgagaccaatggcagtgagtaccaggccaaccggaacaagcccaacggagtgggcggctcggccggaggcctcggcgagggcgtggcagcggcgggcggcgatatcgtcggcaacaacaagtacaacaacgggccgcaatgtaagtagctggaaagcatgataaatccaattaacagctcactttgccaatgcgaccccgatcgggccttttgccgctttttcactgctccggatgaatgctggctaattatttagttgaacaatatttacatttaatttcgtttcgacgcgcgcgtttgttaatttaaatttcaatttgccctttgctcttttccgcttccattgcagtaattgcgccacgccccatcgatcaggagccgaacgatgcgaacttcatcggtgtggtcatcgttgtcctcaccaccatcatcatcctcctggtggccatcatactcttcatcgtttcgcgaacgaagcgggcccgcggcagcaatgtcctggacgccttccagtacagcttcaatcccaacaccctcggcggcaacgtggacaagcaccgtccgaatggcaacagcatcaaggtgggtggaccatgctttggtcatggggcactggccattgggcactggccattgggcacttgccacttgggcactgggcattgggatacgtgtgcgtagtggacaggaaattcctgtctcgaattcccacataattgttcaatgtagcgtggagtttccacactgcttagtcctacgtgagcagctcctccgtccggcatttatttaatgggacttttcaacgcccggtgactgtgtgcgtgctctcttgatttgtgggggtcaggcttaagtggccagtgagggggaaactttaaagttcgacccactggaggtgggcaaattcgattaaagaagtttttcttcgagaggaaattaagagttctgtgtgcggaaaactttatcatcgcaccgtagaaaggaacacgaaactatccagctggaagtcaatgcaacagatgggccaagattggggcatttatttggacaagttgtgctttaatctagtgctgatgacactctggctataactgaatcaaccctttaatcgagccacaaaagctggacattctgtataaatctgaattgctatatgtcgttaaatacgacagtttagttaagttaaggcataaggtccttggtgcctggtgtgcttttaactaactctattcctgcgttctgtgtttccaggccaatgtggacgacaacgattcgattggcaagaacagtctctaccacgaacccttcaatgtgaacatgtacacgtgcggtgtgaacggctatgcggcggttaatgatttacagtgtaacatgacgcccgactatacaggtgtgtaagcccccccttgaaccaccactccctcccccttgaccccttttaaccaccatccgtctgcggaggacgtttccgctggctggcgcgcaaagtcataaaatatggcgtcgccggcaactaatgcaaataaatttttgtggcaattcccctgactaagctgactttttccccttgtttcctcccttcctctctgctcgtttctcgaccacagatgtgccggaaggtggttacgccgtgccccacatgcaggattacatgccctcgtcgaaaatgggaggtggagcgcccggcggtggtggctatgtgaatgtgcggcgcaccccacctccgccactgagcagcatatttccgcgaccacccaccgttccgccgccgcccatggagaagtactacgccaccacggccatcttcaagccgctgaagggtccgggctcggagcgtagtggctgcagcagcaacaccaatacggtgagcagcggcggcggcaagagcagccacagccacagcagccactgcagcaccggtgggccggaccatagtggcatctacgacgacggcatcggcaccatgaactccaaggctaccgcacccatgatcaatccgtacagcagcgggaacagctcctcggccgccgccgccgccgcagcggagttccagcgcgccaggacctacaacttccgcagctatcccgacaacctctagttcgaagcctcgctgaagctggtggccgcggctcccaagcggatcactgccgccaccgcctccgccggcagcaccaccatgcccaagaagccgcagcacctaagcctggtcgccagcacggcgggcggatacgggtgcggtaccagcagcaagcccaagtacagcctgaccctgcacaacagcaaactcgccacggggggcaagcacctgcgcgatggcctccagcagcgccagcacctcaaggccgtggatggggttgggctggtgcccgtgcccgttaccctgcccgtcgacgaggtggtgggtgtgcacctgaaggccggctccgaggcgggggccgccacaggcgaggcttcgggcagtgtcaccaggcagatggtggagagcggcagcagcggcagcggaaaggacggcgccaaatgcggaaatgacaatgaactggggggcggagtggcaaacggtgtcatgaggacacaaaacaacaggctgtggtatcattgatgaaaaccccatattgaatggatttgaggtgagttttattagtacacaaattcaatacataagaacttttgaactataaagtagaacttatgaagtagtaaagtaatagatattacaggtgatgagatatccattaaccccattgttttattacttttatttcatctacagcgatatcctctaaacggaaatcgaattgaaaattgcaacaagtactaaaaaaaagaggacgttacgccgaaattaaaaatcaccgagttaagtctacgccaaaaatggcgaatcggacagaaataaagtcaagcacaaatagttggattgaaaaggcccaacaattgaacccactgagcaaacaagaaacgcagcgaatcgaatcgaatcgaaaacgaatcaaatcgaatcgaatcgaaaacgaagtcaagtcgcctaccaatcatttatagtgtagggtcgagaatatgccaacaacgtagctaatgaaacatgttaagaacaccct

SEQ ID NO: 33368 - DNA, 1071 bp, DROSOPHILA
atgggaaatttcaccgacgagcaggagcagcgcagcaactcacccagccaggcgcaggatgtccacgatgagaccaatggcagtgagtaccaggccaaccggaacaagcccaacggagtgggcggctcggccggaggcctcggcgagggcgtggcagcggcgggcggcgatatcgtcggcaacaacaagtacaacaacgggccgcaattaattgcgccacgccccatcgatcaggagccgaacgatgcgaacttcatcggtgtggtcatcgttgtcctcaccaccatcatcatcctcctggtggccatcatactcttcatcgtttcgcgaacgaagcgggcccgcggcagcaatgtcctggacgccttccagtacagcttcaatcccaacaccctcggcggcaacgtggacaagcaccgtccgaatggcaacagcatcaaggccaatgtggacgacaacgattcgattggcaagaacagtctctaccacgaacccttcaatgtgaacatgtacacgtgcggtgtgaacggctatgcggcggttaatgatttacagtgtaacatgacgcccgactatacagatgtgccggaaggtggttacgccgtgccccacatgcaggattacatgccctcgtcgaaaatgggaggtggagcgcccggcggtggtggctatgtgaatgtgcggcgcaccccacctccgccactgagcagcatatttccgcgaccacccaccgttccgccgccgcccatggagaagtactacgccaccacggccatcttcaagccgctgaagggtccgggctcggagcgtagtggctgcagcagcaacaccaatacggtgagcagcggcggcggcaagagcagccacagccacagcagccactgcagcaccggtgggccggaccatagtggcatctacgacgacggcatcggcaccatgaactccaaggctaccgcacccatgatcaatccgtacagcagcgggaacagctcctcggccgccgccgccgccgcagcggagttccagcgcgccaggacctacaacttccgcagctatcccgacaacctctag

SEQ ID NO: 33369 - protein, 356 aa, DROSOPHILA
MGNFTDEQEQRSNSPSQAQDVHDETNGSEYQANRNKPNGVGGSAGGLGEGVAAAGGDIVGNNKYNNGPQLIAPRPIDQEPNDANFIGVVIVVLTTIIILLVAIILFIVSRTKRARGSNVLDAFQYSFNPNTLGGNVDKHRPNGNSIKANVDDNDSIGKNSLYHEPFNVNMYTCGVNGYAAVNDLQCNMTPDYTDVPEGGYAVPHMQDYMPSSKMGGGAPGGGGYVNVRRTPPPPLSSIFPRPPTVPPPPMEKYYATTAIFKPLKGPGSERSGCSSNTNTVSSGGGKSSHSHSSHCSTGGPDHSGIYDDGIGTMNSKATAPMINPYSSGNSSSAAAAAAAEFQRARTYNFRSYPDNL

SEQ ID NO: 33370 - DNA, 2252 bp, DROSOPHILA
tctttttttttttgtgctactaatgagttttacttaggattgccgtcacctcatctaaagccgagcccattaaaattaaaagacatcaaaagaaatttgcaaactaaacacaagcagtgggccaagaatgtccctttgccgggtgactgactggacgggcggcatgttcattatctctgctaggcccttttccgccctttgacccttttagccaactctgtcgcaccgcacgctttgcataagctaaataagttttccgggagcctctgcctgaaaatgcgcttgtgtcccgcttttcctcaaccaaccggcgttaaattaaagcgaaaactggcttgctcgtcgacgtcggtgaatggatatccggccggaggatgacgggcagtctgtttgctgtggccgctttctatggcactgctcacatgtctgctccggcagaaaatgttgcgaaataatgtttaatgaaaagcacaaagtcatccacccccccggctcgccgcattttccccattttccccatttccccagctctccttttgactgcctccctgactcgtcacgcacattcactttgcatccattcaagccgccccaagtcgagcagggaaaaagtcaacgcagaggatgactacaggctgttgcagatttggcaggcttttggcttttctggcggcaattaagtttccgaatcgggcacagttaaagcagaacgatgcgataactaaccgaagtgagaacaagttacacggagagaaatgaatttagattagggcaaacaatgaaaattactcgatataagttttcattcaatttgcggcagcaaaaaacgattgaacgactgataacccttaacccaattgtagccattcccattcgtttaaatgatctaacctattgtgatgtcagttcatcactttaacacttaatttgtatctaactaaatatttgttgtgttttcttcattccagatctcactgccactctagaatcacacgtcgctatgaagcacacgtcgcccagtgaagcgaccttctccagcaacatcagcatgttctcccgccagtgcctttcccacctcacccgctcaccacccacgaccacgcccacagcagccgctccccgccctccatgccgcgccccccgctggacgctgtgcctctggacgctggtgatcgccagcggctgtttaatgctcaacgcaccgacgacgatggcatttgatatcggtgagtaccgggtccagttgaattgacttagcaggcaagtcaagaagtccgaaggtataaccccaacgaatatgtcaagatgcccagataaatggcgacgctgcgcccaagatgaccagcgctgaagggtcgccctcttgcttggcttggtttggcttgactgtatttatttatttaattgacattgaaagcatttttgttacggcccgtcatttcgcgacaggcgacacagttggggtttttctgccaagccagatgactgctccgcggggagtcctcaactggacatgctgcagcatcatcaagcgccgctgcaggctctgcaacgggcccacatggctgtggggcatctggctgtgcagcagctccaactccggctcattaataggcatattgacatttttatgctgcatttaaggcatgcttttggtctggtatgatgtgatgtggtatggcattggagtctgctttaatgaagccatagcgcactggcttaggattacgtcccatttcaatggccatcgcatgtcggcggttcataaactccgtgccactcagacgagaggcggtggccagtgaaaagttgtccccaaatgcctggggctgggtaaaagcagtggcctggaaggagctgcctcattgatttccgaacggaacttcattacaataattatgccggaagagggaaattttgaatcgaatagtaggaaaataagcccgaaagttttaccacatacattgaagacattcaacttgcaacatcagctgccacaatatagcccctgcccccccaatccagaaacgaaaatgaaatctttctgccataatatttatagttaatcaagcaagccaaatacataaatacaaatctataaacacccgaaatgaacgggttccagaactcgactgcctccgttggctgccctagcagtatttgcacttatcccacccccccaatccccgccagaaaagcaaacacatgccaaaggagcactctgccgaaggttgttgttcctgttgttgttg

SEQ ID NO: 33371 - DNA, 252 bp, DROSOPHILA
atgaagcacacgtcgcccagtgaagcgaccttctccagcaacatcagcatgttctcccgccagtgcctttcccacctcacccgctcaccacccacgaccacgcccacagcagccgctccccgccctccatgccgcgccccccgctggacgctgtgcctctggacgctggtgatcgccagcggctgtttaatgctcaacgcaccgacgacgatggcatttgatatcggtgagtaccgggtccagttgaattga

SEQ ID NO: 33372 - protein, 83 aa, DROSOPHILA
MKHTSPSEATFSSNISMFSRQCLSHLTRSPPTTTPTAAAPRPPCRAPRWTLCLWTLVIASGCLMLNAPTTMAFDIGEYRVQLN

SEQ ID NO: 33373 - DNA, 2408 bp, DROSOPHILA
ttaaaggcgttaatgcagcaacacatgagtccgatccttggcagctaccctgctgtcagagccatcacaaaaattacattttgccggctaattacaatttcaaattaaatcacaagtaattagctaaaagtcaaagacaaacatgccaaacaatggggcgggcttgggaatttgacagcattttatgatttacaaacgcaatgtagattttttgcctaatggtcttttgttttccgcttgacaggtgggtggctgggtggtggctgtcggttgttggttgttgttgggcggtatttggtgtgggttggtggtggtgcgggtcaggggtcacgccactgccagaatatttgcctgccaaatgaaagacattaaaagcgacaacaagcagccaaatgggcaaaacaggcgacacattaaaatccatttttaatgttgatgtgagtccgccacaccgccccctctacgacccacatttttccgaagcattttcttccttatgtaccatttccccgtcgtgtttattatttatacatgtgtctgtctgttctcgcctctctttgacttttgacgttcccctatccctcatctccatttccaactccggctccagctccacaatccacaattccacccacaaaatgagcatttccaccattagtctgacacgacgtccgttagaaatgtaatctaaataattacttttattgcgatttcgccgtatggtaatcagcgaaatcggaatggtgtgtcaagcatttttcaccgttttcagcttctgagttatttttatggcgcatattaatgagtttaacttccgcagtgaagctgcgaaaaatgaaacatttcttgtcattaatttcaatgttttataaaaattagctttagacaaactaacatttataagcaggcacttgaaaaggagtcatagtaaagatataaaaaaattctcaagtaatttatacgcgtgtcatttgtaggggaattcctttggttacttgccatgtaccattcttcaggcccatgtcgtgcccacttcaggcgatccagtcagcgtgatcggttgcccaggctgagtagctcgtccaccatggatgtggcacctcgctttcagagaatacgacgcgggagcacttgcgaggcggagaggcgagtggccaaggcggcccaggacgccaatgtgccgccggccaagctctatctacgctccacctcacggggattgcgtcgtgtcctcgagatctatatgccacgattccagcccgacgagcacttggccagcgccgaggaggagcagcggtcagaggacgaacttggcgagtcagccaggacacgggagccacaggaagctctgcccattgccaccaactgggcggtggtgaagtggcggacgtcggatgcggtcgcctgatggcatcttgcttggatttgctgtaagtggacttgctgcactccatcgaacttttaataatctgctgctgccgacagtaacgaccacttgatggggctcctcctgcacttgggagtggaggatgattgaaaaaagagaaacaatgccaccaacatctgcttccaattacactcgattgaggatggggaaaaacgccaacgggctggtttcttcagacatcaacacgagcacttactttcttgttctggaactcggggcgtcgtacgaatgtcaacggaatgtttgtcagctattatggaaatcttaaaacattcctaattggcagcagcaaaattgttaatatatttgtaagtggttatttaaataaatcatggaacgttttgtaaatgtacggttataagggtataattaatgcataaccagcaacttatatgttttttaggagtaaagaataatgtaacttttctttatttgtatatcaagttaagaacaacatatcttcatactaaaatacccaaccaatcattattaaagtcatgtttcttacaagctcaactcaaagtttcaaatttcacgaaatttttcattgaggatggtttccgtgcagatctggatttcttgggtgcgcattcaggacctcttccgctgccatctctccatttgggcacgcttactttagcgccctgtcgcccatttagcccatccaggctcatccacatccgcatcctagccaccgcgcgtccttgctcactttgccatatgctttgcataacttagggcgcaacaggaaatgaatggaacacgccccaccgactgaaacataacgaaatgtggggaaaacaacgtggcagcagcaaaaacaacaaacagggccgtggcacagttattccacgtactttccccaccacttctggcgactttctccccgcggcagacagcataaaatactcttgtaatatcaatttaaagccgaacgccaagtgatacgctttaatgtatg

SEQ ID NO: 33374 - DNA, 408 bp, DROSOPHILA
atgtaccattcttcaggcccatgtcgtgcccacttcaggcgatccagtcagcgtgatcggttgcccaggctgagtagctcgtccaccatggatgtggcacctcgctttcagagaatacgacgcgggagcacttgcgaggcggagaggcgagtggccaaggcggcccaggacgccaatgtgccgccggccaagctctatctacgctccacctcacggggattgcgtcgtgtcctcgagatctatatgccacgattccagcccgacgagcacttggccagcgccgaggaggagcagcggtcagaggacgaacttggcgagtcagccaggacacgggagccacaggaagctctgcccattgccaccaactgggcggtggtgaagtggcggacgtcggatgcggtcgcctga

SEQ ID NO: 33375 - protein, 135 aa, DROSOPHILA
MYHSSGPCRAHFRRSSQRDRLPRLSSSSTMDVAPRFQRIRRGSTCEAERRVAKAAQDANVPPAKLYLRSTSRGLRRVLEIYMPRFQPDEHLASAEEEQRSEDELGESARTREPQEALPIATNWAVVKWRTSDAVA

SEQ ID NO: 33376 - DNA, 2198 bp, DROSOPHILA
caatgccgccagtgtgcagccggtcgtgcagccgggcgttagggcaatcgacaaccaactctaccgccgttatgtgtgcgtttataagcccgatggattccgcgctctggtccccggaagttgctcccagtactacgagtgtcagtcaggtgtggcccttgtcaacgtctgctcgcgcttcttcgatgccaaggcccagggttgtgtcaactacaacactggctgcattgagtttcagcctgcatcggcaagctctcctgtaggaggctcgatcgccgcagtaccatgtgcggaggaaactacaacctgtgcaccacaaatcataacaacaacaacctgtacaccagccagcgtaacaaccacaacaacctgtgcaccaacaaccactacaacctgtgcaccaacaaccacaacaacctgtgcaccaacaaccacaacaacctgtgcaccaacaaccacaacaacctgtgcaccaacaaccactacaacctgtgcaccaacaaccactacaacctgtgcaccaacaaccacaacaacctgtgcaccaacaaccacaacaacctgtgcaccaacaaccactacaacctgtgcaccaacaaccacaacaacctgtgcaccaacaaccactacaacctgtgcaccaacaaccacaacaacctgtgcaccaacaaccactacaacctgtgcaccaacaaccacaacaacctgtgcaccaacaaccactacaacctgtgcaccaacaaccacaaccacgtgtacaccaggtattacaactacgacatgtacaccagcaaccacaacaacctgtgtaccagagaccacaacaagctgtgcatcatcaacaacgacaacagaatgtggacccgtaagcggagtctccggatcttcgaaggcgaggccatcgtctgtgaaagtgcgaccagcgagacccgtgcgccctgccgttcgtcccgcattggaaatcgatgaactgtcggctcccaaagcccaagagctaaccatgtccacctatacaaaatacgtgtgccgcaacaagccagatggcttcatgttggcctccctgaagagctgctccgactactatatctgccgatatggaaagccactgttggtgagctgcggcgataaatacttcaacgctctgaagggcatttgcgatctgcccgagaacacgcgttgcgtgcagccacaagcataaaacttgacgatggcttcctaatcgaaatcaccaacgaatagcactacctgaccccaccttgatatttgtgcccgatcgattctttatcatatttactaaaatttcaatatatgcaaaagctaatacaagcttaaaaaataaatctaaagtatccgtactccttttagttcaaagcttaataaatacgtgacaacgcattacattcaatttaaaccccatagtaaagagaagaacaggctgcaaacatacttttagccaccagctatttgccaagacacgtctggcagtggaaagaacaaaggtgcaaaggcacaagatgtgttctagctttttcaacattttatgtaaaaggcttaagcggattcgcgaaaggattggtggacaaatttgttaggggctgcgatttccatctgcctttccccacattttattatggtctttaatgaaaacaacgggaacatatttttattatgctatccaatgtaattgccattgtccgagctgaaagaaaaggatgttgattagatggtgcttgtaaggatatggttattgtatagaatagatttatagatatatgttgggccatatgtgttgatatattactgaacgaaatttcttttccagttggctagaatcaatggggactgaatgtcgaaagtcaaagctcgcacagtaggcggtcaaaaatcagtgccaataaacaaggaacaggaatgaaaaattcgcaataaagccaacacatggccctctttccgcgcagcccgtttacagctcctcgctttttcgcgttctttttggaaacggaaacgcttgccaggtctgtaaaataaaatcggctttacccttttgcaaatgcagctgaagaattcaaattagagttttgattacaatcgaacgccacagccgccgcctccgcctggctttttgcaaaagatttattgaactgccacgcccctcgaacacgctaaccgctcccctttctcccacccccatcagccac

SEQ ID NO: 33377 - DNA, 198 bp, DROSOPHILA
atgtccacctatacaaaatacgtgtgccgcaacaagccagatggcttcatgttggcctccctgaagagctgctccgactactatatctgccgatatggaaagccactgttggtgagctgcggcgataaatacttcaacgctctgaagggcatttgcgatctgcccgagaacacgcgttgcgtgcagccacaagcataa

SEQ ID NO: 33378 - protein, 65 aa, DROSOPHILA
MSTYTKYVCRNKPDGFMLASLKSCSDYYICRYGKPLLVSCGDKYFNALKGICDLPENTRCVQPQA

SEQ ID NO: 33379 - DNA, 9635 bp, DROSOPHILA
cagcaacaaagtcatgatagtaaatggcattttaaaatgcaacccaagcgattttccagtgccagtgtatgtgtgtagcatggaatggtggcgctgtggagctgcaaacacaaacaaaaccaatggggctggccacaactgaggaaaaactggaaaagtgagccgagttggcgggagcagatggcggtaaaaagctggtgatacgatttaattgcaaataaagtaatttttaattgaatagccgccaaagttgatggaaaatcgttttggccaactgcatgcgcacaggcaaactcttattgggatttcagcagaacgatattaagattcaatttaatggataccttcctttgatatatagtacttcaaaatcaagcaaaacgaactctaaagcatgtctaatatcctgagtatctatcagttctcttatctggtttcgattcttattttatccttaagatacaaaaacgtgacatgtcaagtatatacgaaaccaaagtagttaatccagtgcaaccgcagaccttttcaccttcattctcgaggattttttcagcgctaccattttcagcaacttctttttgtatccagtttgcttggatttcactgcgcttatttgcaatcatcgatttaattgcaaattaattgcttcatcattggcatgcgcatggcggtcattcagcgcagacactccactggcatgaccccaatatgctgctccaccaaaactgatcccccaacacccaaacccgattacggacccactgtgactgaatcctccggcaagtcatcaagcaaatcgcgagcatctgccgtttatttttacatttcacgctcgctgctggctgcattactttgtaattaatgcggcaaatggtttgtttgcatattgattacagctgcaaaaagccaagcgcaggtcagtcatttaaaagcatttgtgctccaccacactcattccctctattcgattcgatggcaacagagccaaccgaaggctatgggctatatcatgtccttcttcattatctaccatctgtgagttccatcaatactttgaaaaccatcgaaagtgatttcaaagactgtgaaactatctggaatggtttatttcgaaaatcaaacaagagtaagtatcaggcaattttacagccaaatgactcgactagcacttaccccgttgttattggctaacctcacattctagcttttatggcacccgtctgagtggttaaccttagttgatcaaatttttagaaaaaagtgcttttggttgcatcttgttcaaattgattgacttgccggcacttggccataaaccaatgtaatgctaaaagaaaattgccttgtctgagcggtggaaaatgtatgtgtaatgaaatttgcagcgtcaattgcattcgtctactggccacacataacgaaagagcccgaaggacatagaccactcatagatccttctgtaaaatggtggacaaagaaaagctttctttgccgcatgtgtgaaaaaatgtatatgaaaagttacccaataaattcaagaagcaaaacttggatggtagccgactgtggcataccttttattgattcggattagcctgaaatattaaaaacattgctatttaaaagatacttttataatgtttccgaaaatggatattcaacatgcagattatgttaaatcctaagatatagtaagtaatcgagatagaagcaatttgggggagtgcatttatagaaacatcatccttaaagttcccgcaaacgcctcttcaccaaaatggcaaattttactgcccgaaagaagtcagtgaaacccaatactcaggaaactgggtctccaaggagcatgccatacagtatgtacccttcagcttcgtcttcatttccatcaggcgtacctattttatcttttttccaccgtgccttccaaagattccggcgacgatgtcggttttaaattactcaaagaaaatgaatgttacaacaaaagtgagttttagctggcaaattgaaaaaaaaaatgaaagtcgaaaagaaattcgcacggaagctggcggagtgaatcgaatcgaatgctttacatgttttcctctaaaaatgaaagaaagttaatttaatttgaagtctcgaatgcccacatatgtgtcttgtatctgcatatttgtgtttgaatgcacgcgtgtgtgttggattgtaaacgtaatttaatttaaccaaaaatgcgtttatcagttattcgagtgcttactgtacttgaagcttaaagtcaattaatattcaatggaaatttccgatactttctgtcgaatactaagtgctgttgtaaattagccagagacaaaacactaattgaattaagcggatttgcaaatttattgaacatgattaaagcaattgcattttggctgggctttaccatatttccgtgtgtgagtgcccaattttgcacttaatcactattagcagagatttctataactataacatttacctataacatactaacaatttccttcttcatataaaataaaacaatcagaattcatcgagaaaaagttgagttgattgattgtttttgatcgtcttgcgccctactgtacttttaaatattattgttcatattgtgatgaaatttaattactttttagagtgcagacattttaaattattcattattttctgattgcacatatgtggtacatacatatgtacatatgtgtaagcctgctggagtgggcagttgtataaccagcgcacgcaataagaaaaatttcagtttttaattaaatttgtacggaagtgaagccgtattaaacggaaatgttgaacagtttgaattcagacccggccgccacctcgtcatcatcgtcatcatcatcagcagcatcatcatcatcatcatcagtgccattaatatgagaatcattgccaaccttcattttcgcaacatccgtgcctttgtgttgcctgtcaggttgatttttgcgctcccgattcaattttcacttaactcaatttaatggaggcggtggcgaaaaacctactggaattcaaatccgttcgaaaaacaaacttctgaaacagcaagaaaaacttccagaaaaatttcgaaaaggctacattgttgaacaattcattttagttttctactaacttcaacttataaattcgttctacagttttgtggctttttgttaaagccaaactgggcaggtttagctccaaatttcatcgaactacgtcctatgctgttgaaatactcctgcttgccaaaaatacgccagcttatatttctatttggatattgggcagccagaagaacctaacgatgtcgatgcaacaccataacttggctgcgaagaactaccgcatggagacggtgaatcgcacattaaacatgcgtgctcggaacaaaaatgaaagggaattgattggtggcttaactgaggtaatggagaccaaagctaagacaaagccgaaagctgaagctaccggcaagcggatatgtccaccgcgtaagaatccggaacgcaagacgcgagaggagcggaccatcgaaaagttccgcaacatcgacttctttggtcagcgcgactcgaacaatatattgacggttcagaatctggagtttcccgacgtcaatgtcaagcgcacggagctgcacaagcgcgacgagtgcggcaaggtcgttatccgggccagaggacgtgacttcgagagctcgagcaactcccacttcagggatggcatcgagacggtgaagctacgcaagagtgtctgctccacgacgagcacggcaaagaagtcacagagcgacagtggccaaaacggcggatcgatcagagagtcgtccgagaaagaaccggactcggacgagctggttgactccatgcacttgccctccacgcggccgccccatttcaagggcgaggagtggcgacgaccgtgcccggccagctttgtggccggtgcaccaaggccacgcattggccgatgtcccaagaactacgagcagctggccaaactgacgcccgccaggcagaagttctttcttacccaggatccgcgaaagacccactgcctggtcaatccggtggcgttgcgccacaagccattgaccaaggagcaggagttcagcctgatcagtaagctggtcaagcatggggacaatctctgcgccagcaccgcatcggagacatccgacacgcacatctgcgaggtgatcgatctgcagaatccgctgcgactggactttcacggcatggactacaagacgacgtacgagcaggacgaggtggagcagcagaacgcgctgaccttttggcgcgtccagcgctacatggcacggcgaaaggcgaagaagaacaccaaggtaaatgtcgaggccgagctgaaggaggagcgcctggccgtgccgcagcgctacaatacgacgatcaaggatacgcccatagagacaccatcgccgccgccatcgccacggctggttcatctgtatcgcagtccggacaagccggccaacaagctaaagatcgaagaggagcgtcggcgccgcgccgcacgctacaaggacatctatctgcgaaagaagcagcgcgaggaggagcagctgctggagcggcgcaagcaggaggcggccatcaaggagatcgaaggacgcacggtcgccgaggccgatctgcgtgccgatgtggccgtcatcgacgatgcaattgagcgcagctttcgcaaacacgtggagctgaagccaattatacggaaacgtaaggtcttccccaagactctaaccgaaacggagcgcctgaaggccatcatgcaccgtgaggattgtgtgcgtcgcgacaaggcgagggtcacccagcagttctatctggagcgcactggcaagcacaagtacatgccggatgcggagcagcagctggcctgcgacgagagcatcgagggcagcgtgggctccacgcccagcgagcaaagcagcgacgacgaggactacctgcaggtgggcaaaatcggcgacaagttccagctgcgtggcttccacttcaagcacggcgacgggctgcgcggcaagctccatcgccatcaaattatgcagggccagcggacggttaagggatgtctcacgcgcgaagattggctcaaccagctggtgccgcacaaggagcccatcaagctggacgtggagcgcggcattattaaggttcttgaccccgacgacccgaacttagacctcttcccgccggagccgctgctggtgcggcggcgggaacgccaaagcgccgtcagggagttcgtccatcagaagcttggactccactaccaccgacggctgcgcaagaatctgaaaattgtcaaaccgaagccggcgtacaatgtgaggaagtttaatctcatccgctacgtgtttcccgagaaggtgcttgtgccagacgatcgcattccggtggaggaaatggaggtgctcgatgccaccaaggtgaacaccacgctggagtatctggatatgaagcagcagttggccaagtccaagcgccaaaagaagaaactcgcccggatgcagttgctcggcctaccctgtatcgaaaaggagcagctgagagcggcggatccttgtctggaggtggaggaggaactggacgtggactgggtgccaactccagagcctccatacaatgagggcgagggtcagtcgcgtcaagagggcggatgcgaccgaccaccaaggggaccttggaaacccactcaattcctggttccagaaaatgctcgcaatgctgatttatctggcagttccggcttacagtgcgccacttctggccaggaaggcaccgccatggaacgttttcctggcggcaaagagtcgcagccatcacgttggcgaggaaatatgcctgcacccaaggagcgggagaagaccctgacgattcatccgcgcaggaaacgtgattacgccgccgagcgggttccgtcggcgatattcaacgaggtgctgcagaactccgccctgccgctcctggagcaaccggaaccggagaagctgcgcttcgccaatgtgaggaccaaaaagcgtccatacacggagatattcgaggccaggcaccaccacgaccactgggcaccgacccaagtgaagaacgttcatgtgcagtatcagccgaagaccgttatgcccgagattacgaaggtggagaagaaggtcaagcagccggtggcgaaatttgcgcgtgccaagccgcccagcagcaagtacgtcaacatggacttgaccatgcccagctatgatttcgacaagatgatatccgagcatctggccgccacgcggacggacaacaaggaggctgccggcgaaaaggtgcccgacctgtgccgaccatacgacttcgtcttccactcgcgcgatcccgaggagttggccaagctggacttcccaggccgcaaacagtatctggatctgctgcgcgagactcgcgaggccatttacgagaccaaggacatcgagccaggcgaggagcgtctgctggtggatcgcaaagcagttgtcgccgagctggaggaggatctgaagagcatcgagaactgtctcagctcgttgaccagctccgagtgcaccgatctgtcgaacgacagcggtagctacatggtcatcgaagacaagaccaagctgccactcgactacatccgcaagccactggttcccttcgaggagatgcggcgcgcacgctttcacgccgcggtgattgacgtgaatgccgaagaggaggatccctatcgtatgctgcccttttcgggccagcacaaggagcaggccgatatgctggggcccaaggacacgtttttcaccttcagcacccggctgcggaacagtctgcgactgcggctggaagtcgaggtgcccgatgttcgcaaaacgctgctgggtcccggaaaccacaagtactacggagcggtgatcaccgacctggacgagaactacattgaggagatgaaaagtcgcgccaccattaagtcgttcaagttcaagaccagcatccagctgcttaaggacgccatgcggctgaagtacgagtccttgctgatccagggccagatggtgcgcaccaagatctacgatcgcatgaatgagcgccactgggtggacatgaagaacaccaagaacctgtacgaggcactcttcgccaagtggaagaagaaggagtacaacgccgccatgacgatggtgtaccaggtgaaatcctactacgagaccaccgacaagctcaagcaggagtatcgcgaactggagcgcgaactgatgatgctcaacatggatattgtgttcattgagggccactggatacgttgcatcatgctgcagaacttccattacctgatgggcgaccaggactggcgggcggagaacgattggatacacttggtctccaaaggaacgcgcaaaagcagtgtgaagagcgatgccgacgacgagcaagcggcagaggacatggaagaggaggacatggaactggagccgtatgacgtgtccattgcgaagcgagccattgtcaacattcgggttcgcgacaaggacgatgcctgggccatccgcgccttctactacgatgtctacatgcaaaagcttcatcccattctgcaggtcttccccgatgccgagtcctttctgcagggcatcgatagcctcaagaacaagaccttcatgctgctcctggaaatgcacttcacattgtccattcacaccgagcttcagggccgactggagacattcgtcgactggtgcaccaaggatttaaaagagaaacaggaatacgtggcccgcaagtcggccaagaagttcttcatggaggaccgtgcccgcgagatggagcagcgagtccaccagtacctgggccggcccatcgaggagacaatagcggacgaggacttcaacaagcaccgtgccgtcctggccgaggtgtggcgccgcgtggttccggactcggtacgcggcaccagcgacgtcctgcccagtgccgctgacatggtggccgccatcagcgatgtagtcatggagattctctccaagttcgagcacatggatatcgagaaagtgcggagcgtggaggccacgctgcgcaagcgccgccgctacagggagaagctctcataccaggcctaccaggtggagcgccgcattgatatggagatgaagaaggtgcgccgcaacctggagccaccataccagaagcccaagcgtgagggtcgcctgccaaggctctacctcaagaagaagatcatacccgaggagaaggaggtgatggtgatatccgagaacactaagaactttgtgcgcgccttccgtgaggatggctacaccggtgaccagattacccacacctcgctcctgaccgtggacaacatgcaggagcagatcgtgcccttctacttcgaccacttcctcaagctcaacggctacacgcccaactacaacttcaggaccaacgttgatatgcgcgacggtcccgagtttagtcgactcaaggtgcgcgaggtcctgccggatgtcctggccaggctggagacctgggaaacgatgcacaagaagatcatggaggagaacatccagaggaaccccaagatgtacgagaacgtgatatagcttaccatattttctaactcatacaatagattaaatttcaagttcactatcaaaatttttagagctattttcttatcagcaggaggacctatttggaagtacaaataaaaaacacatattccagaaattgtatacaaaataaaaggtataaaactgacagtgttttgtattttgcaatccaagctaaacaggcaactttcccaggacagctttcactaccgatgcagctgacgttttttccgtttcgcctccatagtccttcctttatatccttacacatttctttcttttttttttttgctggccgtcctccttcgtcattctgtttgtttggctaggcaacagctgcgacggtaattttaattttttacctgacgtcttacttcattgccacttgcatagacttctaccccccgccctcccgccgcataaaacttgcatagcttttgtattatatttgcacataaatcacacaagtttcgtggcagagcattttctttggcggaaacatgggacagccattcaatgtatttccattgccgcaaaactacaggcaagtttgaaagtctgagggcattaacttaaatagacattctatatatttagccacattgaactccattgcatgtaagaccacatttcgatcaatcggggaaatcaaagtccttgccaaaatcagaatcttgacttgtcctcgcacagtgttacacaatttccattagcggctaatgaagcattaaaaagcgagaagaaatccaagaaaacgggaagccaacacgatatacttaacgccatattttgagggagtgcaaaaagcacatcagcgaagtgagttgggaaaataaaataaaatcaaataggagctgaatagaataaaagaaaggaaacgaaagcagtctggatgctggaatggctggctgcgctgatggcccaaatcccaatagactgaatattgagtgggtggagtggcgatgaggggggcccaaagtgaaatcggcaa

SEQ ID NO: 33380 - DNA, 5490 bp, DROSOPHILA
atgggctatatcatgtccttcttcattatctaccatctacccggccgccacctcgtcatcatcgtcatcatcatcagcagcatcatcatcatcatcatcagtgccattaatatgagaatcattgccaaccttcattttcgcaacatccgtgcctttgtgttgcctgtcagccagaagaacctaacgatgtcgatgcaacaccataacttggctgcgaagaactaccgcatggagacggtgaatcgcacattaaacatgcgtgctcggaacaaaaatgaaagggaattgattggtggcttaactgaggtaatggagaccaaagctaagacaaagccgaaagctgaagctaccggcaagcggatatgtccaccgcgtaagaatccggaacgcaagacgcgagaggagcggaccatcgaaaagttccgcaacatcgacttctttggtcagcgcgactcgaacaatatattgacggttcagaatctggagtttcccgacgtcaatgtcaagcgcacggagctgcacaagcgcgacgagtgcggcaaggtcgttatccgggccagaggacgtgacttcgagagctcgagcaactcccacttcagggatggcatcgagacggtgaagctacgcaagagtgtctgctccacgacgagcacggcaaagaagtcacagagcgacagtggccaaaacggcggatcgatcagagagtcgtccgagaaagaaccggactcggacgagctggttgactccatgcacttgccctccacgcggccgccccatttcaagggcgaggagtggcgacgaccgtgcccggccagctttgtggccggtgcaccaaggccacgcattggccgatgtcccaagaactacgagcagctggccaaactgacgcccgccaggcagaagttctttcttacccaggatccgcgaaagacccactgcctggtcaatccggtggcgttgcgccacaagccattgaccaaggagcaggagttcagcctgatcagtaagctggtcaagcatggggacaatctctgcgccagcaccgcatcggagacatccgacacgcacatctgcgaggtgatcgatctgcagaatccgctgcgactggactttcacggcatggactacaagacgacgtacgagcaggacgaggtggagcagcagaacgcgctgaccttttggcgcgtccagcgctacatggcacggcgaaaggcgaagaagaacaccaaggtaaatgtcgaggccgagctgaaggaggagcgcctggccgtgccgcagcgctacaatacgacgatcaaggatacgcccatagagacaccatcgccgccgccatcgccacggctggttcatctgtatcgcagtccggacaagccggccaacaagctaaagatcgaagaggagcgtcggcgccgcgccgcacgctacaaggacatctatctgcgaaagaagcagcgcgaggaggagcagctgctggagcggcgcaagcaggaggcggccatcaaggagatcgaaggacgcacggtcgccgaggccgatctgcgtgccgatgtggccgtcatcgacgatgcaattgagcgcagctttcgcaaacacgtggagctgaagccaattatacggaaacgtaaggtcttccccaagactctaaccgaaacggagcgcctgaaggccatcatgcaccgtgaggattgtgtgcgtcgcgacaaggcgagggtcacccagcagttctatctggagcgcactggcaagcacaagtacatgccggatgcggagcagcagctggcctgcgacgagagcatcgagggcagcgtgggctccacgcccagcgagcaaagcagcgacgacgaggactacctgcaggtgggcaaaatcggcgacaagttccagctgcgtggcttccacttcaagcacggcgacgggctgcgcggcaagctccatcgccatcaaattatgcagggccagcggacggttaagggatgtctcacgcgcgaagattggctcaaccagctggtgccgcacaaggagcccatcaagctggacgtggagcgcggcattattaaggttcttgaccccgacgacccgaacttagacctcttcccgccggagccgctgctggtgcggcggcgggaacgccaaagcgccgtcagggagttcgtccatcagaagcttggactccactaccaccgacggctgcgcaagaatctgaaaattgtcaaaccgaagccggcgtacaatgtgaggaagtttaatctcatccgctacgtgtttcccgagaaggtgcttgtgccagacgatcgcattccggtggaggaaatggaggtgctcgatgccaccaaggtgaacaccacgctggagtatctggatatgaagcagcagttggccaagtccaagcgccaaaagaagaaactcgcccggatgcagttgctcggcctaccctgtatcgaaaaggagcagctgagagcggcggatccttgtctggaggtggaggaggaactggacgtggactgggtgccaactccagagcctccatacaatgagggcgagggtcagtcgcgtcaagagggcggatgcgaccgaccaccaaggggaccttggaaacccactcaattcctggttccagaaaatgctcgcaatgctgatttatctggcagttccggcttacagtgcgccacttctggccaggaaggcaccgccatggaacgttttcctggcggcaaagagtcgcagccatcacgttggcgaggaaatatgcctgcacccaaggagcgggagaagaccctgacgattcatccgcgcaggaaacgtgattacgccgccgagcgggttccgtcggcgatattcaacgaggtgctgcagaactccgccctgccgctcctggagcaaccggaaccggagaagctgcgcttcgccaatgtgaggaccaaaaagcgtccatacacggagatattcgaggccaggcaccaccacgaccactgggcaccgacccaagtgaagaacgttcatgtgcagtatcagccgaagaccgttatgcccgagattacgaaggtggagaagaaggtcaagcagccggtggcgaaatttgcgcgtgccaagccgcccagcagcaagtacgtcaacatggacttgaccatgcccagctatgatttcgacaagatgatatccgagcatctggccgccacgcggacggacaacaaggaggctgccggcgaaaaggtgcccgacctgtgccgaccatacgacttcgtcttccactcgcgcgatcccgaggagttggccaagctggacttcccaggccgcaaacagtatctggatctgctgcgcgagactcgcgaggccatttacgagaccaaggacatcgagccaggcgaggagcgtctgctggtggatcgcaaagcagttgtcgccgagctggaggaggatctgaagagcatcgagaactgtctcagctcgttgaccagctccgagtgcaccgatctgtcgaacgacagcggtagctacatggtcatcgaagacaagaccaagctgccactcgactacatccgcaagccactggttcccttcgaggagatgcggcgcgcacgctttcacgccgcggtgattgacgtgaatgccgaagaggaggatccctatcgtatgctgcccttttcgggccagcacaaggagcaggccgatatgctggggcccaaggacacgtttttcaccttcagcacccggctgcggaacagtctgcgactgcggctggaagtcgaggtgcccgatgttcgcaaaacgctgctgggtcccggaaaccacaagtactacggagcggtgatcaccgacctggacgagaactacattgaggagatgaaaagtcgcgccaccattaagtcgttcaagttcaagaccagcatccagctgcttaaggacgccatgcggctgaagtacgagtccttgctgatccagggccagatggtgcgcaccaagatctacgatcgcatgaatgagcgccactgggtggacatgaagaacaccaagaacctgtacgaggcactcttcgccaagtggaagaagaaggagtacaacgccgccatgacgatggtgtaccaggtgaaatcctactacgagaccaccgacaagctcaagcaggagtatcgcgaactggagcgcgaactgatgatgctcaacatggatattgtgttcattgagggccactggatacgttgcatcatgctgcagaacttccattacctgatgggcgaccaggactggcgggcggagaacgattggatacacttggtctccaaaggaacgcgcaaaagcagtgtgaagagcgatgccgacgacgagcaagcggcagaggacatggaagaggaggacatggaactggagccgtatgacgtgtccattgcgaagcgagccattgtcaacattcgggttcgcgacaaggacgatgcctgggccatccgcgccttctactacgatgtctacatgcaaaagcttcatcccattctgcaggtcttccccgatgccgagtcctttctgcagggcatcgatagcctcaagaacaagaccttcatgctgctcctggaaatgcacttcacattgtccattcacaccgagcttcagggccgactggagacattcgtcgactggtgcaccaaggatttaaaagagaaacaggaatacgtggcccgcaagtcggccaagaagttcttcatggaggaccgtgcccgcgagatggagcagcgagtccaccagtacctgggccggcccatcgaggagacaatagcggacgaggacttcaacaagcaccgtgccgtcctggccgaggtgtggcgccgcgtggttccggactcggtacgcggcaccagcgacgtcctgcccagtgccgctgacatggtggccgccatcagcgatgtagtcatggagattctctccaagttcgagcacatggatatcgagaaagtgcggagcgtggaggccacgctgcgcaagcgccgccgctacagggagaagctctcataccaggcctaccaggtggagcgccgcattgatatggagatgaagaaggtgcgccgcaacctggagccaccataccagaagcccaagcgtgagggtcgcctgccaaggctctacctcaagaagaagatcatacccgaggagaaggaggtgatggtgatatccgagaacactaagaactttgtgcgcgccttccgtgaggatggctacaccggtgaccagattacccacacctcgctcctgaccgtggacaacatgcaggagcagatcgtgcccttctacttcgaccacttcctcaagctcaacggctacacgcccaactacaacttcaggaccaacgttgatatgcgcgacggtcccgagtttagtcgactcaaggtgcgcgaggtcctgccggatgtcctggccaggctggagacctgggaaacgatgcacaagaagatcatggaggagaacatccagaggaaccccaagatgtacgagaacgtgatatag

SEQ ID NO: 33381 - protein, 1829 aa, DROSOPHILA
MGYIMSFFIIYHLPGRHLVIIVIIISSIIIIIISAINMRIIANLHFRNIRAFVLPVSQKNLTMSMQHHNLAAKNYRMETVNRTLNMRARNKNERELIGGLTEVMETKAKTKPKAEATGKRICPPRKNPERKTREERTIEKFRNIDFFGQRDSNNILTVQNLEFPDVNVKRTELHKRDECGKVVIRARGRDFESSSNSHFRDGIETVKLRKSVCSTTSTAKKSQSDSGQNGGSIRESSEKEPDSDELVDSMHLPSTRPPHFKGEEWRRPCPASFVAGAPRPRIGRCPKNYEQLAKLTPARQKFFLTQDPRKTHCLVNPVALRHKPLTKEQEFSLISKLVKHGDNLCASTASETSDTHICEVIDLQNPLRLDFHGMDYKTTYEQDEVEQQNALTFWRVQRYMARRKAKKNTKVNVEAELKEERLAVPQRYNTTIKDTPIETPSPPPSPRLVHLYRSPDKPANKLKIEEERRRRAARYKDIYLRKKQREEEQLLERRKQEAAIKEIEGRTVAEADLRADVAVIDDAIERSFRKHVELKPIIRKRKVFPKTLTETERLKAIMHREDCVRRDKARVTQQFYLERTGKHKYMPDAEQQLACDESIEGSVGSTPSEQSSDDEDYLQVGKIGDKFQLRGFHFKHGDGLRGKLHRHQIMQGQRTVKGCLTREDWLNQLVPHKEPIKLDVERGIIKVLDPDDPNLDLFPPEPLLVRRRERQSAVREFVHQKLGLHYHRRLRKNLKIVKPKPAYNVRKFNLIRYVFPEKVLVPDDRIPVEEMEVLDATKVNTTLEYLDMKQQLAKSKRQKKKLARMQLLGLPCIEKEQLRAADPCLEVEEELDVDWVPTPEPPYNEGEGQSRQEGGCDRPPRGPWKPTQFLVPENARNADLSGSSGLQCATSGQEGTAMERFPGGKESQPSRWRGNMPAPKEREKTLTIHPRRKRDYAAERVPSAIFNEVLQNSALPLLEQPEPEKLRFANVRTKKRPYTEIFEARHHHDHWAPTQVKNVHVQYQPKTVMPEITKVEKKVKQPVAKFARAKPPSSKYVNMDLTMPSYDFDKMISEHLAATRTDNKEAAGEKVPDLCRPYDFVFHSRDPEELAKLDFPGRKQYLDLLRETREAIYETKDIEPGEERLLVDRKAVVAELEEDLKSIENCLSSLTSSECTDLSNDSGSYMVIEDKTKLPLDYIRKPLVPFEEMRRARFHAAVIDVNAEEEDPYRMLPFSGQHKEQADMLGPKDTFFTFSTRLRNSLRLRLEVEVPDVRKTLLGPGNHKYYGAVITDLDENYIEEMKSRATIKSFKFKTSIQLLKDAMRLKYESLLIQGQMVRTKIYDRMNERHWVDMKNTKNLYEALFAKWKKKEYNAAMTMVYQVKSYYETTDKLKQEYRELERELMMLNMDIVFIEGHWIRCIMLQNFHYLMGDQDWRAENDWIHLVSKGTRKSSVKSDADDEQAAEDMEEEDMELEPYDVSIAKRAIVNIRVRDKDDAWAIRAFYYDVYMQKLHPILQVFPDAESFLQGIDSLKNKTFMLLLEMHFTLSIHTELQGRLETFVDWCTKDLKEKQEYVARKSAKKFFMEDRAREMEQRVHQYLGRPIEETIADEDFNKHRAVLAEVWRRVVPDSVRGTSDVLPSAADMVAAISDVVMEILSKFEHMDIEKVRSVEATLRKRRRYREKLSYQAYQVERRIDMEMKKVRRNLEPPYQKPKREGRLPRLYLKKKIIPEEKEVMVISENTKNFVRAFREDGYTGDQITHTSLLTVDNMQEQIVPFYFDHFLKLNGYTPNYNFRTNVDMRDGPEFSRLKVREVLPDVLARLETWETMHKKIMEENIQRNPKMYENVI

SEQ ID NO: 33382 - DNA, 3980 bp, DROSOPHILA
ttaaaattagttacaagtaaacaggtaaccaaatgttcacactagaactgatcgccttttcttagtatcttatctgtaaatcttaaaattatctgaacaaaagaaagggtatttaaaattaattataaagattgtctgttatgaggaaattaagactaaacttttagctcagcaagtcccatgtctaacccaatttttattttagccccaatagaggtggtgttaccaattcatcgaagattcccaataagagtcccaataaccccactggcaggccgatgactccacactacttgtattttctttattgttgtcttgctttccttattgtttattcaaattgttcccttacgtgctcgaaattattaaacagtagcgaaacaccagtcgaggttcctgtttgctccgtggagcgtgactgccttggctttaatccgcatcaggctggccaatcgaaagcaaaatgcacttggctgaacggaagttggtcggaaaaaacaaagatacaaagatacgttcagaaacacataataaatacataaatatatattggttgccgtaaaatatacttccgaaagtaatcgtgggcttactcatcgtttggttatacttaatactggtaatacttaagatacaaccaataataaattcaagtatatatatatttgaaaagtatttatagatgctgacgcatttgtgttcgaaaacattaattacagctctagctaaaaatagtagcacaaaaagatatttatttgaatttacatctctacaattctaatattaggtgaaatacttgttggaaacttcccaaagatacatgttggaaacaactaacatataagatgaaacgattcattttttcattttgtatttcaacttttgatttatattttgataaagagtcgcaactacacctgcctagtactaaagtactattcttttgacaatataaataaaactttattcaatttgagggatccattaacatatcttcgagctacaactgctgcaggtatctatgcttttggggactacgtccgctggagcgctgacggtgtcgcttccgtttctccgttggcttgagcagttccgtcgccttgctcacaatggccggaactccggatgtgtcagcggaatcatctggctcggaggctggtagcggtgtggtcatcgccgtatcatcttccttgtcaaaatcttcagcagagtcctcagcctcatcactgtcgtggtcatcacccacaatggtatctggctgttctgagctgggtggcgccggagtgctactcgagaagttcagcttgcccgatctttccgattgaacttctgtggtaggagcagcttctgttgttgaggtggaggcagcgtcctggttgaatttgaagacgcgctggaaaaagttaccattttgcgttggagcagcgggagctggtgctcccagaactctgttgaaaggattgaaaggattgagggctccgaagggtccgaatgggttcattcccattccaagctgcatgcccatgccaaaggggccacccacctggtgctccatgtcgtatccctgtcctcccatctggggagacatgccaaaagggcttcccagctgtgctcccagcccaaatccacctccaaaggaacctgctggagccaatgctggtggtgctctgggaagcccaaagtagggagttggtgctcgttgtgcgtagcagggcatgcttataatgaccggttggaagctcggacaggtggtactgtagctcaccccgttgtccactggacattgaattggtggtgctgtgggaggacatccattacaatatgtgttggcagagggagttacatctgcttgggaataggttggaggtggtggcggcagagtgggtggggcaggagcctctgggtattgattgttgtaggggctgtagccaggagacatttgtcccaacatgggctcatcctggttgctcaccggtgcctcctgtgtgggatgtctttcgtctcccaggctgctgtagaatgccttcataaccggatcgttttcgggatcctgcgtctgcgacaacggcacccacatcaactgatcttctggtcgcggttgactcactggcctacggtattgctgttggagctcctctcgcctaaaacccacatccggcactgccagcacctcctcgtcgatagtgaatcgatgtctaccatttccggctactgggttctcgttggggcgacttgacgacctcgcaaatgctgcaggatcatacgaagcggccgtggacgctgggcttgggccagctggaactcctggtggagctgctggcgggctgcccacaattgggtgatgaaattcttgcatgccagctgactccgctgcaggtgcagttggaggggctgccatagggcctccgtagaatccgtactgggcgtggggctgatgctgctgaggattaggctgctggtggggcttctcctggtatgacgtcggacccgctggctggacttggagaatgcgagtgggatcttctgtgacgggctgctggggatatgacccgccctcaaaggcgggaaacacgggaaagttgtgaccgtaatcatgatgttcagcgggttgaggattaaacggaggcatatgctccatggagggttgattctcgattgcgggttctgtggatttcgctccctggcacatgtagaatggctccccctggccaccttggcttctgacctccacacaactttgctggctactgtcgccaccgaagttggctccccggcacatataatacggctcatcctgcggactacttggcctaatctccacgcagatggtagtcatggtgcgtttgctgcgattcagtagatccctcgaagctggactggcctcatgtccggatgcagttgctcctggtaacaccgttagcccaatggccaggcatgcccaaaggaagatcagcttcaaggcctgtggttggatatccatgttcttcttccgctcactaacttccgtttgccgatgggcagcgcttttatagtctttaactctgctgctgaggatggagatccattaaaaggtgccttccaacttccacaacttacccaactgatttcctcgaagcggtcttttgtaatttttctcgtttgtctgaattatgtttttcctctattaaccgcgttgttctggtatattgcactggtaatcggagttttattcacttgaaaatcgtatcactgaataaaaaccaatgcagacaccaattttgaacggacctggccaaaaggggttcgaatcgtaaccaaaatacacttccatgtgcgaagttgaagtgaattcaaaccgaagtagccgatgttagtaacaataaatagattatttgtattaatgctatattctatgaaaattgtatatacattatgaagatacttaggagggagcaagctttataacatactttctttgtaatatgttcatcttgaattcgttactaatcaaaagagttcctataataatagagcatttggattcatacttaaacatattcaattgcttcgatttcagctgattcctgcaaatttcgaccagcgttttcttttggcatggtggacagttcaacaaactcctcaggtttctttcgattttggattgatcagcactttcgtaaagtgtgcgaaacatatgacacacaagtgtttgctggttgggttgcccgacattagccaaatcggtcagtcggtcagcgagtgttagattgtcgggagtgaggggcacttcatagtaactgacctgacccacttgtaagacaacgcgggagtggcctccagtaccccgggatgactaatgaacccttatgaatgtggggtgtgtattccgtggtctttaaactaagtcacttctgtttcaccatccgactgggtacttcaatcaaaggaccatacttgagttttaagtactcgtatcctgggatagcattccttgtatgtat

SEQ ID NO: 33383 - DNA, 1980 bp, DROSOPHILA
atggatatccaaccacaggccttgaagctgatcttcctttgggcatgcctggccattgggctaacggtgttaccaggagcaactgcatccggacatgaggccagtccagcttcgagggatctactgaatcgcagcaaacgcaccatgactaccatctgcgtggagattaggccaagtagtccgcaggatgagccgtattatatgtgccggggagccaacttcggtggcgacagtagccagcaaagttgtgtggaggtcagaagccaaggtggccagggggagccattctacatgtgccagggagcgaaatccacagaacccgcaatcgagaatcaaccctccatggagcatatgcctccgtttaatcctcaacccgctgaacatcatgattacggtcacaactttcccgtgtttcccgcctttgagggcgggtcatatccccagcagcccgtcacagaagatcccactcgcattctccaagtccagccagcgggtccgacgtcataccaggagaagccccaccagcagcctaatcctcagcagcatcagccccacgcccagtacggattctacggaggccctatggcagcccctccaactgcacctgcagcggagtcagctggcatgcaagaatttcatcacccaattgtgggcagcccgccagcagctccaccaggagttccagctggcccaagcccagcgtccacggccgcttcgtatgatcctgcagcatttgcgaggtcgtcaagtcgccccaacgagaacccagtagccggaaatggtagacatcgattcactatcgacgaggaggtgctggcagtgccggatgtgggttttaggcgagaggagctccaacagcaataccgtaggccagtgagtcaaccgcgaccagaagatcagttgatgtgggtgccgttgtcgcagacgcaggatcccgaaaacgatccggttatgaaggcattctacagcagcctgggagacgaaagacatcccacacaggaggcaccggtgagcaaccaggatgagcccatgttgggacaaatgtctcctggctacagcccctacaacaatcaatacccagaggctcctgccccacccactctgccgccaccacctccaacctattcccaagcagatgtaactccctctgccaacacatattgtaatggatgtcctcccacagcaccaccaattcaatgtccagtggacaacggggtgagctacagtaccacctgtccgagcttccaaccggtcattataagcatgccctgctacgcacaacgagcaccaactccctactttgggcttcccagagcaccaccagcattggctccagcaggttcctttggaggtggatttgggctgggagcacagctgggaagcccttttggcatgtctccccagatgggaggacagggatacgacatggagcaccaggtgggtggcccctttggcatgggcatgcagcttggaatgggaatgaacccattcggacccttcggagccctcaatcctttcaatcctttcaacagagttctgggagcaccagctcccgctgctccaacgcaaaatggtaactttttccagcgcgtcttcaaattcaaccaggacgctgcctccacctcaacaacagaagctgctcctaccacagaagttcaatcggaaagatcgggcaagctgaacttctcgagtagcactccggcgccacccagctcagaacagccagataccattgtgggtgatgaccacgacagtgatgaggctgaggactctgctgaagattttgacaaggaagatgatacggcgatgaccacaccgctaccagcctccgagccagatgattccgctgacacatccggagttccggccattgtgagcaaggcgacggaactgctcaagccaacggagaaacggaagcgacaccgtcagcgctccagcggacgtagtccccaaaagcatagatacctgcagcagttgtag

SEQ ID NO: 33384 - protein, 659 aa, DROSOPHILA
MDIQPQALKLIFLWACLAIGLTVLPGATASGHEASPASRDLLNRSKRTMTTICVEIRPSSPQDEPYYMCRGANFGGDSSQQSCVEVRSQGGQGEPFYMCQGAKSTEPAIENQPSMEHMPPFNPQPAEHHDYGHNFPVFPAFEGGSYPQQPVTEDPTRILQVQPAGPTSYQEKPHQQPNPQQHQPHAQYGFYGGPMAAPPTAPAAESAGMQEFHHPIVGSPPAAPPGVPAGPSPASTAASYDPAAFARSSSRPNENPVAGNGRHRFTIDEEVLAVPDVGFRREELQQQYRRPVSQPRPEDQLMWVPLSQTQDPENDPVMKAFYSSLGDERHPTQEAPVSNQDEPMLGQMSPGYSPYNNQYPEAPAPPTLPPPPPTYSQADVTPSANTYCNGCPPTAPPIQCPVDNGVSYSTTCPSFQPVIISMPCYAQRAPTPYFGLPRAPPALAPAGSFGGGFGLGAQLGSPFGMSPQMGGQGYDMEHQVGGPFGMGMQLGMGMNPFGPFGALNPFNPFNRVLGAPAPAAPTQNGNFFQRVFKFNQDAASTSTTEAAPTTEVQSERSGKLNFSSSTPAPPSSEQPDTIVGDDHDSDEAEDSAEDFDKEDDTAMTTPLPASEPDDSADTSGVPAIVSKATELLKPTEKRKRHRQRSSGRSPQKHRYLQQL

SEQ ID NO: 33385 - DNA, 2700 bp, DROSOPHILA
ggctatgctgttgatgatgagaacgtgaccttcgccacctcgccgtttcatgttattgaacgcctcgcgggtacaccaaatcacgcccattacgttggtgtctatgacctccttaagcttctgcgtattgctcggggtgaccagttccgtctcgcgagtaatgccagcattgttcagcagcacgtcggcgccctccagctcccgttcgatccagtcaaaagagctctgcacctgatcttccttggagacgtcgcagcgccgcggtatgaagttcgcctgcagctcccggggcagactctccctgagctctttcaacttggcctcccgacgtgccaggcccaccacccgtagtccagcgccgatcatggcccgagcacaagcggcgcctatgcctccgctggctcctgttaccacagccagtttgttctgccaccgctccatgccgtcttgtgaatgaggagctgatgcaagtaagaagcccgcatcggaaactcgggagcagtttcatggcttcttggttcgcaattgaggttaatctccaacggtcaaatgttgttgtcaggttgtagatatatatattaaaagaagattcaacaatttgggtcaggattatacgcacttaaggttaggctatccttttattcttaaattgacctaaagaaaatgtattaaggaactgcgagactttaaatataaaataaaatagctcaaatgtatatatttttttaagattgtgtactttttaaatttgaataaaaattttataagcgataacataaaaattaatatttgtacttggtagtgaccagtgaccacattttaaagaaaaattcaatttgcatatttattcaaagtcttgaaatcggtttgaatttacacttgccggcaaattggttatcgatagtgcagggcgtactcatcgatattttcaggccagcaggagtcagatataactgccatcactaataaagtagaaaaaaaaaaccataagcttaccgcaggtgttgcaattttcagtgaattcgcagcaaagccaagcaatttgcattcaatcatctgtgaaggaaaagctatcacacaaaatggcacaaatggacatcgaattgaagaaggtgagcggaaggcaagttgccaaaaaggccgactgccgacggagagcgcgtgctcttccaaagaacttagtcatagacgattccttttgcacgcaggccttcaccgagatgcagatcaataagctggagacgaccaagaagatccacatgatcgacatgaagtgcgacatggtcaagacaggcaaacaaaagtaccagctgacagaaaagggcaccagcagcttggccgacgacacaaggtacataactagaatcacaattaatcatctccaggtgttcaggtggctaattgaactgtttccctatagagtttaccagtccgtgggtcgcatgttcctgcttaccgatgtacagaatatgcgcgaggacctgaaggctaggcaggagaaatgcgacaaagcgatagaactgctggagaagaagaaggagttcttgcagaagtcccttaagagccaggaagacggtctgcgcgagttggtgcagcagcgcaaggaagccgatcagactgcgaaatagactacaactccaaactggcatttatccctcaacgcaattgcttatttattttcaatatactcgtctaaattgaagttggcgtagctgacaaacttgttgcccagattgcgttcgtgttccgggcggaagctgcacttgaggacgggcaggcgagcggttagccagggctccaccacctcaccggagcacaggattaccttgctctccttctggtttcgttgcagcctagtgattatttcacacgttttggcgatgcactcctgggacaggaagggcgggtcggccacgatgaggtcatattgctggtggtgctctttgaggtagtccgggttgctccctacgcagttcaagtcgtagtgcacaaaatctgtgccataggcctcgaaacgcttgtcgaactcgaatatgtgcactacaagatagaatgatgacaattcattcataatcgtttcacatgtccacttacctgtgtcatgtatctccctgatgtccttgtagagcgatgggcaggagagcagtgctatactaaagtcacccgaatcctccgtgcgctccgccagaagcttacgcacaacatcacgcaatgcgtgcttggtttccgtgctgtaccagaactgactcaattgctgcaagcgaagagagtttcaccataagtttctaaggtatgtgcaggtgctcttgcccaatcctcctcgaactgggcatccttgccggtcttgttggcgatttgattctcctcctcggcttcgcgttttgatctctccaacagaaattcgtttaaaatggccaaagtgtcggcgggcagcgagatgtcgtcgtccataattaattatttgccactaaatgaatcttagagcattcaaatcaaaataaaccaaaatgtgcgtttgaagattagaggtgcgaaattagcgatacaaatgagaacttattggggggattccaggccttggcgctgttttcaaattgtaaattattagaaacttaggccaactgcgatattgaaattatactttcaaaataatatgcactttaaccgtatgcaaatcgattaccaattttaatttatttt

SEQ ID NO: 33386 - DNA, 535 bp, DROSOPHILA
ggtgttgcaattttcagtgaattcgcagcaaagccaagcaatttgcattcaatcatctgtgaaggaaaagctatcacacaaaatggcacaaatggacatcgaattgaagaaggccttcaccgagatgcagatcaataagctggagacgaccaagaagatccacatgatcgacatgaagtgcgacatggtcaagacaggcaaacaaaagtaccagctgacagaaaagggcaccagcagcttggccgacgacacaagagtttaccagtccgtgggtcgcatgttcctgcttaccgatgtacagaatatgcgcgaggacctgaaggctaggcaggagaaatgcgacaaagcgatagaactgctggagaagaagaaggagttcttgcagaagtcccttaagagccaggaagacggtctgcgcgagttggtgcagcagcgcaaggaagccgatcagactgcgaaatagactacaactccaaactggcatttatccctcaacgcaattgcttatttattttcaatatactcgtctaaattg

SEQ ID NO: 33387 - protein, 126 aa, DROSOPHILA
MAQMDIELKKAFTEMQINKLETTKKIHMIDMKCDMVKTGKQKYQLTEKGTSSLADDTRVYQSVGRMFLLTDVQNMREDLKARQEKCDKAIELLEKKKEFLQKSLKSQEDGLRELVQQRKEADQTAK

SEQ ID NO: 33388 - DNA, 2544 bp, DROSOPHILA
tgcaaaggaataccaaaatcaaatattggtcttggaacgcacggacaattcctcaccctcatcggcattcaccaccaagtacttggggcgtccatctccgggcttgttcatgaaggaccacttcataccgctggggaagccagctcctccacgtccgcgcaggccggacgtcttgatctcgttaacgatccagtctgcccccttcagcacaatctccttggttttgtaccagtcgccgcgcttcaaagctcccttcagcctccagtcatgtcgtccatagaggttggtgaagatgcgatcttcgtccgccagcggaccgaatttggtcttcgtctgtggcggaggagtgcccggaggtggggcctgggtgctctggaagcgctgcacatgcaggctggccggcaaagtcgcaactgcaagacacattcagagtagatcaataaattgcgcagaacactggacacttttgttttgctttgcgcaaaaattacataatttgatggcatggaaattgtttgtttttaaggcatggggagcttatggcaatggcatgatccttacgaaacaagctaatgacactgttagaaaactggtttatggttaggtggcgtttatttaccaatctgcggctttgttaacaaattaaatcgcacaattgcagccattttcgggacaactgactgacagctgaaatgtgacgtttgtacgcagcgctgccagatggtccgaataattaatagtgcagattaatcaggggctttcgagcacgtaatcagctgtaattaataaattgtttcattttaaacaatgaattaaaaatgtcttacttattaaacacaacggaaaccattaaaaccattttaaaatgttttgagccaatgtgatgtttctttcacaactaagcagccctggtgtaaacggggctcaagttcaaagccaaaatcaaagcaacagtaaatacgtccacactgtatactctactatttgtttagttagaaaaatggcccataagcagagcacgaacaatgagacatccaatggctcgacaactgaaataattgacgaaaccgatgcccgtgctcaattggaatcgggccggaccacacccactcttctgttgcgcctcgaacatccgcggaatgaacgccgggtggcctttcacgctgggatcatcgacaacgagcatttgaatcgcaagaagtccaaatgtaagcattgattgtttcatcgaaggaccagactgatttcctcccatttcaggctgctgcatttacaaaaaacctctcgcgttcggcgagagctcctctgaggatgacgaagactgtgagcactgctttggacatccggaaaagcgtcagagaaacgcaaaacacaatcacaatcacggggacaaaccatgcacggaggcgtcgcatccggaaggaccttcgacatcaacgcaggccgcgcacatcagtcaaccgccagccgagcctgttgaatcgaagaccgatccaaaaccacctaccccaggtgttgactttgagcagacgggcagctcgtagaatgtatatatataattataaacgttaacaacatggaaccaactagcaagcactcagatctacaaagacggtgtttttaggcagtaagaaccacttggggatttgaaatcgtatgcagtcattagtttttcggcttcaactcaaaggattcgctgacgttaatggggatattgaactcctttgcctttgctcgtgatcgccagacctaaggaaacatggatgcttaaaactgcaagattggagaagtcttacatcataccttaattgtgtagtcgtcgctggtggtgaccagcatctccgagtcgcgaggattgaaggccacactgttaaccacatccgagtgcttaaactttgctaggctgatgccgtagtacctatcccacaggtaggcatgttgatcttccgctccactggccacgtactcctcgcaaacatcaaggaagataaagaagcactccgcgctgggagtgtaggccttgtgggcgcgcagcatgttgcccacccgcttgagagtcattaggtcaattacgtggatgtcaatctcttgagcaattggtggcggctccagagggttggtgatcacgtagttctttggccagggacgtgtgttgacgtacaagtagcggtggtccgggctcagtgccatgccaataatatgtccgtgcaagtcaattaccttgtccaccttgtcgaatctatccttgactgactcataatcccaccagtctggatcagtccgcggggtctgctgctgttgctgttcggcagcgcgctttgcagctattctttctttaagacttggcccaggatcaagctttttgggaaagaacacgttgcgtatgcgcttgaatccaatttggtgaggcgtgaaggtggtggagcccgttgaaaaaattagatatttgggtatactgttctccatttcgtcgtattcctcttgtacgtccatagagtcgtactcctcgtcgtcgtcatcgttcgattcattagtggtggccac

SEQ ID NO: 33389 - DNA, 492 bp, DROSOPHILA
atggcccataagcagagcacgaacaatgagacatccaatggctcgacaactgaaataattgacgaaaccgatgcccgtgctcaattggaatcgggccggaccacacccactcttctgttgcgcctcgaacatccgcggaatgaacgccgggtggcctttcacgctgggatcatcgacaacgagcatttgaatcgcaagaagtccaaatgctgctgcatttacaaaaaacctctcgcgttcggcgagagctcctctgaggatgacgaagactgtgagcactgctttggacatccggaaaagcgtcagagaaacgcaaaacacaatcacaatcacggggacaaaccatgcacggaggcgtcgcatccggaaggaccttcgacatcaacgcaggccgcgcacatcagtcaaccgccagccgagcctgttgaatcgaagaccgatccaaaaccacctaccccaggtgttgactttgagcagacgggcagctcgtag

SEQ ID NO: 33390 - protein, 163 aa, DROSOPHILA
MAHKQSTNNETSNGSTTEIIDETDARAQLESGRTTPTLLLRLEHPRNERRVAFHAGIIDNEHLNRKKSKCCCIYKKPLAFGESSSEDDEDCEHCFGHPEKRQRNAKHNHNHGDKPCTEASHPEGPSTSTQAAHISQPPAEPVESKTDPKPPTPGVDFEQTGSS

SEQ ID NO: 33391 - DNA, 3957 bp, DROSOPHILA
ccagacatgcttcctcgatggggcttaacgtcagcggagcagcgatgtcagtggcagccatcatctgaaccgaatgacagtggaggtcgctagaaaaggggttccatttccactagtttatactaccgaactgatacttaaatcaaggcagttaaaaatttaatatgaaaccggaaatggcttcaacatctcgttaacgctctgcccaattctacagtcatccgattttaatgaagcaaaatttactgccatgccatgcaagagatatgaatcaccgcatgggaatagcccacaaaggacccttaccccatgcactctatcatgaacaccgcacacacttttaatctgcgactaattgctgctccgtattgaattgatttcggttgccccaaagtgccacattccaaatctccgttgattggggaaatccccgaaaaacattcgaaccattcgtccctggcgagcacagaaacagcgtctctgattctggcaggaattggagggcatagggcggaccttgtggcggtttgtcgagtgcacaaagtgcaaggttgcgtggccattcatttcgcagccgatgggtggaagtgggcagcggtgggtggcgcccggaaggaagagcatcagtaatctctaagtgcgccttgttcgcattcgtactcgtgccagcattgcataagtgtcagtgtcaacggggcggggatgtggttgtgcttggtggttatgtgggtgtttgtgtggtagtagtgtccttgttggcagacaaaaagactgatgatgatggcattttgttactttgctaccttcctttgtcgcccgtcgcacggcagctcctttagtatgaaatgaggcgaccaggcaagcgcctcgtcatcgaagatcacccaaacagagtacggaccaggacacggcaactcgcacaggcacaggaacaggtgcaggcacaacaactggcaggagcatcggtgtcggcaagggatactggcgcgggatcgaaagcatgaacagggacaatctgcagcagtggtgggagaactcgtatcggcgccaacatccagagcccaccgatgacctcggcctggactccgcggagctgcatctcgccctccaggagcccaaccagctgcccgcggactacgactatggcaactttagtctaggcaatccgtatgacgtggactcagagcactccatttccccgctgacgctgctcctgctcgctgttagctatggcctggtggttttcggcggcgtcgtgggcaactccacgctcgttctgaccctctgctccgcctcttcggtgcgtttgcgtaacccgctgctgctggccgtctgcattgccgatctcctggtcaccggcatctccgctccggtcacgctcctcaatctcgcgatgaaccggaggacgcgatcgctgccccttgtgctgtgcaaggtcatacactacgtacaggtgagtgggtcaatcaaacaagcttaagttagccaagtaactaagttaaccccacgctattcaggtcatgcccgtttcggccagcactatttcgtttttcatgctctcccttgaccgctacgccacagtaaagcatccgcgattggcgcagcttcgccagcggcgctacttgcacgtctccctggcgctgctatcctggctcgcctctgccgccatcagcactccctttctgtttgcctacaaaatcatcgccaagtcgatggtggtcaagggcggtggggcggcgaacaccacgccaaacccggtcagcatcagctgcacctccgacctgggcgccaacgccatgttcatgtccttcatcatcttccacaccatcgccgtgttcgtgttgcctggcattggtgtgctactcaaccactacggcgtccgacgcaagctctgcgccctgtcgctaacggctcgagctgcccatggagagctgccgctgcccattcccatcctgcgacgccagacccacatggtcattgtgacgggctgccccaacgcccagcaagcggcctgtggtgggggcaccacggcggacgacacctcgaacgggaacggcacgggcaccggtggcggtcccatggccgtcagtccgggcgacatacagcttcacacactgcagccgcgccagccaggctctgccggatcggccctcgaaccgggctcctaccgctctagcaatcccatatcacccaggtaagtcataaatattgtgaagttatcagcaaaatcgttgtaaacaggatgtatgcttgatgtagtcaaaagctattagtttatgttaatcatacgccccgttgactttggtcagaatatatttcatcgaatggcagtacgtcatttggtataagttaactaacttgcaaacccacttagggccatgagggagattcgcgcccactcgcagcgccagcgcatcaaccgagcaggcaggggaccagcgacacccggcatcccactgccccaaacctccacgctgcggtcgcgaaggcacctggctaacatgctcatcgcctcggccgtgatcttcattgcctgctgggcaccgcacgtcttctgcatcttctacaagaacttcggcaacaatcagcagtgcagccagacctctgtttacttcagccttctgctaggtaagtctgaattggcaatcattcccaatccgaatccgagtccgaattggaactgactagttgatcgcgttgcaggctacttctactcggccatcagtccggtgatctactgggcgctcaaccacaattcgcttcgacaatctccctgcgcgcccatcatccgcctgcgctccatgcagaacttcctgaggtcgcgcttccggacgcacaccgccccgccgcctccctcgtccaccaacgaggcggcactgggggcattcaaccccaagctgatcaagctaacaccgaaacagtatagagctcaggcctcttcgcattatctctactagtgtgatactaagctaaacttgatatacatatatacacatttatatacacgcatatatagtatattttttacctacgaccccaccccccccctgacccgtcgatgccctcttagtaccctctagtatcgaactccgaacccgaactttgacccaaccgaacgaaactatctagatgtttttcaaaagctctacgcaacaattgcataatacgaaagatacatgctacatatacacatatatagagtacatactaccttgcatagcagtgttagtcgacgcttatttacacgatgttgtgcgcctgaagctatgcaataaggacaccggagtcctgccgcaactcttgcctataacgaggatagcactggtaacgaaagcaagaaaaaaaaaaggaaaaaaaatacaaaaataacgaaacccttctagtgacttgttcgaattgttgtttagtcttttaagctgaaatattgtactatgttccttctcatagataagcaataagtgaacgctttaagccaagttaaacaaacggaaaacgaatcaaactaaactaaaactcgatctaaaacttttaaacgatttaaacgtaaactcgaaagcatacctaacgaaacattaataattatatacatacgcgactacatacaaataacaactaacaagtgaaaactaaaaacaaaaaatgaatgtaaatgtgagcaaaaaaacaaaaggataacatttagtattgtatacatattcttcgacttaattctttatacactttttctaaccatttttaatatcgttcagtaaactgaacacggtgtatagggcaattcaagctgctggatatattcgcgtttcagatgccagagccacccaaaggatcggactctggatcgggtttcatttcactccattcagtggcgaccgtttcctaatttgccaaacttttgtacatgctccgctgcgagcgactctctccttactccacctggtttttcgttcaatccttgga

SEQ ID NO: 33392 - DNA, 1638 bp, DROSOPHILA
atgaacagggacaatctgcagcagtggtgggagaactcgtatcggcgccaacatccagagcccaccgatgacctcggcctggactccgcggagctgcatctcgccctccaggagcccaaccagctgcccgcggactacgactatggcaactttagtctaggcaatccgtatgacgtggactcagagcactccatttccccgctgacgctgctcctgctcgctgttagctatggcctggtggttttcggcggcgtcgtgggcaactccacgctcgttctgaccctctgctccgcctcttcggtgcgtttgcgtaacccgctgctgctggccgtctgcattgccgatctcctggtcaccggcatctccgctccggtcacgctcctcaatctcgcgatgaaccggaggacgcgatcgctgccccttgtgctgtgcaaggtcatacactacgtacaggtcatgcccgtttcggccagcactatttcgtttttcatgctctcccttgaccgctacgccacagtaaagcatccgcgattggcgcagcttcgccagcggcgctacttgcacgtctccctggcgctgctatcctggctcgcctctgccgccatcagcactccctttctgtttgcctacaaaatcatcgccaagtcgatggtggtcaagggcggtggggcggcgaacaccacgccaaacccggtcagcatcagctgcacctccgacctgggcgccaacgccatgttcatgtccttcatcatcttccacaccatcgccgtgttcgtgttgcctggcattggtgtgctactcaaccactacggcgtccgacgcaagctctgcgccctgtcgctaacggctcgagctgcccatggagagctgccgctgcccattcccatcctgcgacgccagacccacatggtcattgtgacgggctgccccaacgcccagcaagcggcctgtggtgggggcaccacggcggacgacacctcgaacgggaacggcacgggcaccggtggcggtcccatggccgtcagtccgggcgacatacagcttcacacactgcagccgcgccagccaggctctgccggatcggccctcgaaccgggctcctaccgctctagcaatcccatatcacccagggccatgagggagattcgcgcccactcgcagcgccagcgcatcaaccgagcaggcaggggaccagcgacacccggcatcccactgccccaaacctccacgctgcggtcgcgaaggcacctggctaacatgctcatcgcctcggccgtgatcttcattgcctgctgggcaccgcacgtcttctgcatcttctacaagaacttcggcaacaatcagcagtgcagccagacctctgtttacttcagccttctgctaggctacttctactcggccatcagtccggtgatctactgggcgctcaaccacaattcgcttcgacaatctccctgcgcgcccatcatccgcctgcgctccatgcagaacttcctgaggtcgcgcttccggacgcacaccgccccgccgcctccctcgtccaccaacgaggcggcactgggggcattcaaccccaagctgatcaagctaacaccgaaacagtatagagctcaggcctcttcgcattatctctactag

SEQ ID NO: 33393 - protein, 545 aa, DROSOPHILA
MNRDNLQQWWENSYRRQHPEPTDDLGLDSAELHLALQEPNQLPADYDYGNFSLGNPYDVDSEHSISPLTLLLLAVSYGLVVFGGVVGNSTLVLTLCSASSVRLRNPLLLAVCIADLLVTGISAPVTLLNLAMNRRTRSLPLVLCKVIHYVQVMPVSASTISFFMLSLDRYATVKHPRLAQLRQRRYLHVSLALLSWLASAAISTPFLFAYKIIAKSMVVKGGGAANTTPNPVSISCTSDLGANAMFMSFIIFHTIAVFVLPGIGVLLNHYGVRRKLCALSLTARAAHGELPLPIPILRRQTHMVIVTGCPNAQQAACGGGTTADDTSNGNGTGTGGGPMAVSPGDIQLHTLQPRQPGSAGSALEPGSYRSSNPISPRAMREIRAHSQRQRINRAGRGPATPGIPLPQTSTLRSRRHLANMLIASAVIFIACWAPHVFCIFYKNFGNNQQCSQTSVYFSLLLGYFYSAISPVIYWALNHNSLRQSPCAPIIRLRSMQNFLRSRFRTHTAPPPPSSTNEAALGAFNPKLIKLTPKQYRAQASSHYLY

SEQ ID NO: 33394 - DNA, 2823 bp, DROSOPHILA
gcatgccgctgtgtcattagctcagtcggagatcgtttcctcgagcgcagccgagatttgtttaccgatttctccatatgttcccgtactcccacacacagacacacacaccccatccgaattccggtttccctgcgcagaggccatgtcgagtggctcgtggttcgtgatttctggccaatgcgatcgatccgcagtggtgggcggagccactggtggcgctgatgcggcatctcgctttcgcgcccaaggaatgtgccttccattggcttgggattgagcgatctgcgcgaactccacctgctccacgctgtctgggttcaatgaagtgggtaaccgggactggtggtcataaatcagaaaccgcattccacaagcggaaatccgcaaaacggaacacgaacggatcgtcggggttggaaaacttaagtagaaatgtgtaaattgcggagcgaaactggcgttattaataggaaaattgtcgtgactaccttaagatagcatactttccggcacaaaactcccatccaagcgggcggatttggtgccaaaaacaccctagcaccacaagcccacaaagtgacccagaaaatgtggaatatgcaaatgcaatggcagcggaaaatccatcgccagtcggtgacacttttatcctcttcaaagtgaagtccgattaataataaaataatcctttttacttaaaaaaaaagattcagatacattccaggatatgccgaacgttcaaagatactgattggaaagagcatggcttaaattccattaacccatttaaagtgcaaattgagccttagtgattgtagccaacaacttttcccggaaaattatagggcatacaacaaatgaaagcgaaacgcaatcaaactatgtaaacagacacgaacgccacttattcttgaggaatcgctggaaaccgcaaccaaatcgttgcggggcaactcaattcactttggcccaggaacagtgcgctgccaccactcgaatggagtcgttctcagcgtccaggtgctccaccataccgtcaccactgccgcacagtgccagtggcatggacagtccggatatctgtgagccgccgcaggatgagcaggagttctgctttcgctatcccagctacatgtttccggacgtggagtacgacaaggaggatgtgccgctacccttcaaggcctcgccggactcgctcttcaatctctgcgccgccgtcgtggattcccaagcccgcactgaggtcttcaagtggagcatcaacgatgtgaccgactggctgcgcaactttggttatcccgagtacgaggtgggctaagattcttactcactatgttgggtaacctatagcttcgttacagcaaacttttcgggagaactacattgatggacacaagctgctgaatctggacgcagttgctctggttgcgctcaacgttcgcaacttcgagcacatccgccacctgggccgcggcatacgagcgctttacaggaaggagctgcaaacggcgacggagaccaagcagcagagtgaggtctataagacattccgggcccgcactggccgaaggtacgagggattgcgggagacggagctactgggccgcatgcacatgattcgctccgttttccgcgacgtcaacgactgggatctgatggagctgcacatgtccagggcgccggtgaggcggtatcgcgagatcgtcgctggctccagacgctacaacctctatggcccatcgacagcgcgccgggaacccatcattacggacgatgtggatgccacaccgtggtacaacttcgaggattgctactgattcactttcaacttgaaatcgtggttagcttttggagcaataaagtaacttctttagtggacaattaaattttaattgaaggaacggtcagcttaaatcactttctctgcgccatcgacgataagcacaaattggtggctctccaagtcaaatcctacgactgccccacctcattggatcaccgatgctgcccaatcagtcgacacggcgcattgatcacttatcgctctgaattgttgcttttgctgttgttttgtggaggggtagtgggggactgggaactggggactataggatcagtgttgttaccgtcgagagccgtccgcattcgcgtccgctcacgtgttcaaatttattgattgttctgctcacaagacacggcgttccagcttttcctccgcaatccagcgaactgagcttcgctctgagttttgagatctgggcacggcgtccagctgtgcggcatgggagacgtacgtgtggtcggcttatgttatatttcccgacatcttgtgtgtccgtcgatcggtgggtgagcatagcatagaccgagattgagtcccctgctcagagctatgtacgcctagatgcaacctaagacgctgccacgccgtcacacactggccatgcaaattgcctttggcctttattaacttaggccataggattgagactaccttaataactcgttccgttaacactttattatgttcgaggcgcataaatcgttccatcacccggacatggtcccgaggaggtccccaagtcccccactcatccagttccctagttccccgagttcccaagttaccaagttccagagtgtctgcgttcgggccaacgttggcgattatgatttatcgcattttaatcaatttaaaatgtttaaacgatacgaatcggaagaaattatgaatgtgttgctgtctccaggctccacagtaggccaccaataacaacagccacataacccacaccaaactgatacccatatacccat

SEQ ID NO: 33395 - DNA, 771 bp, DROSOPHILA
atggagtcgttctcagcgtccaggtgctccaccataccgtcaccactgccgcacagtgccagtggcatggacagtccggatatctgtgagccgccgcaggatgagcaggagttctgctttcgctatcccagctacatgtttccggacgtggagtacgacaaggaggatgtgccgctacccttcaaggcctcgccggactcgctcttcaatctctgcgccgccgtcgtggattcccaagcccgcactgaggtcttcaagtggagcatcaacgatgtgaccgactggctgcgcaactttggttatcccgagtacgagcaaacttttcgggagaactacattgatggacacaagctgctgaatctggacgcagttgctctggttgcgctcaacgttcgcaacttcgagcacatccgccacctgggccgcggcatacgagcgctttacaggaaggagctgcaaacggcgacggagaccaagcagcagagtgaggtctataagacattccgggcccgcactggccgaaggtacgagggattgcgggagacggagctactgggccgcatgcacatgattcgctccgttttccgcgacgtcaacgactgggatctgatggagctgcacatgtccagggcgccggtgaggcggtatcgcgagatcgtcgctggctccagacgctacaacctctatggcccatcgacagcgcgccgggaacccatcattacggacgatgtggatgccacaccgtggtacaacttcgaggattgctactga

SEQ ID NO: 33396 - protein, 256 aa, DROSOPHILA
MESFSASRCSTIPSPLPHSASGMDSPDICEPPQDEQEFCFRYPSYMFPDVEYDKEDVPLPFKASPDSLFNLCAAVVDSQARTEVFKWSINDVTDWLRNFGYPEYEQTFRENYIDGHKLLNLDAVALVALNVRNFEHIRHLGRGIRALYRKELQTATETKQQSEVYKTFRARTGRRYEGLRETELLGRMHMIRSVFRDVNDWDLMELHMSRAPVRRYREIVAGSRRYNLYGPSTARREPIITDDVDATPWYNFEDCY

SEQ ID NO: 33397 - DNA, 2546 bp, DROSOPHILA
cagctcaagaaccatccgcaatggcattcaactttggtcacctcctcatcgccggcctcgtggccttgtccgccgtgtcctcggagaccatccagctgcagcccactcagggcatcctcatccccgccccgctggccgagaacatccgtgtgtcgcgtgccgcctacggaggatacggcgctgccccagccgccccatcgtactccgccccagccgctcccgctgcccaggcctactctgctcccgctgccccagcctactccgcacccgctgctcccgcctactccgcacccgctgctcctgcctactctgctcccgctgccccagcttactctgccccagccgcaccagcttactccgcacccgcctccattccgtcgccgccgtgccccaagaactacctgttcagctgccagccctccctgcagcccgtgccctgctccgccccagctcagtcctacggatccgccggtgcctactcccagtacgtgccccagtacgccgtgcccttcgtccgcgaactttaaggatcgaaacgaatctgacttgacatctgaacctaagaataaagtaatgctttcataaaaaacatttaagatattttattgaaggggtatcaagggttttattgcttttctacaagctattaaaaaagtttcagctctctgaaataaatataattattaccgatatgatgcaacaaatttaaggttttgtgttttactagtacacctttttttaaaaagaacaaattcgtatatgcaaaacgagtaatgggctgtaagcaattttgaaattctagaacactttagatatatcttgttatttatcgtcttagcaatgattaaagcggcacaaaaagttgctcccaattttggtctaaaactaatcctgtttatatatttaatagtgccaaacagaagtcttaaataaataataaatattaaaaagattaaaatattgtttaaaattttcactttattaaaaatcagctagttcatcaatatgagctgtacccacatggaaccggcttgataaccgcttcgcaggagaacacatagttctttgggcaagctggagaaggaacttcactgagtgtggtttgttgttggtatgttccctgaaccggtacctgggcctcatcctggtcgtagctgcgagcgaagccaaatttgccacgtccaaaaccaggacctccgaagccgggacctccgaaaccgggacctccaaagccgggacgtccaaagccagggcctccgaagcccggacctccgaagccaggacctccaaaaccaggtcctccaaaaccaggtccaccaaacccgggaccaccaaagttgttctccacgattacctcctgtacgatttgctgttgcctcctcctacggttcagatacgcatccgagggctcgacagctgatgatctcgatggcaggctccttaagcaccctgtacttcctccacaggtcgaggcttccaaaccagcctgctgacccagagaactcgctccggccaaaagggcaaagaatccgagatacttccacatgctgacttgatatggtggcgttgcaagctgagaaagccgagatgcggcgttgttcaagtggcttttataacctcatgccaccagaagtgcacaacgaagcggaaacggagatggccaaggtaacacccaacaagtgggtcacttggtcgcacattccagagggcgagtgggatcagaattggggcgaagttggaagttcgagaaaatgggccattggctagaaggggttaatccgctgggagggcccaagtcactacttggctgggctcggaaaccctacgagcacctgaaacccgaaggtcagcacattgtagccactgctgctttccggcttgtaggctgaccgaccagtcaagcgattgatgatgggatccgatatcgcattacccaatcgcttgcacttttcacttttcaattttccgctttgtcgctgattcggatgtgtcgcaagcatttcttctagctaaaatatacatttatgtacaatttaataactattttgtttggtaccagcatttcctgcagttcagtgacccacaacgagctgcttggcacaaaggttaaaaactgaaagtttgcttagttacaatcacctgtatctggcggatgtagatttaatcggattgggaaaagctggaggcagtagccgaaactacatttcctttttcaggaatttaatagctaacgattttaaaatggttttatggtggttataaaatggttataaaataaattattttagtacaagttatataagttaacttggagaataaaaacattgggtttacttcaatgataaacgttgattaggttactaaaataaattttgtcgtcaattatctagtaagatgataaaaagacagtgcagcaaatatacttaaatgcttcattttgggaatgtttaaagaaaatgttatacttgggacttttaatatatataaagttatatcagaatatatatcttttatcaaacaacagcctggtagaataataatatgat

SEQ ID NO: 33398 - DNA, 546 bp, DROSOPHILA
atgtggaagtatctcggattctttgcccttttggccggagcgagttctctgggtcagcaggctggtttggaagcctcgacctgtggaggaagtacagggtgcttaaggagcctgccatcgagatcatcagctgtcgagccctcggatgcgtatctgaaccgtaggaggaggcaacagcaaatcgtacaggaggtaatcgtggagaacaactttggtggtcccgggtttggtggacctggttttggaggacctggttttggaggtcctggcttcggaggtccgggcttcggaggccctggctttggacgtcccggctttggaggtcccggtttcggaggtcccggcttcggaggtcctggttttggacgtggcaaatttggcttcgctcgcagctacgaccaggatgaggcccaggtaccggttcagggaacataccaacaacaaaccacactcagtgaagttccttctccagcttgcccaaagaactatgtgttctcctgcgaagcggttatcaagccggttccatgtgggtacagctcatattga

SEQ ID NO: 33399 - protein, 181 aa, DROSOPHILA
MWKYLGFFALLAGASSLGQQAGLEASTCGGSTGCLRSLPSRSSAVEPSDAYLNRRRRQQQIVQEVIVENNFGGPGFGGPGFGGPGFGGPGFGGPGFGGPGFGRPGFGGPGFGGPGFGGPGFGRGKFGFARSYDQDEAQVPVQGTYQQQTTLSEVPSPACPKNYVFSCEAVIKPVPCGYSSY

SEQ ID NO: 33400 - DNA, 2294 bp, DROSOPHILA
tcggatgtctttataaactattatctatttctattaattatctatatacagtacacttcttatgctgactcactcatcgaagagtccacttaaccaggtgtcttacttatcgcccagctgatctgcgatccagtcaagatgctcctccttgaagcgaggatctgccatggtcagagccgtcgacttggagctgtagtaatagaaaaccgacactgcgggaaagaggaagatattaggataagtgtggaatgaatatttccggaactcactgatgcgctgtgccactgatagggcaatcagacccagtggccaatgatgaccgtcctcttctggcggctgacggtattggtagatgatccaaaagtgctgggaggcggacagaaggaagtagatggtaatgctggccatgaagagcttgcaattccgcaggattatgtgcgaggcgccgacctggtacacacacgtcgagtgcagggcgagggtgaacagcaggtactccgcgataatcagggcatcctgagtgctgtggtaacgtgctgtgttcagaaaggatatcttctccattccctaagatactcacacaaagagaattatggctgtctgcaatcggtttctggccagcgaaggaccaaaggcgttgcaaaagaggtccactcccaaaagggcgaactggaacaggagcacccaggagtagcgtcgcagtgttagcttcatggcggtgtccaaatgtcaagcgcttgttttcggtcaatttgttgcgtgctgactgtgcgggggtttgttgtgtccttcgtcctggtgacgtcaaagctaccactgcggtcatgcgctgtggatttgtactatccccttatcgatagacagatttccatggagaactggtgaaactttgaaaacgtgtggaaggcattggcgggaacagaaatgggtacgtatttttaaagaccaggttacaaattggagtcagaaaactatatattattctgggttgcttttattatcagacatatcgagcatattcaaaagggtactgctgccgttttcccgatcggaaggtgtccattctgccagcctgtcgccggaatctcctgtagtactgctggttcatctcggagtagaagtttgtgggcagtaggtgagaccaactgtggtcgccttcaccattgtggcggtccagaaactggaacatcgatgcggaagtgacttcggcagcccctgtgcgccagaatggccaggttggatttaaggtcaccagagccaagaccagaaaccagaacgtcatcgtcttagccatttgtgaagagagctgtttggccaaaacccggcacccaataccctcctccaaagtcgactgccggttgcaggtggtcagcagatttcgagccggggtgcttccatttgcatttttttcggaacgctgtcgttctactccgtcagtgcgatcagcgttttccgagtgggctataaagtggattggctgggaggctacaatcaacagtcagccttcgttcgtcacttcagcagcaagtagagacagctcaagaaccatccgcaatggcattcaactttggtcacctcctcatcgccggcctcgtggccttgtccgccgtgtcctcggagaccatccagctgcagcccactcagggcatcctcatccccgccccgctggccgagaacatccgtgtgtcgcgtgccgcctacggaggatacggcgctgccccagccgccccatcgtactccgccccagccgctcccgctgcccaggcctactctgctcccgctgccccagcctactccgcacccgctgctcccgcctactccgcacccgctgctcctgcctactctgctcccgctgccccagcttactctgccccagccgcaccagcttactccgcacccgcctccattccgtcgccgccgtgccccaagaactacctgttcagctgccagccctccctgcagcccgtgccctgctccgccccagctcagtcctacggatccgccggtgcctactcccagtacgtgccccagtacgccgtgcccttcgtccgcgaactttaaggatcgaaacgaatctgacttgacatctgaacctaagaataaagtaatgctttcataaaaaacatttaagatattttattgaaggggtatcaagggttttattgcttttctacaagctattaaaaaagtttcagctctctgaaataaatataattattaccgatatgatgcaacaaatttaaggttttgtgttttactagtacacctttttttaaaaagaacaaattcgtata

SEQ ID NO: 33401 - DNA, 294 bp, DROSOPHILA
atggctaagacgatgacgttctggtttctggtcttggctctggtgaccttaaatccaacctggccattctggcgcacaggggctgccgaagtcacttccgcatcgatgttccagtttctggaccgccacaatggtgaaggcgaccacagttggtctcacctactgcccacaaacttctactccgagatgaaccagcagtactacaggagattccggcgacaggctggcagaatggacaccttccgatcgggaaaacggcagcagtacccttttgaatatgctcgatatgtctga

SEQ ID NO: 33402 - protein, 97 aa, DROSOPHILA
MAKTMTFWFLVLALVTLNPTWPFWRTGAAEVTSASMFQFLDRHNGEGDHSWSHLLPTNFYSEMNQQYYRRFRRQAGRMDTFRSGKRQQYPFEYARYV

SEQ ID NO: 33403 - DNA, 2612 bp, DROSOPHILA
cgaaccagtcaagatgtgctccctgattcccagctgccaatggatctgtgaccaggagaagagctcctttgaaccctccctgctcctaatcacggagacacatttgtacatctcaggaaatggcaaattctcgtggctgtcagataaagttcaggaaaagcccattcaaccagaacttagccttaatcaaccactgagcaatttggtcgacgtggagcgcattacagaccaaaagtatgcgatcaactttattgatgagacgcaaaacaggtgcgagatatggaagttgcagttcgaaacgcatgccaatgccgcatgttgcctgaatgtcatcggaaagggatgggagcagctatttggagtgccattcagtctctctggaacgtgaggagcgaattacactagaaaattgaatatagcctgtaccaattattgtgcaaagtttaaaattgttgatcttaattgactatgttatttaatgtcagattagttttattaacttaggctagagctttcaatcaataagaaatggtgctgtaccacgatttaaatgtaaatatttataaatatagaggttattattttttgaagtccttgcaatatattcatatattacagaattaaatcgtctaaattgttttatttgttgttagatgaattatagttggtatcagtaagttgatattacatatttgcttctatttacacatgaataatattattggaaacaaaagaactacaatattgtcaaggaattttgtttgctaattaaataatattcacacgtgagttataaatgttatatgcatttaaactcggtcggatttattttcgacttatctgttagtgctatctacttgataatttcggcatagaggtttttcatttctgttttaaatcggatgtctttataaactattatctatttctattaattatctatatacagtacacttcttatgctgactcactcatcgaagagtccacttaaccaggtgtcttacttatcgcccagctgatctgcgatccagtcaagatgctcctccttgaagcgaggatctgccatggtcagagccgtcgacttggagctgtagtaatagaaaaccgacactgcgggaaagaggaagatattaggataagtgtggaatgaatatttccggaactcactgatgcgctgtgccactgatagggcaatcagacccagtggccaatgatgaccgtcctcttctggcggctgacggtattggtagatgatccaaaagtgctgggaggcggacagaaggaagtagatggtaatgctggccatgaagagcttgcaattccgcaggattatgtgcgaggcgccgacctggtacacacacgtcgagtgcagggcgagggtgaacagcaggtactccgcgataatcagggcatcctgagtgctgtggtaacgtgctgtgttcagaaaggatatcttctccattccctaagatactcacacaaagagaattatggctgtctgcaatcggtttctggccagcgaaggaccaaaggcgttgcaaaagaggtccactcccaaaagggcgaactggaacaggagcacccaggagtagcgtcgcagtgttagcttcatggcggtgtccaaatgtcaagcgcttgttttcggtcaatttgttgcgtgctgactgtgcgggggtttgttgtgtccttcgtcctggtgacgtcaaagctaccactgcggtcatgcgctgtggatttgtactatccccttatcgatagacagatttccatggagaactggtgaaactttgaaaacgtgtggaaggcattggcgggaacagaaatgggtacgtatttttaaagaccaggttacaaattggagtcagaaaactatatattattctgggttgcttttattatcagacatatcgagcatattcaaaagggtactgctgccgttttcccgatcggaaggtgtccattctgccagcctgtcgccggaatctcctgtagtactgctggttcatctcggagtagaagtttgtgggcagtaggtgagaccaactgtggtcgccttcaccattgtggcggtccagaaactggaacatcgatgcggaagtgacttcggcagcccctgtgcgccagaatggccaggttggatttaaggtcaccagagccaagaccagaaaccagaacgtcatcgtcttagccatttgtgaagagagctgtttggccaaaacccggcacccaataccctcctccaaagtcgactgccggttgcaggtggtcagcagatttcgagccggggtgcttccatttgcatttttttcggaacgctgtcgttctactccgtcagtgcgatcagcgttttccgagtgggctataaagtggattggctgggaggctacaatcaacagtcagccttcgttcgtcacttcagcagcaagtagagacagctcaagaaccatccgcaatggcattcaactttggtcacctcctcatcgccggcctcgtggccttgtccgccgtgtcctcggagaccatccagctgcagcccactcagggcatcctcatccccgccccgctggccgagaacatccgtgtgtcgcgtgccgcctacggaggatacggcg

SEQ ID NO: 33404 - DNA, 498 bp, DROSOPHILA
atgaagctaacactgcgacgctactcctgggtgctcctgttccagttcgcccttttgggagtggacctcttttgcaacgcctttggtccttcgctggccagaaaccgattgcagacagccataattctctttgtcactcaggatgccctgattatcgcggagtacctgctgttcaccctcgccctgcactcgacgtgtgtgtaccaggtcggcgcctcgcacataatcctgcggaattgcaagctcttcatggccagcattaccatctacttccttctgtccgcctcccagcacttttggatcatctaccaataccgtcagccgccagaagaggacggtcatcattggccactgggtctgattgccctatcagtggcacagcgcatcatgtcggttttctattactacagctccaagtcgacggctctgaccatggcagatcctcgcttcaaggaggagcatcttgactggatcgcagatcagctgggcgataagtaa

SEQ ID NO: 33405 - protein, 165 aa, DROSOPHILA
MKLTLRRYSWVLLFQFALLGVDLFCNAFGPSLARNRLQTAIILFVTQDALIIAEYLLFTLALHSTCVYQVGASHIILRNCKLFMASITIYFLLSASQHFWIIYQYRQPPEEDGHHWPLGLIALSVAQRIMSVFYYYSSKSTALTMADPRFKEEHLDWIADQLGDK

SEQ ID NO: 33406 - DNA, 3140 bp, DROSOPHILA
ctgaaacctgcatgaaagtgggaaagttcattaaactacagcagtaaaaagtttcaaaatactatgaaatatctttttacacctttatcgaataatatataatctttttaaacggcataacattgtaaacaagtgaatcaccattattaaaacacatgtagaaagtgccacccccttgcaaaaaaatcaatgacattcctcatagtacagccattagattagtcttatattttgtattaagtcaacttaattttctctcttttagattaatcttaccgcaaatcaacaaacacaaagatgaatgtaatgcgtaagctgcgcggagcggccagcgcaggcagcgtcagcggcagcagtagcggaacctcgacggcgaacaacagttcaccagggagcagcagaacggatgctggtgcaccgaccgctgcaaatggacggaatgcggaggaggcgctgatggacgcccgcgtccaagtgagcctcaccacgctaaagaagctattcaacgaatacactcatccgcgggagccgctgagcgaacaggagcgcgatgacaagctctacgagatgctgcccctcttctgcaaagtgagtgaatcagtcggtatggaggaataggccactaactccccattcttacaggtcttcagcagctgtccgtcaaacgacatgagcgaaaagttctgggacgtggtcgccttctgccagcaagtgtcccgtctcatggtcagcgaaatccgcaagcgcgcctccaaccagagcacagaggcggcatccattgccatagtcaagtttctcgaggtggaaaccaccgaggaaaccagcagcggatggatgcttttggctaccctcaatttgttggccaatggagacgtatctctcatacaggtatgtttcatttataaactgctatagtatcttatggtaaaaatacatcgacgtaatcaaaacaaaaaatttcaatagctacaattttcgttagggaaagtcgtcatcaaattcacgaagttttctcagttccaggcttcaaagagaattcgatgtgtgagttcgtagcttcttcatttgtaatatttgggttggctgcatctggaacttgttgttccttttctcccgcatcgcttggcttatggaccaattcagcattgcttaaagttctgagccgagaatagctagagccctgttctaccagcaaaatctccgatttctcccttttctcagtgtccgcccacatggaagatcgccgggctagcttccgatccatttgaatgggtttcattgtggcctcgctgttctcacttgaccgagttgaaacaaggctaacagtgctcctgtcctcgattttggcccacaagctcgaggaatcgctggagccgcgccaggctgaagcagacctgcgcatcttattggcctgctcttccatgtacacactgtactccgtgtccaccggtgtgatatccgattcactggtggttattgttggcgttgatagaaaactctcgtcactctcgatctgatgcagcgaaaagaactttttacgcgcatccccaatgaactgccacatgcggactataaagtgcggctgctccacctccgcgttcggccggaagtacaggatctgagaattggccaacttatagtagcacctgcagcatttgcatagaaagtcgtccactggcttggaaagcacaaatagcccggttgaaccagactctgttccctcaaagtacttacggccagtcgcctgacgtttccagtcgccgggttccatgcgcatcagcaggtcgaacacgtggaacatgtgcatcaggtacatggtgccagtaaccagcgcagcgatgctctgctgcttgcagtgcgcaaagtgcggatgttccagatactcgatggtagaattgatgaaggccaggtgagggtccagcatggcggtgcgcattatcagcacgccgcagaaatagtgcgacagcacggcactcagtgtgagcaggagctgggaggagagcaccgtactcctagccaatagcagtcggaacgcgcctagagcggcgagcgccgtaaaggacgaaaatgtggcacaatataggatcacatgaggagtacgctctggccagtaggatgagccgcgtatgtggaaaaacatacaaacactgcccagcaacacctcgatgagtttaaaaaacacccaaacctggttcatttcacagacgtattctagtttaaaatggtttagatttagttttggcaacagatgaaaaaggttctgcgggaaaagttgtatctcaaaatacaaaacaccgccggggctgcgggcttaaattaagatgttaaatctaaactaactaagcaattctaatattgctgcatttcaggtcatgactgctgcggcggttccctctactttagtgaagtgcttgtacttgttcttcgacctgcccatagttgaggacgatgagccttcagctgacggtggagcagtaagtgagtttaatgcccatgaaaggcggacgcttctgcagaaggtgtttgtgcagctgctggtcaagctgtgctcgtatccgtatcccgctgaggaactagctcgcatggacgacttgacgctgctattctcggccatcacatcgccatgtcccatccacaatattgtatggcgcaagaacgcagctgaaatcctgaccacaatatcaaggaatggcctaaccgatgccgtagttagctatatacattgtaagtatggtggacttaatcattatgactaaatattcttaaaatgtttcttaatttagccaagggctgcatggcactttgcgtggacaatatgcagcgcctgacgtttggaaatcctttggagatcgttgaaatgttcgtcaccgtgttctgctttctcaaggactccagtcaggtatcccagattttgatggatgattttcgtgcatctcaaggttacgtgtttctcagtgattttctactcaagtaagtacaatagttctttttttaagcacttcttaatattcatattaatttttaggtttgacaacaatcgtagccaatcattggagattcaagcggccattcgaaatctggtactgatgatctcttcgttgtgcatgtgtggcttttacgagcttcgaccgccagcctcg

SEQ ID NO: 33407 - DNA, 1140 bp, DROSOPHILA
atgtttttccacatacgcggctcatcctactggccagagcgtactcctcatgtgatcctatattgtgccacattttcgtcctttacggcgctcgccgctctaggcgcgttccgactgctattggctaggagtacggtgctctcctcccagctcctgctcacactgagtgccgtgctgtcgcactatttctgcggcgtgctgataatgcgcaccgccatgctggaccctcacctggccttcatcaattctaccatcgagtatctggaacatccgcactttgcgcactgcaagcagcagagcatcgctgcgctggttactggcaccatgtacctgatgcacatgttccacgtgttcgacctgctgatgcgcatggaacccggcgactggaaacgtcaggcgactggccgtaagtactttgagggaacagagtctggttcaaccgggctatttgtgctttccaagccagtggacgactttctatgcaaatgctgcaggtgctactataagttggccaattctcagatcctgtacttccggccgaacgcggaggtggagcagccgcactttatagtccgcatgtggcagttcattggggatgcgcgtaaaaagttcttttcgctgcatcagatcgagagtgacgagagttttctatcaacgccaacaataaccaccagtgaatcggatatcacaccggtggacacggagtacagtgtgtacatggaagagcaggccaataagatgcgcaggtctgcttcagcctggcgcggctccagcgattcctcgagcttgtgggccaaaatcgaggacaggagcactgttagccttgtttcaactcggtcaagtgagaacagcgaggccacaatgaaacccattcaaatggatcggaagctagcccggcgatcttccatgtgggcggacactgagaaaagggagaaatcggagattttgctggtagaacagggctctagctattctcggctcagaactttaagcaatgctgaattggtccataagccaagcgatgcgggagaaaaggaacaacaagttccagatgcagccaacccaaatattacaaatgaagaagctacgaactcacacatcgaattctctttgaagcctggaactgagaaaacttcgtga

SEQ ID NO: 33408 - protein, 379 aa, DROSOPHILA
MFFHIRGSSYWPERTPHVILYCATFSSFTALAALGAFRLLLARSTVLSSQLLLTLSAVLSHYFCGVLIMRTAMLDPHLAFINSTIEYLEHPHFAHCKQQSIAALVTGTMYLMHMFHVFDLLMRMEPGDWKRQATGRKYFEGTESGSTGLFVLSKPVDDFLCKCCRCYYKLANSQILYFRPNAEVEQPHFIVRMWQFIGDARKKFFSLHQIESDESFLSTPTITTSESDITPVDTEYSVYMEEQANKMRRSASAWRGSSDSSSLWAKIEDRSTVSLVSTRSSENSEATMKPIQMDRKLARRSSMWADTEKREKSEILLVEQGSSYSRLRTLSNAELVHKPSDAGEKEQQVPDAANPNITNEEATNSHIEFSLKPGTEKTS

SEQ ID NO: 33409 - DNA, 2609 bp, DROSOPHILA
gctggtttgttcaagggtgggtggcgggcagagaggccgagtgagagtacgcgagagaggaagaaaaatcaataaaattgtcgtgaggcgcgattgactggagcaaaacaaagtgcgacacgaaagagagcgctaagcggactacgaaaaagcaacaacagagcggccgttagctgaaccaaatgcgttggcagaaaagagaggtcagatagtcggtagtttcaaagggagttggagtaaacaaacaagtgcgcaataagtaaaccaagaacagctgtctcgcacaaaatgtaaatatttcccgaatatatggaataataaccactatcggttaatcgcttgctcgctatgtaggcgtacgaatcgaatcgagtcggcgacagaggcaacgttcattcactcgcgaaaagttaatactcgcaccgaatacaatgatcgcacttttcgtgtgattcacctccagcggccgctaattaaggcggcggcagcagaaatagaatagctgcgaaaacaagccataacgccaactgcactgtgcgcggttgtgatttggaagccactcaattgaaagtgtcagtgctgtgcaaataaatcgccaaaatatctcacctccaatgttcaaaagatacaatatctacaataagcacaggttctatggaaacatatgtttaaatgcgaagcgacacgttttgaactgaaacctgcatgaaagtgggaaagttcattaaactacagcagtaaaaagtttcaaaatactatgaaatatctttttacacctttatcgaataatatataatctttttaaacggcataacattgtaaacaagtgaatcaccattattaaaacacatgtagaaagtgccacccccttgcaaaaaaatcaatgacattcctcatagtacagccattagattagtcttatattttgtattaagtcaacttaattttctctcttttagattaatcttaccgcaaatcaacaaacacaaagatgaatgtaatgcgtaagctgcgcggagcggccagcgcaggcagcgtcagcggcagcagtagcggaacctcgacggcgaacaacagttcaccagggagcagcagaacggatgctggtgcaccgaccgctgcaaatggacggaatgcggaggaggcgctgatggacgcccgcgtccaagtgagcctcaccacgctaaagaagctattcaacgaatacactcatccgcgggagccgctgagcgaacaggagcgcgatgacaagctctacgagatgctgcccctcttctgcaaagtgagtgaatcagtcggtatggaggaataggccactaactccccattcttacaggtcttcagcagctgtccgtcaaacgacatgagcgaaaagttctgggacgtggtcgccttctgccagcaagtgtcccgtctcatggtcagcgaaatccgcaagcgcgcctccaaccagagcacagaggcggcatccattgccatagtcaagtttctcgaggtggaaaccaccgaggaaaccagcagcggatggatgcttttggctaccctcaatttgttggccaatggagacgtatctctcatacaggtatgtttcatttataaactgctatagtatcttatggtaaaaatacatcgacgtaatcaaaacaaaaaatttcaatagctacaattttcgttagggaaagtcgtcatcaaattcacgaagttttctcagttccaggcttcaaagagaattcgatgtgtgagttcgtagcttcttcatttgtaatatttgggttggctgcatctggaacttgttgttccttttctcccgcatcgcttggcttatggaccaattcagcattgcttaaagttctgagccgagaatagctagagccctgttctaccagcaaaatctccgatttctcccttttctcagtgtccgcccacatggaagatcgccgggctagcttccgatccatttgaatgggtttcattgtggcctcgctgttctcacttgaccgagttgaaacaaggctaacagtgctcctgtcctcgattttggcccacaagctcgaggaatcgctggagccgcgccaggctgaagcagacctgcgcatcttattggcctgctcttccatgtacacactgtactccgtgtccaccggtgtgatatccgattcactggtggttattgttggcgttgatagaaaactctcgtcactctcgatctgatgcagcgaaaagaactttttacgcgcatccccaatgaactgccacatgcggactataaagtgcggctgctccacctccgcgttcggccggaagtacaggatctgagaattggccaacttatagtagcacctgcagcatttgcatagaaagtcgtccactggcttggaaagcacaaatagcccggttgaaccagactctgttccctcaaagtacttacggccagtcgcctgacgtttccagtcgccgggttccatgcgcatcagcaggtcgaacacgtggaacatgtgcatcaggtacatggtgccagtaaccagcgcagcgatgctctgctgcttgcagtgcgcaaagtgcggatgttccagatactcgatggtagaattgatgaaggccaggtgagg

SEQ ID NO: 33410 - DNA, 555 bp, DROSOPHILA
atgcgtaagctgcgcggagcggccagcgcaggcagcgtcagcggcagcagtagcggaacctcgacggcgaacaacagttcaccagggagcagcagaacggatgctggtgcaccgaccgctgcaaatggacggaatgcggaggaggcgctgatggacgcccgcgtccaagtgagcctcaccacgctaaagaagctattcaacgaatacactcatccgcgggagccgctgagcgaacaggagcgcgatgacaagctctacgagatgctgcccctcttctgcaaagtcttcagcagctgtccgtcaaacgacatgagcgaaaagttctgggacgtggtcgccttctgccagcaagtgtcccgtctcatggtcagcgaaatccgcaagcgcgcctccaaccagagcacagaggcggcatccattgccatagtcaagtttctcgaggtggaaaccaccgaggaaaccagcagcggatggatgcttttggctaccctcaatttgttggccaatggagacgtatctctcatacaggtatgtttcatttataaactgctatag

SEQ ID NO: 33411 - protein, 184 aa, DROSOPHILA
MRKLRGAASAGSVSGSSSGTSTANNSSPGSSRTDAGAPTAANGRNAEEALMDARVQVSLTTLKKLFNEYTHPREPLSEQERDDKLYEMLPLFCKVFSSCPSNDMSEKFWDVVAFCQQVSRLMVSEIRKRASNQSTEAASIAIVKFLEVETTEETSSGWMLLATLNLLANGDVSLIQVCFIYKLL

SEQ ID NO: 33412 - DNA, 2226 bp, DROSOPHILA
aagcgaaaaaaagatgaagatggaggtggtgggaatacctgtcttcttgaaatattgttctgcatggaaagtttggggcaaagtttatgttgcatacttgcaggcggcgagaaactttgctcttgcccgaattccccaatccattagacaagttttcgagacctcttttgctcccagacggccaaaaacaatactgccagcagcagcttaatcacctggacactttcaagtggacaaaagtcagcacctttctaggccactcgtcggatatttagagtgttgcacagggaaaaattatgagtccctctcaaattactagtaaatcaaaactacacaatagcgcatattttagtgcacaaattggttaaaatcatttcaataaatagcaaattttatatataattttttcttaagtaaaatgactttttcagtgtatccatcaaatgataacttctaaattaaagtagctgcacttcttgcgcatatttgaattaagtgtctttctaattaaatagatagtccacagtgtgtcactttatttcttgcataattaatggcttcactagcgtagtttggcttataaatttattagggggaaacacaaacttgtcgtatggaaaagcgtttgaggcaggagagaataaattcgaattgcgcaaacttttcaccggccaagtttagcgttggatggctctaaaattgtaatctactgtggggacagccccccagaagtctgttcaatggggaatgtttatccaacagatgctgatttgcatacacgcagagcacacattgtgccgaacataatatatataatatatatatatagctatagagcagatagttatttccatgtatatgcatttgcaggtcacgttcgtatcgcggtgattccaattttaatgcgctgctaacaccgctcacctttctggtcacgtacttcaattcgggcgtaaatcccctactctacgccttcctcagtcgcaattttcggaagggcatgaaggagctgctcctctgctcctggaagaagggcaagggcaagtcctcctcgaactcctcgatgcaccacaagcgcaaggcgctgcaggtgagtacaattgccgacttcccggcaaccggcatttggcacctgatattagacgcgtaaacagtccgccttcttcaccccgtagacccactcgctgcccacggacaccacccacattgggaacgagcagctatgatggccacgcggctggaggaggcccctcaagctcttcgggcgccgctcctaggacgcagcccatcgaaggatggacccacttcctgtccgttagctagtacttcattgtgatcttggtagccagccctatcgctcggatcgagtcggcggccaaagcggaactggtgtcaagttgtattgatagagtaagcgaattcttaagggaaaaccaattaacttacatgcagctcctggagcattgctctcaagttcttagtctaaggatatgatttagtgcgagtcggcataaataaataaatgaagcaactgcttgcaaatatatattgtttcttcatggccaaaatcaattgcatttcaagtacgagtatgagtatggcttgcacccatttcgaaataacgtcatgctgtttgggtgccaccgagtgcgtccgcaatttatataccatatctatatagacctgacttgcgatatctgatgacaggggttttatggtcagccggagaacacgctccgttgcggctgccaaaaaagggaaaaatatgacacccagaggaggaggaattttttgcttagcacagcaatttgtatccccactttgggcgtggaggttgtcagacgactcgtaagtcaaatgggaaaacgctgcagtaaattctcgagagaaaactcaattaactggatggtctgacgttggcgcaaattaaaaaccaaaaatctttgtaaaaatctcttgaaactcgtagtttgtttgctccgccacttctttccgcctttcactttttcacaatgctttgtaatgcaaagagcgttccaaaaactgtgtcaaactatttctggaaaaggacccccagaggagtgaggacttcgcctttgattggctggattttttattcataaactttgtcctttggaaatggcgttcgattcgatgtcgtgttaaaatggtaaaatgctgttttgtacaggtaaggaaaatggtattcgtaataagtttgttctg

SEQ ID NO: 33413 - DNA, 141 bp, DROSOPHILA
atgaaggagctgctcctctgctcctggaagaagggcaagggcaagtcctcctcgaactcctcgatgcaccacaagcgcaaggcgctgcagacccactcgctgcccacggacaccacccacattgggaacgagcagctatga

SEQ ID NO: 33414 - protein, 46 aa, DROSOPHILA
MKELLLCSWKKGKGKSSSNSSMHHKRKALQTHSLPTDTTHIGNEQL

SEQ ID NO: 33415 - DNA, 7112 bp, DROSOPHILA
gaatgataactaattcaataaaactacagatttcaataactaaagcatacatgtatatgtatctatgtatctatgactatgtatctcgaatcctccgctgaaactctaaactattcccatgcagtttcttttccttcgtatcgagtttcagagcacggcttgtagtgttgcacgtttttcgtattttttggcagctctggctggtttttttcattttccttttttttttgtactcccatttcctgtcaccctgcccggtgtaattaaaaaagtttttctcgacatttgcttgccatgtgaggctccaggaacaaatgcgttacattgtggaccatccgattgtaaaataaattttaagtgcaatacgaagtgcaaactcagccgtaacaataagatttttgcaataatatttaacttttaattgtaactttggtaaagtcaatgttttctttttccaagttggccaataaaaagagcataaagcaaagcgaaaactttagtgcgtacttttattacaacattaacttcatgctatatattttatttaaatattttggcttttctatccattgtttttcagttaatatcttaaacaaacaatttttgatgcactacaaatgctgttgattttaataaacgatttatagcttacatggattattagctatgtacatataattacgaatatttttaataaagggcatacttaataaattgaaattctggaaaacactcatttatttaacactagcaaattagcgcacaaataatgtgcaaagttcgttaatctttaaagtgtatttgtgaccacagcacaattaaacggtggtccgaaattctatatcttctaattccgcattgtttttttttttttgtgaatttttcaggtaacctccttgttattttggtggtcacattatcacgacgactgcgctcaataaccaactttttcctcgccaacttggcgtttgccgacttctgtgttggactcttttgtgtgatgcagaatctgtccatctatctgatagaaaggtgagtgacaattggcaaaaacaacattatttcagtattaaattaacgtttcatcatgcacgagcggagctgcaaaattctcggaaagcatatacgaagaatacgtgaactaacttcactgtaaagttgccaatagtttttaatgtccgttttcatacgcaaaaaatttaagtgaagcatttaagtgaagcatttatagaaaagtttttagttatagtaggttaaaaattaacacaaaagttaaagtagcgtttcagctagtacagatagtagaatgttatgtggtcgattaaatttatttatttatcagctgcagaatgtggctgaaacggtatctgagtgcatacgtatgtatgcatgtgcctcgaaaacaaagccccaaaaaaaagtttcaactttcaaccgtgaaacatttacgccggctgtcacataaaggaaactaaaactccgcaggcgtcactttcacttcaggcttttcaggcttttatccccacgctccgctttcactccaatcatgtttatttgcattgtgtttccttaactttcccaaaaacacgtcgcagtgacgtgttcacttaaaataaagcgtggagtgctgcttgaaaattcaaacaaaaagaagcctttttcagatttgcagggcaaattaaaaaagtattttgacaaatgagtttggcttacagtttctataagttatttaatttaaaattttagtcgcagtgtcagaaataaataatgcttcattaatttaaatttgtgaaatgcatgtgtttaatatgtgtttaattaaaagctatgttctatacatttagaaaaaaaagtaattacctatctcattagaattcttgaaatgaccatttatttatgcacttaataataaacagacataatgatttatttgcattcccgatgttaaatcctgaaattggtttgcatattttccatttcattttctaatatgctttttgtggccaaagaactaaattattgagatgacccatctgtgtttggcataattttagctaaattatgcgcacaacttgacgcccaccagaaatcatatgcaaaatgagatgagattacgaaaaatcataatttatgcatttataatttatatgtgcggcatacggctgccagtgacaatttaatttaatgattataaacatcaagtcgttttaagaaagtttttagttcattatgttaaggaatgatttgtcccttttaaagagagaaattgaatcaccaggcaaatggggaatctttttaagaaacgcattatccaaaatcttggcgacaaccttcaggattattatgtttattatagtattattgggcacatttaaacgcatgagtgcgaaattacgtggcattgctaataacgaggcacaaatgcggttttcgaatgtaatttcagccgaaatagtaataaaaaggaaaaagctttgcgcctcataaaatactaaagacaccttaatgtcgcattagttttggcgggcgtgtcataacattttatgtggcttgtgctaaatttggctctgccaccaatattgccaagtatatgctctttaaagagcgaaacttttgcccataaataattatttatgtcctttcagctgggtctttggcgagttcctctgccgcatgtaccagtttgtccactccctgagctacacggcctccattttcatcctggttgtcatctgtatggagcgctactttgccatcgtacaccccattacctgcaaacagatcctaactgcggctcgtctgagggtaagttctaaccataaacctcatattcacggccagtaataggcaagtatgcattttaaatgaggtctatgtgtatgtgccctgcttttttcaattcccattttgatgggtcaaaagcggaggaaatctgtttatgtattgtattttgagacattctcgcaactttaataacttcatttgaatacaatttgcaagctaatgaaacttattagaccaagcccggagactcatgcaaattaaccggcagaacagaaccgactcgaaaggcttaataagccgtgggcataactttgtggccgggaaaacttttccgcactcgaagggtgaagtggagggagcgcagccaaagggttgaaccacatagcccggttgtttcatcacagccagacaaaaaatacgtttcggtaatgacgattgcactaattaaactacaagagacataaagacaacgaaatgggctatccattaacatgcaaattcagtgtgttcattcgcaatttaacaaattgtttgcgtgtttggcagccgagcagacaaaacaaaacgtcaatgcgtgtttttttttttgcagatggtcattgtcacagtttggattacatcggcagtttactccacgcccaagtttgttttcagcaagaccattaagaacatccacacgcaggacgggcaggaggaggagatatgtgtcctggaccgtgagatgttcaactccaagttgctggacatgattaactttgtgcttctctacgttatgccgctcttggtgatgacggtaagtgtaacaaatgatacgtagcttgaagttaataattatgtttaaccaatccttggataggatgttcataaattcattttcaatccaaaagtgtttcctagtcacgttacctagcattgagcagactataattaataattaaatgtatttttttgaattgcttattaaagtgattaattatatcaataacaactatctctctaatgagatagaatataaataattttgggtacataataaataatctatgaaatgatttttcttcgtctgttaaaaaagtgattaatggaagtgtagatttccctttatttttttaacgactccatttttcaatttcttctgagaaatttgataagaattgagaagctttttgcataaaatcgccccttgttccgcaatgaaatttgaataatgaatttaacgaacccatttgcattgcaggtgctgtacagcaaaatcgccatcgccttgtggcgcagttcgcgcggcctcacgccgcatgtggtgcagcatcagcatcagcagccgcagcagccatcctgccaggacattggcatgggtatgcacaacagcatgtaccatcaccatccgcatcatcatcaccaccaccaccagcatcaccagctgcaatcggcggcttcgtcggcaggagtggtgggagtgggtttgggtggtggtggtgggggcggtcctggtccgtcactcgcttccggcggcagcagcaccacgtccttgtcccgcaaacagagcagtaaatatgagaagcgcggcgtcagcatcacggagagccaggtgagctgccaggagaacactgcatcagaaaaatcgccggttgagcacggaggagtagccttaaaagcctaacaatagcaataaaccgaaagtggagtcgaacctttgttccctaattggccagaacggctttaacttcgattgagtccgcacgtgctgtgtggtaaataatgttttttgaaaatcacatcgctatcggagcactaatttattagatacaccatttgtcggcctggccaagttggcagtcgtaaaaactttacccgtagctgttactcccgcactttcgccgggccaagtggcacggtgctcggagcaggtgtcaattcacattaaggccatcgcaggaccatgccacaagctcggccaccgatgtgacacctggagtgtggagtggtggagcgaagtgaccaccggcacagggcgaaactgcaagtgcgaggccaaagttatggcaaaagtgtttttttttttccattatcggtggccggacagcaggttcaattggtcgggtgcaccatggcgtatttcttatttcttatttcgagctcgacagcagctttgccacacaaactggcacacacatcattgttcttgatcagcatcagcagctcactttgtcaataaaagccggcggataaaaatcgagaatttgtgacacgatgacattcggaaaagttgtgcaactgccgcagattgaaaattggtaaacaccaaaggcaaggcccttgaattttttaatattcctcgaagtatcaaatgtcaggggagcactggttcgatttcggtatgttttccgttttaaaagtcacaaaaatggaagtttggtaggaaaaacaatggcgggaacacctttataaaacttttacataactttagtttacgctgttccttaacttatgaccccgatatacacagataacaacctaactatctttctgttgaactcttttctctctctctacctttcgtttgatcaataaaactctgtgctctccccctctactaactccccaattataacaacaaccacacacaatcccacaccacaaattagctcgataattgcaaggtaggttgtaatcgaatatcaaaatcgatatgataatgttcaacaactgttgcggccagcgacctaatgccattacacctgttaatccgcacaggtgtccctggaggccgatcgtcccattgtcagtgcctgccgcaagacgagcttctaccaccacggccacgcccatcaccagcgggcgggcaacgcctcagtgggcggtggcagcggcggagccggggccggagccacccacatgtcccactcgtccagcaacgtcctacgcgcccggcgcggcgttgtccgcatgctgataatattcgtgctgacattcgccctctgcaatctgccgtatcatgcccgcaaaatgtggcagtactggtgagtagtcccttcgtccacccaccacccataatcacaatccaatgcgaatcggaatcccaatccctatccctatcccttaccgcaggccattcatcagcccacacggactgagtgtaaacaatattttatggtatattgcaccggcaatcggcgggaatttgcatagtcctccgttggacgggaaattaacatctgcgagtgggcagataagctctagatggcttcctgctggaatcgaggctagtaaacaattaagtcatcaatggacagagctggagctgcagccagctttgccgctggcctaaatgatttgaaagcggtcttccgttttccaatcccactcccttcccaaagacgccagtttcgctttcttctcgcctttcaaaagcggtcgccaagaaaagtccgttttagccagccctttggctatcagttccgcttccggtggagcactttcgaataggtggacggaccgcttagtttgctttgaattcgggcaatttggtttttccggctggcgggtgtggtgggcgtataacttgataagtgagtgggcggtggaagtgtttttgtttgctaaatcgaggaggagttaattgctccctgggtagaattaaaaacgtgcacttaagctgctgactgctgtaaattggaaataaaataaaagtcacagaaatgtcctttaagcgaaagtcgaaagacaaacgattgattgaagatgggaaaagtcatcaagtgtgaaaatctggagacattggcaattttggcacgtaagagaaacgtttttattttgaacttttcatacagattctactaaaccaaacgtttttgagtcaattgtaaattgtaaagcattttacatgccgatgtgcaataaatccaatttaatgttcataagttcatgtttttggtgaataactactgaaataaatatcgatctctagttctcattagtgcaaatattcagtgtaattttgtaagaaaatacttcgctgcagatttgcaacgttgcacttttggcaaacgcaacgaaaacgaaaatgtttttgaatttttgttcgagcactcaatttgcacaattgtaaaacgaatggcggacaaataaatataaataatatctggccaaatacaagagaaatggatttccacatcgccacttttcccgcagtgccataattgagatttatgtctagcccggaatgggcagcgagacttgtttacttgtttgaactttcagcttttatttatttgaagaattggttgcccccagggatattggtattgttaggtggaattgaaagtgtt

SEQ ID NO: 33416 - DNA, 1437 bp, DROSOPHILA
atgcagaatctgtccatctatctgatagaaagctgggtctttggcgagttcctctgccgcatgtaccagtttgtccactccctgagctacacggcctccattttcatcctggttgtcatctgtatggagcgctactttgccatcgtacaccccattacctgcaaacagatcctaactgcggctcgtctgaggatggtcattgtcacagtttggattacatcggcagtttactccacgcccaagtttgttttcagcaagaccattaagaacatccacacgcaggacgggcaggaggaggagatatgtgtcctggaccgtgagatgttcaactccaagttgctggacatgattaactttgtgcttctctacgttatgccgctcttggtgatgacggtgctgtacagcaaaatcgccatcgccttgtggcgcagttcgcgcggcctcacgccgcatgtggtgcagcatcagcatcagcagccgcagcagccatcctgccaggacattggcatgggtatgcacaacagcatgtaccatcaccatccgcatcatcatcaccaccaccaccagcatcaccagctgcaatcggcggcttcgtcggcaggagtggtgggagtgggtttgggtggtggtggtgggggcggtcctggtccgtcactcgcttccggcggcagcagcaccacgtccttgtcccgcaaacagagcagtaaatatgagaagcgcggcgtcagcatcacggagagccagttggcagtcgtaaaaactttacccgtagctgttactcccgcactttcgccgggccaagtggcacggtgctcggagcaggtgtcaattcacattaaggccatcgcaggaccatgccacaagctcggccaccgatgtgacacctggagtgtggagtggtggagcgaagtgaccaccggcacagggcgaaactgcaagtgcgaggccaaagtgtccctggaggccgatcgtcccattgtcagtgcctgccgcaagacgagcttctaccaccacggccacgcccatcaccagcgggcgggcaacgcctcagtgggcggtggcagcggcggagccggggccggagccacccacatgtcccactcgtccagcaacgtcctacgcgcccggcgcggcgttgtccgcatgctgataatattcgtgctgacattcgccctctgcaatctgccgtatcatgcccgcaaaatgtggcagtactggccattcatcagcccacacggactgagtgtaaacaatattttatggtatattgcaccggcaatcggcgggaatttgcatagtcctccgttggacgggaaattaacatctgcgagtgggcagataagctctagatggcttcctgctggaatcgaggctagtaaacaattaagtcatcaatggacagagctggagctgcagccagctttgccgctggcctaa

SEQ ID NO: 33417 - protein, 478 aa, DROSOPHILA
MQNLSIYLIESWVFGEFLCRMYQFVHSLSYTASIFILVVICMERYFAIVHPITCKQILTAARLRMVIVTVWITSAVYSTPKFVFSKTIKNIHTQDGQEEEICVLDREMFNSKLLDMINFVLLYVMPLLVMTVLYSKIAIALWRSSRGLTPHVVQHQHQQPQQPSCQDIGMGMHNSMYHHHPHHHHHHHQHHQLQSAASSAGVVGVGLGGGGGGGPGPSLASGGSSTTSLSRKQSSKYEKRGVSITESQLAVVKTLPVAVTPALSPGQVARCSEQVSIHIKAIAGPCHKLGHRCDTWSVEWWSEVTTGTGRNCKCEAKVSLEADRPIVSACRKTSFYHHGHAHHQRAGNASVGGGSGGAGAGATHMSHSSSNVLRARRGVVRMLIIFVLTFALCNLPYHARKMWQYWPFISPHGLSVNNILWYIAPAIGGNLHSPPLDGKLTSASGQISSRWLPAGIEASKQLSHQWTELELQPALPLA

SEQ ID NO: 33418 - DNA, 2609 bp, DROSOPHILA
attccctagaccctgattccgtggattatcccaaaagattttcatggatttctttaaaattatgcatgcatgataccctctaaagcgcctataaatatgggtgcataagaatcgagggtgttaattacttgacagtctttatgtttgcacatgtttgatgtagtgagtttgcatacgagtgtctattaattagagcacgtacacgagcatagagagcaataatcaaagatggaaacgtaggagaagggggcatggttgtgggagggggggtatgttatgatattgccaactgcactcgcgtaattagcaacaaagcgttgtgcatattaaaaatagcaaagtggcagccagcagatatacacaaatattggatggaatgagcagtgattgcgtgcgtggcaaatggaaattcataattttcttcttattttttttttgactagtgcctgtgtcgtggcattggcagacaaatgttttaattatgttcgttattaaaggcggcttaattaaaatgtccactcaaacagctatagcaataagtatccgacgacttgtgtaggcggctgcgagattttcagaaggggccacgtttaattgccgtaggacataagagacgtgacttcgccgttaatgaactaaacctgtcctttggagtccttcgactacatcaaaaattaaacgtgtgcattggctttaaaaatggcttacgaaccattaatgcggactaaaacaactaagattacggctatgttttgccattgaaagaatagttggtaaaaaccaatgtaagaattatcataaatgctcctcctttagggattaccctaatagaaaagatttcgaaaacaacataagtgtattaaaaacttttaagcaacttgtgaatgctttaaggaaccacagacaagaactaactaaattccatcgcactcttttgtcttttgtccttgcagcgacgtcctttattggcggcccaaggagtcgtcgccacacgcacgaaatgattatgacgatgatgcagacggtaagggcatggcaacaggaatcggatgtggagcaccgaaaacaacataagcagcgatggcgacctgatggggcacacatatcagcggcttacgacctcaacagtgataatgacgacggccaccacagggtggtgcataatcaaaacaacggcagcccaaacagctctccgaatcagagcacttccgccttccgacagcggcaaccgcaccacccacccaccggacaacaaccgccccggctgccctgcaccgtaacccacttctccgcacactggaaaacgctgctcatcctgctcaccctgctctccgcttccacgctgacagcctccgccaatgtcaccagcaccatcagtccgcccatcaacggcagcagcaccgattacatcctgctctatggcgaatccaccacatcccttgtgcccgccctgaccaccggactctcgggggacggaagtggtgcggttatcgaggacgaggaggatgccgagaaggccagcgagtacatctttgatcgcaccgatgtgcgcataatattcatcacactctacacactggtgttttgctgctgtttctttggtgagtagtagacttggatttatctcatcctaatagcacaaatgatttaattacgaaattattgatttagaaacattagcccgccagctatggcctttggtcataattttagtctaattaagagataataatattgtagttaatgttttcagacaacattttctctgtgtgcaggacttgccgtacacttacaacgtttttcctgtgtatatagtgctatgctatatacacaagatttatagttctcatacgcatttatcagagcagagctcgatgttatgttcgattgtgcagcatgtagcatgatggggcacaaaggcctgccgaaacatacatgaaagtaaagaaaagacggcctgccggccgtttgcggtgccccagggacatctttctgggtcgaccaggatgtgcaaacttactgctgacttgccaattactcaatgccctgctgttcggtttatgctgtgtttttgtccagtctgcctagtatttaagtactctcagggcttttccactctgctcttggcgcagcaggaaaataggcaaagtactaatagttatattgcgagcataatacttaacttgctagcaattttaatgtgttatttcagtgttgctgtttctaacttttaagcggattgaagaatctaaaatactagaagagtttgttacaacacactcactatcaaaatatcgatctatttacgaacccattttccatttcatgcggaataaattaggcagtcttccttctcaacaacagactttttttcatatacattcgcacaacactcatacgccccatgtggcgcattataatgaaaacattttattgatagcgcccattaggccatttgctatttgtttctgcaatgcttaattgcagacacacacacacacacacacgaatacggaatgtcctttaactttgcgtcttatctgggtgcgcgtgcgagtacggatggttagaatcaattacgttagtcgttcgattgggctctttgcggg

SEQ ID NO: 33419 - DNA, 609 bp, DROSOPHILA
atgattatgacgatgatgcagacggtaagggcatggcaacaggaatcggatgtggagcaccgaaaacaacataagcagcgatggcgacctgatggggcacacatatcagcggcttacgacctcaacagtgataatgacgacggccaccacagggtggtgcataatcaaaacaacggcagcccaaacagctctccgaatcagagcacttccgccttccgacagcggcaaccgcaccacccacccaccggacaacaaccgccccggctgccctgcaccgtaacccacttctccgcacactggaaaacgctgctcatcctgctcaccctgctctccgcttccacgctgacagcctccgccaatgtcaccagcaccatcagtccgcccatcaacggcagcagcaccgattacatcctgctctatggcgaatccaccacatcccttgtgcccgccctgaccaccggactctcgggggacggaagtggtgcggttatcgaggacgaggaggatgccgagaaggccagcgagtacatctttgatcgcaccgatgtgcgcataatattcatcacactctacacactggtgttttgctgctgtttctttggtgagtag

SEQ ID NO: 33420 - protein, 202 aa, DROSOPHILA
MIMTMMQTVRAWQQESDVEHRKQHKQRWRPDGAHISAAYDLNSDNDDGHHRVVHNQNNGSPNSSPNQSTSAFRQRQPHHPPTGQQPPRLPCTVTHFSAHWKTLLILLTLLSASTLTASANVTSTISPPINGSSTDYILLYGESTTSLVPALTTGLSGDGSGAVIEDEEDAEKASEYIFDRTDVRIIFITLYTLVFCCCFFGE

SEQ ID NO: 33421 - DNA, 3091 bp, DROSOPHILA
tgcaactgctctgcggacgcatcatcccggggcggtgtcatgtcgcggttgttgagcagcgcctctggcggcagcggatcggcgttcttgggcctgtgcaggttcttcaggatgcgattgataatgtcgtacttcttccagcgcgtagcatagctcgaaggatccgcctgcagctgttttttgacttgccttaaaagggaaaccagtcagttaatccggtatagcaaagtgtctaaacggttacctacctgaacttggccctggtctggttgaccttcatctggatctcctcgggcttcacgtccacggcgaaccggtcgcgcagttcctcggcccaccggccaaagaagatggtgttcttgccggtgcgcgtcaggcgccagttgtcgcgtccccagatctcgtacaggcgctcctcctcgctgggcgtccagtagcgacgcgccttctccttgcccctgccatcgagcagctcctgaccaccgcacatgcctaagtcctgctcggcaccgctgccgcttccgcccgcgttcaacgccagcttctcgtagtccatcgactgctctgcaccggctcctgatctgctcccgcagatgtatccctgtaacgttgcctttggatatgcgatctccactctagttacacaatgcgacgctgtggtagaatggttgaagccaagtgcagtttttccgcacaaaaaatcaacaacagctctgatacacagaagagtgtgaccttgcggcgcgagaacgccgaaaatgcctagattcctgagcgaatttcctgaaataagtaatataataaatttcatttagtaccatatcagtatcatgtatatactacagctgggagaatggctttggggctagtccaatattaagaaataaaattattaagatattagatatatcttttccagatttcaatagctctataagaaaatttaaatcattgatggtattttttggcgcctgccgcgctcaagcgttattggtatttccacgcctggtccttggtcacgtacgaaaatgtttggattataacgattccacaaaattgaaattagaccggaatatgagcggccagaagcacctgcgattgcgctactacacgtcgctggaggaggccatgctactgcggctgtggcgcgagcacctgcatgccataccctcctacacggacaacctgcccattttccgggaaatcgcgcacggcctgcagcagaacggagttcggctcaataagcaggaggctcgccggcgcatcaacagctaccgcaacaagtatttgtgaggcgcagcagcggctcgggtcagttcacagtgctaatatctccttccacttctctgcaggaacgatcgcaatcgcgtggggggcaatgcgaacttcgcgaaggattggcgtctctacgcgctgatcgattgcctcttctgtcctgcctggccgtcgtccgccctcttccatttccgcaatgtgctggagacgatccgtgcgacagcacgtgtggatttgcccgccctgccgccactgctatacacttcgcccgcccagctaaaatttgagcgcgactcagagggatgcaccttcctcgatgcccagcccctagttcccgcagtagtgaagacagagcctctgccagacgaacaccaccagctggtgaatattgaatacaagcccacagtgacgcagctggaaaacgcggctagccactacctggagagagctactgccgaaagtgtcattcagcggtcgcctctcacgcctgccaaccacatcctgcccgaggcagaggatgcgccatatggaggccacaccaacggtggccagacggacgccgaacgttcggcgagcaaaaggagacgagggcgacgtagtatactgccgcactcgggcaagatcacaatggcaatagtggaggcgctgcgcaaggagaacagtttgctcgagcagcagaacgacgcctgtctgcagtcgctcgtgcgcaaggagaagcagttcctggacatgaaacataactttctggcgtatatggagcggcaggaggcagtgctggcgttaataaagcaaacgaccatcaagctggaaccatgatcccgactactagcaccacgtggtaaggacattgtatgacagctttagctttaagttgggaatagagtcgcggcgctcgaccctgtgtatgtttttcaattcgttcctttctcagacacagatgtctaattcactcgacgtacaaagcagcagcatagcgaaccgaagatattataatttctcaaacgttctttttctagcgtcataagtgtaatgtgtatgaacaatcgtctgtgcaaaagatcaatctatacggtctttagtcttaaattaaaaacattgtcttgaggcgaacttgtatggtagctacatttttaaaaaaaaaactaaaactaaacaactggctaaaaaataaattagatgaaagactattatactatatatatatactatactatatagactatactattatttctattgttacagaatatcttgttgatataatagtaacgaaatcaaacataaattcaaatgaaatcagtgtgaatagcctattaagttttgcatttcgatcaacttagcgtgtgcaacaaccgccggttatttgttcatcaacccctgctgcagcagtgtggccgtagccggaatgtgaaaatatccgcaaacaccgcatgcggacctctcttagtcgctctcttagcgcacaatgcgctctctgccaaccgaaatgccacagactttttgtaggcttttccactttttcgatttcgagacttcgagcgaaacggtcgtgtttttcgcgtgtgtgcgggtggcggacgcgcgtgccaatcggaaaaggcctttaaatcaaatgagtggctcgccaaaggagcgcatcaaggtgtgtgcgattgtatcgagtgtgtgtgcttgtgcggtgcggagaaagccagccagccgccagtctgggataaaaataaagattaagattgggataaaacaaacgaacggcagcgaagtgcacaaattgccgtggaatcggggctaaagaaggaaaaacaagtgtgcagcacac

SEQ ID NO: 33422 - DNA, 1028 bp, DROSOPHILA
cacgcctggtccttggtcacgtacgaaaatgtttggattataacgattccacaaaattgaaattagaccggaatatgagcggccagaagcacctgcgattgcgctactacacgtcgctggaggaggccatgctactgcggctgtggcgcgagcacctgcatgccataccctcctacacggacaacctgcccattttccgggaaatcgcgcacggcctgcagcagaacggagttcggctcaataagcaggaggctcgccggcgcatcaacagctaccgcaacaagtatttgaacgatcgcaatcgcgtggggggcaatgcgaacttcgcgaaggattggcgtctctacgcgctgatcgattgcctcttctgtcctgcctggccgtcgtccgccctcttccatttccgcaatgtgctggagacgatccgtgcgacagcacgtgtggatttgcccgccctgccgccactgctatacacttcgcccgcccagctaaaatttgagcgcgactcagagggatgcaccttcctcgatgcccagcccctagttcccgcagtagtgaagacagagcctctgccagacgaacaccaccagctggtgaatattgaatacaagcccacagtgacgcagctggaaaacgcggctagccactacctggagagagctactgccgaaagtgtcattcagcggtcgcctctcacgcctgccaaccacatcctgcccgaggcagaggatgcgccatatggaggccacaccaacggtggccagacggacgccgaacgttcggcgagcaaaaggagacgagggcgacgtagtatactgccgcactcgggcaagatcacaatggcaatagtggaggcgctgcgcaaggagaacagtttgctcgagcagcagaacgacgcctgtctgcagtcgctcgtgcgcaaggagaagcagttcctggacatgaaacataactttctggcgtatatggagcggcaggaggcagtgctggcgttaataaagcaaacgaccatcaagctggaaccatga

SEQ ID NO: 33423 - protein, 317 aa, DROSOPHILA
MSGQKHLRLRYYTSLEEAMLLRLWREHLHAIPSYTDNLPIFREIAHGLQQNGVRLNKQEARRRINSYRNKYLNDRNRVGGNANFAKDWRLYALIDCLFCPAWPSSALFHFRNVLETIRATARVDLPALPPLLYTSPAQLKFERDSEGCTFLDAQPLVPAVVKTEPLPDEHHQLVNIEYKPTVTQLENAASHYLERATAESVIQRSPLTPANHILPEAEDAPYGGHTNGGQTDAERSASKRRRGRRSILPHSGKITMAIVEALRKENSLLEQQNDACLQSLVRKEKQFLDMKHNFLAYMERQEAVLALIKQTTIKLEP

SEQ ID NO: 33424 - DNA, 3290 bp, DROSOPHILA
cgatgcgttgcaaacgaacgcaatgatagccacacagcagagcaggccaaaggcagcaacaacaaggagcggggcgaaaaaatttgcagaaattccagttcgatttttggccataatgcaaaaaagcatgccgccctgctccctcctccgccgaccaagatgtacatacatatatgtatctgccatctcggttgctcctgcattcagtgtttgttgttagtttccggttgccactttgtgcggggatttctgcctttccccagtttcctttcccggcttttccttgctttttttcgactttcctcgtttttttttatttgtgtccagctttctgtttgcttttatatcctttgcaggccgcgacttccactttgatggaacgagcgctgtgttttattttgttcctccttcattgttgcccctgacttttggcaaaaaaaaagaggcggaggagaagggggtttggcgtgtagtaccacgctcgtagtgagtttttgtgccccatgtccttcgtagtagttagtacgcgtggtccaaagtcagtcatcagcccatacgcatttcgctggtccacgtagaaaaagtcgctattgaaatgcaaagaaatggaacgaacgacgtagaaaggaatggcaacgaaaaattgaaggaaaatggggcacaaaggattcgaacgtcctggaaaaaaaatctgaatgggagaaggcagcttagaatgccagagagacacatttttcgtcggcaaatattccctattttcgccaacttgatactatgaagcttctgcagcttgagaaatagttgcaaaacctaaacttagccgatagatatgaatatatctagagctaagcgatatactatatatgctagtctaagataaatgtatgtttcctagatgtatttccatcgaagcagccctgctcataaaatctggaaattttctttgaaactcgtaccccatatagatcccaaacatatttaatataaacactaacatccaatgtgggctcctctgctcgctttcgttatccttgggctaaactatgcagcatcctcgttcgtgaactgggataatgtattttacgagcagcaggcgacgtatctgcgtcctggtgagccccacatccaggaaggacagacgctgcttaacatgctgtacgtgaacaaccaggtccaggtctactgccagccgccaacagcgttctccatgtggaatgtcttccagagcaaccgcctgcgcctgcagatagccgctggcgaagattacactcagtataaaggagccaccgtgcgggaagttcatcatgcgcatagccagctggatgagtgccacgaaggaaagcccttggggcattccgcagcagacgagccacggatcgttccgatggccacgtatgagcactcctgttacggcatctacacatccaaaccgttcgtcctcacgcttgaagtgatcagtttcgaccttgagcgggtaagccagttcacctttggcatcgttttatggttaagctgtccgctcctggcggattcgctgcttttcttctactgctcagctgcggccctgggcgcccacctggcgggtttgttggcggtcgcagccaccctaatggcatctgatggcgagcggtacctgcgactcggaacgctcaaggtgaacttcaagctggtgctaaacgagcggcccaccgtgataaccttggcgctggtcagtggcgcctggttgctgaagtccgcctcccagcgctgcagctttttgtggcggtgcactctgtttcgccgcctgcatcaccgcttgctgaagggcacctcctacttgctgattctcactgcatccgatcacaggggctttgggatgacctgccttatgctgttgatgccctggccggaacttttgactgtaatacgctggctcaaaaccctatacgcttgctacaaaaggggctccgttaaaccaatggtccaggtggaaatcgagaatcaggacgtcccttatcaagactcatatcttcggatcgtgcgatccgaatacgataatcgttcatccgaaagcagtggttttagcaggagttttagccaaaacaaacataacatgggcttttatcgcgagcaggaggatcaggataatgccttaatctatgaatctagacgacctaccgagcggaactgcttcaacagatgtcaccagtgtaccccgactagatcaccccgtccagaaccccatttgacctccttatatcgcaatcttcactattcaaacgcgaaaagcagctccacatttatgagataaaataaccgacaacctacacgaaatcgggccaggactcgatccacttcaatcgaatagattgcgaaaattttccatttgccacgataagttgccttatgaaagaggttgtcgatgggtggggaaatctataggcaaactcataaacccaaacccatagatggcaatcattaatcaccaaaggactgagataacagattcgatatgtttttatgctttataaacaattaaatccatgtgtatataaatattctttaatcgtttaatcacccaatataggaatcaagaataatagtggtgaataacggctgaactcaagttaaaacctcctaagcagacgtccatggagctgcatccgtgccgcttttaacttaattgtcctgattagcatgcgtccgtgcctgttatcctcgttgaaatttttgtgcttttgacattcgttggcgcatggagttacaaaataagagactggcctccatgcgctgtgaggcgaaggggtgttcgggtgttggggtgtggggggcacaaatgtgcctattacctcccatcctgcccagcagtttaccaataggcacaggagcggaggagcaggctgctgatactgatgctgatgcagctgcagcactggaacaacaacaaagttcggtcaaacgtcagaaatgttcgttcgctttggctattgaacgcagtccaaagcgcaatgaatccacccactgcccactgttcactagcccaccacgcagtgcccaccccatgcagggaccaaggacctactcctcggcccgggcatcggcaaatgcaaatgcaaatgggtaaaaagcgctttgacgaccatgtggatggaggcggttgggctgttgctggacgcagtgatgagtgggcggtggggtatggtggacagttggccggggcaggcgcaaaacgcatttcaaatcgaaaagtggtacttcactcatttggcgcggggaaacggcggcaggtgactaaccagaggattcgtttc

SEQ ID NO: 33425 - DNA, 1290 bp, DROSOPHILA
atgtgggctcctctgctcgctttcgttatccttgggctaaactatgcagcatcctcgttcgtgaactgggataatgtattttacgagcagcaggcgacgtatctgcgtcctggtgagccccacatccaggaaggacagacgctgcttaacatgctgtacgtgaacaaccaggtccaggtctactgccagccgccaacagcgttctccatgtggaatgtcttccagagcaaccgcctgcgcctgcagatagccgctggcgaagattacactcagtataaaggagccaccgtgcgggaagttcatcatgcgcatagccagctggatgagtgccacgaaggaaagcccttggggcattccgcagcagacgagccacggatcgttccgatggccacgtatgagcactcctgttacggcatctacacatccaaaccgttcgtcctcacgcttgaagtgatcagtttcgaccttgagcgggtaagccagttcacctttggcatcgttttatggttaagctgtccgctcctggcggattcgctgcttttcttctactgctcagctgcggccctgggcgcccacctggcgggtttgttggcggtcgcagccaccctaatggcatctgatggcgagcggtacctgcgactcggaacgctcaaggtgaacttcaagctggtgctaaacgagcggcccaccgtgataaccttggcgctggtcagtggcgcctggttgctgaagtccgcctcccagcgctgcagctttttgtggcggtgcactctgtttcgccgcctgcatcaccgcttgctgaagggcacctcctacttgctgattctcactgcatccgatcacaggggctttgggatgacctgccttatgctgttgatgccctggccggaacttttgactgtaatacgctggctcaaaaccctatacgcttgctacaaaaggggctccgttaaaccaatggtccaggtggaaatcgagaatcaggacgtcccttatcaagactcatatcttcggatcgtgcgatccgaatacgataatcgttcatccgaaagcagtggttttagcaggagttttagccaaaacaaacataacatgggcttttatcgcgagcaggaggatcaggataatgccttaatctatgaatctagacgacctaccgagcggaactgcttcaacagatgtcaccagtgtaccccgactagatcaccccgtccagaaccccatttgacctccttatatcgcaatcttcactattcaaacgcgaaaagcagctccacatttatgagataa

SEQ ID NO: 33426 - protein, 429 aa, DROSOPHILA
MWAPLLAFVILGLNYAASSFVNWDNVFYEQQATYLRPGEPHIQEGQTLLNMLYVNNQVQVYCQPPTAFSMWNVFQSNRLRLQIAAGEDYTQYKGATVREVHHAHSQLDECHEGKPLGHSAADEPRIVPMATYEHSCYGIYTSKPFVLTLEVISFDLERVSQFTFGIVLWLSCPLLADSLLFFYCSAAALGAHLAGLLAVAATLMASDGERYLRLGTLKVNFKLVLNERPTVITLALVSGAWLLKSASQRCSFLWRCTLFRRLHHRLLKGTSYLLILTASDHRGFGMTCLMLLMPWPELLTVIRWLKTLYACYKRGSVKPMVQVEIENQDVPYQDSYLRIVRSEYDNRSSESSGFSRSFSQNKHNMGFYREQEDQDNALIYESRRPTERNCFNRCHQCTPTRSPRPEPHLTSLYRNLHYSNAKSSSTFMR

SEQ ID NO: 33427 - DNA, 2588 bp, DROSOPHILA
gagctgctcgtattggctaccatctgatataggactaaactcacgatggctgcgatgcaagtgaccaggacacccagtcgtaccgaagcacaaaagaaatagctctccatgagcaccatgttgttgtcccaggaccaactgggccatctgtgttccaattggggacgacattctgtggctttccatttgagttctggccagcgaatgatatatgccggccattcgaaccgaaatgtgacgctttgaatatgaactcgcattaccgcaagtattcagattggcatcttgtacatggttttgtcatttgctgggcggcaattagtgcgcatttgtggttcttatgtggctgacccaccgtattccccgtggcctggagtactcagttgtgatttactgaccgccattaccggtaatataccacattcaatatgttattaatggaatcctatatgtgctattgctcggtgcgtctgggcgtcataatcgtatctgttctggctatcgtaagttgcaatgaatcatcctttttgtactttaaaacttgaccttttctgctttcagatccgtgaatttgcgcatagtattacgctttttgcgttgggtgtcaaagttttcgagcctttaatcgatttgtttgagcacgacgcggagtataaggacagaaagtgggttcgaaagtccatcagttggagtcagaacggtgggtattatacagtgaaatatttactggccttttagatgatatattttgacaaaatattttgaattactagatcccgagatcttatgcgcatttgtccacgtaatatcctttatgcattcggctgcagccttcttaagtatttatggtgccattaaggtaagttaggttccttttaatagatttgatttatagcaaaagggtttttgtttcaaccagttacggaaatggtttctactacccttggcattttgtgagtttgtctactttatacacattacgttccttcatattgttctgatgatcatgctaaagaagcagattaacttgggccttcttatcattctcactctattgggctgtttctatatatgtaagtattcatttttagttgctctagtgactccaccccgacttctctcagtgtttgtgggctacaatgcctgcacctgcgtggccatgttccagatcatcgggctggtgaagagtgcccgttactgcgagctctacggagacgatcccttccatccgctggccatgagaagcaatcgatcgaaggattccgagaagccgctccacgtcctgcgaatgcacgacatgcacgacacaaacatcgacgaggagaagcgactgagcaagctgggcctgtggccacgtcgtcagccgccggtggtgtccgtcctgccggtgcaggcagcttatccgcagccaccgctgaagtggtggcagctgcaggcactgagcaccggtgatgaccaccagccggatccgtccgtctaccgcaactggcacaccaacgagctactcaacggtgtgggcggcgatgttcagcgcaagagtgagctgaatcgacgctacgcggagaaccagttgcatcgatggtactgatcactgatcacaggaatggttaagtgttagttaatctataaaaactaacgaattgtaactctttttagctgtcttatcaaacttgaaaactttcaaatttatttagtaacttagtaagacataagatccgatcacaaacgttaaacaattttgtaacttctgtgaacattttttttaccacaattttgaaacttgtattcccaaagcaaacagcgtgaatataaaaagccctatctgcttattcgataagtcttcgattcccctgctcaacactttaccgagctatgcaattcagcaagctccatcccaacaatatccttgactacccagcaagatgaaagtttccatctccctggattttgttgcctgggcttttggcgggcactttgcataaacgacactacagattatgcaactctgtctgggagacactttgcatatcctcgaccaggaagcgggatgcttcaatggccggttcgacttacaaatgcttttcccattttacattcccaaccaagtgcacagcgaccggaaaaaaaaggggaggatgcagaagcccgaaagagcaggcaagctgcagacagggatgaagatattcggtggaccattctattgtgttggccaaacgacaaaaatcaaaatacttaacaattggtgacgctggcaatggagcatgagtcgcagtggataatgctaggaatgcccggctggcatccaatgatattctcaatttctcctctattttctcaacgtttctctgctgagcatctgccaacaaaaatccgggccacatggacatgactggtgcccaggagatttcagcgatatgtgttgacacttttgttgactgctgccattgaagcctgtgggaatgcagcttctgttctcacaacttttctataatttaattaaaagtttttgggaaaatattgcattctgctgaaaaatactgaaaactgggcaattccaaatattagctgatataagctaatagtgcctg

SEQ ID NO: 33428 - DNA, 537 bp, DROSOPHILA
atgatcatgctaaagaagcagattaacttgggccttcttatcattctcactctattgggctgtttctatatattgtttgtgggctacaatgcctgcacctgcgtggccatgttccagatcatcgggctggtgaagagtgcccgttactgcgagctctacggagacgatcccttccatccgctggccatgagaagcaatcgatcgaaggattccgagaagccgctccacgtcctgcgaatgcacgacatgcacgacacaaacatcgacgaggagaagcgactgagcaagctgggcctgtggccacgtcgtcagccgccggtggtgtccgtcctgccggtgcaggcagcttatccgcagccaccgctgaagtggtggcagctgcaggcactgagcaccggtgatgaccaccagccggatccgtccgtctaccgcaactggcacaccaacgagctactcaacggtgtgggcggcgatgttcagcgcaagagtgagctgaatcgacgctacgcggagaaccagttgcatcgatggtactga

SEQ ID NO: 33429 - protein, 178 aa, DROSOPHILA
MIMLKKQINLGLLIILTLLGCFYILFVGYNACTCVAMFQIIGLVKSARYCELYGDDPFHPLAMRSNRSKDSEKPLHVLRMHDMHDTNIDEEKRLSKLGLWPRRQPPVVSVLPVQAAYPQPPLKWWQLQALSTGDDHQPDPSVYRNWHTNELLNGVGGDVQRKSELNRRYAENQLHRWY

SEQ ID NO: 33430 - DNA, 2366 bp, DROSOPHILA
aaagactgcattactcctcctagataatcgctcggaaaatagttgaattcccttttccgctcgagtccagttccgcagtcatttgtggcaatttgcgtgctcattgttaatttgattctcggctagcgataaacgaaaaacacctcgacagctcctggggcctcagctatttggattgggcgtggctgggcgcataattgaacgataaattaaataagagcactggtgagactaagccccaaaacgcattcaatcgttaaagcccgttgccgtttcgggggtcccaggcaattgaactgtaaactcgaactcagccaactataccttcagctgaatagctggtagctgacaaggcaatgaatcactgaaaaataagtatttaacagcgattttaaagtttacgttatgaagtagctattcaattcttgtactgagataaaagcaatatatttaaaaattatttaaaactgttccgcctgcttaaatccatcataaattagtgaaaagtgactatcgcattactgagtaaccatgaaaagtttaatgtaaatatgtgtgggttgagattgtgtgcaggaatgatttgccagagtttatgactaattaaaaacttttaaaatgtgcttttacaccaaatttaaggccatttaatgtaagggtcgtcgtttacgtaatgccaccccaatctttcatgggcgcattcgaactttgatgtttttgtcggcttagacgttcacggtctggcggacatttgcccagttgagcgcagctggggagtgtgagaagcgcatagaagggcgcaaatcaaagcgacagttgtggcatgctgtgagcaacctttcaccatagctcacccaaattgaatgtaaaagcacagcatcaggtagagaaggaagacgcaaaaacagctgaaatgagtgacttaccagtggtgaagagcagtacgtatgtcgaatcagcgcagcacatcgggcacctgctctaatacccaatcctagccatgaatagccttagccagaggtcgccgtacagccagatcgggatgggagctgccggtggttttctcaccggcttcgtgctcctcaaggcgagtaagattatggccgtggccgctggcggtaccattctggcgctcgagctggcatggcaggcgggactggtccagctggatgtgctcaagacattctcacagctggaacaggatcagtcccgggggcagctagaggtcagagaaatatccctggagccagtgaatcttaaccgcgttcaggaacttggggataaagccaggaaggcgtgtgcaaccagcggtcgtctatgtgtggccttcttgggcggctttctactcggctttggatgggcttaagtaatacaaattatgatcgcaaacacacatatacacaatatttaagttgatgtaaacgaaagttttcacctgtagtggcctgcgggaatacttttttgcagtttttgggtgccggcacgcagggaaagtttccataacaaaagctttgaacattttatagaaattctcttaacaaatagccaagcctctctttaccgcactcacagacacacacacacacacacctacatactgtaacgtgcatttaaagtttgtgctccgcataaaaagggacccagcaaaaacttcaaacttgtaacaacattttcatgcgcttttaagcatttcaattttccccgcttgctggtagaaaatttatgcataagcaaagtttttcataaccaaggcaatagcttagcaatgtgaaagtgagagaagtaggtgtaggtgtgtccgatttcatatgcattgcgcgactcgaaaaatatgtgattagcaagctagaatcatatgcaaaaaaaattggaaaaagaaaataaacattgacagtttttccaagtttatatgtgtgtatagaaggccggtctccaaatcaattaaaatcatcccttgcgccagcaccgagtgagaataataagtgagcctgtcacgtttgaataactatttgacatctggccgagatattccttagcttgtttttccatatattctgctatgggaaaaatgcaagcgattgctgcaagcgatcgaaaaaataaatatgccacactggtcagggatcttcttccaacaataaaaatcaatttaaatcgagcccgaaactcacacactcactggcatacgcatcacgtacggcaacgtacggaacacatgtcgtatgagcaatgaaatttgcatttgaaaaagccaaaaattgttttcttttgcgaacagcccctgcacccaatttaaagtccggcaattggcaaactagttagatttgacattttaattattcaaatgccgattgcccgataatgga

SEQ ID NO: 33431 - DNA, 366 bp, DROSOPHILA
atgaatagccttagccagaggtcgccgtacagccagatcgggatgggagctgccggtggttttctcaccggcttcgtgctcctcaaggcgagtaagattatggccgtggccgctggcggtaccattctggcgctcgagctggcatggcaggcgggactggtccagctggatgtgctcaagacattctcacagctggaacaggatcagtcccgggggcagctagaggtcagagaaatatccctggagccagtgaatcttaaccgcgttcaggaacttggggataaagccaggaaggcgtgtgcaaccagcggtcgtctatgtgtggccttcttgggcggctttctactcggctttggatgggcttaa

SEQ ID NO: 33432 - protein, 121 aa, DROSOPHILA
MNSLSQRSPYSQIGMGAAGGFLTGFVLLKASKIMAVAAGGTILALELAWQAGLVQLDVLKTFSQLEQDQSRGQLEVREISLEPVNLNRVQELGDKARKACATSGRLCVAFLGGFLLGFGWA

SEQ ID NO: 33433 - DNA, 8955 bp, DROSOPHILA
caagtcataaacccagaaaccgacgacccaaagtgccatcaatcacaatgtcaatcactttttgtcataagtagacactgccacaatcgcaagcacacacacacatttgcaaaggaagagaatatattttcagaggttcaacattgtgtgcaatgtcaacgtttgtccacttgttgagccgccctagcggaaggaagggcaggacacgggatgcgaaggcgcaggactcgacttgctgcccacaggccatagacaaagaaaacttaagtggtcacttgtgtgtgcgtgtgtatgtgtgtgtgtgtgttggtggcctggggggaggcgcgtgtcgggtcaggagtaagccagaatacgcatacgccatgtgtgcccttaattatgctgtggactctgggcggacaatgacaacttaaacagccactaaagctaaccaagcacgtgctcctggaactccactccccgcagcgtttatcttcaccataccaatatgtgctcaatgagccaagctgttttttgggcccgaccagactggcagtcccataattcacttgaaataccatccagatagctttggcgagggtgccgagtttaagccactcaaaactttttgttaccacttggcaagggcgtcaaagttgacattgcgaccggcactcagcagctaaatcaaaaaaaaaaaactggaaatcgttcaagctgtgttcgattgccttatccaagaaatatgccagttcgtggaataattctgtgggttggccaaaagggaaatcttccaatacaaacaaattaaaaaaataattgaatagcctgaagcattaagcaaatggctttaaatatatagataacaatttggtaaaatttcacaagcaatttaatacaacatttcaatgctcaactgtcaaaacttgaaaatatgcataaaactattgaatataaataactgaactgaactgttgtatttttccaatctttaaatgtattataactccaagtaagattagtaaacagatgacagtttcttacccagatgatgggcgatgtgatcgtgctcctcggactcgccgatgatgaagtcctggtgctggtggtgcatctggtccaggtggtgcagctccccctcgtcgtcgctctcctgggcggcgcagccgggtagcgcgagagagaggcagataatcgagacgacggcggcggtggcagtggcaacaattagccgggaggatatttccggcatttctcgcttccgctgcagcttccccgccgcccgtctgcgctggcgacgcgcggcaattgtcgctgcatccgctgtcagcggaaatattttaattttcattttttatttgctagcgccggtctcgcttgctagtcgttttcgttctcctcgtaattgtttgcctcctgattgcggcgcctcttggcagttggcgtaagaatacttgctctagcccgagcgattcactttcgattttccgcaattctcaaatatttatggccaccgtgttgctcagctttgggccgagaggctggagaaaatttccaatgcattacagcagacgttgttgcaatattcgaactacctccggatgtatgtataccactgaaaggggaagcatggaaaacaatgttcagtgtatgtaaactatgtatcagaaatgattggcatgcttttaattttttaatgcatgtattatagtcggtgcgctgcagtaatggttttcattttattattaaatataatttcattattaacgcacccactcagtcccttaaactccgctgtgtccatggatattctcttcataaaatattcaggattatatgttaggcaaaacgagatgggcagagctgttaacagcgagtgttaaagggttaaaaatctcgcgaatgccatttaaagttagtgaaaactgcataaagctttcaatttatgaaaatatcatattttaatgaataaataaaaataaaaactaaatgcggaataaacgtgtgtaattaggctttctgtacccctttcgaagtgttcagttgggaatattccagcttattgtaaattatatataaattagaaatataaattatatatatattataaattatataaagtatatgaaatataatataaatgagtatttttggctttgtcaatgcaatgagatggccctatatatatattcgacagatctcctaaagtgatttatttttcattggaataataacaatctaccatatccattttaccaactaacatgttacatattgctttatataattaatttttccacattgccattatagtaacagttaagtcgctgagtagctaactcaatctgttatgcaatttacaaattcgttatgaatagaaagtgcacaaatctattttttgttaactggtttaactggcaaacaatatcgactgagggtcacgtgagtcaaagaggcccttgaatgatgcaaatagttgattcaattgaggcaagccaacgaggcgtatgggtaacttgacatgcttcatttgccaccacttaatcagaatgcaacattttccaaccgcaagtcgttttcagttgcgtacttgtgggcccttctcaaggatgtcctctgcttcgctctcatgccactgcctccacaaaatgtatcattttataagttgtgtatgcgaaggccggagctttctttaattgctaggagtggccatattagaaaagccaggaaaaggggaaaacttggctgaaacgaggcaggagacaggacacggccaggccaggccaacggggaatctaaggaaacttgaaaacaaaagtcgagcgcaacgcaacggaaagcggcagaaaggcatttaaacttttggacaagtttaatttcccgtcgagtgtggcacatagtaagtgccagagatggccaaagacagatactgagagggagttgcgggttttctagcttatgaaactgaaagcactttccatctttgaagaaattgagtgcgcaactaattgcggtcagatccatggccacgatttcctcggcacccgtcctttcgttttatcgatgggtcgcaaaagggtctgccattttcgttattattattatcagctcaatgtttccaccgttgatcatccttgtcagctgtccatttgggtgtttcataatcagttgaccaggtggaaattaataaaaatatattgccgggctgaattcgtttggcattattctttcgccgggcttttgtaacctttgtgtggcttttggccatttatagcattgttcgccaggattggctattccttatgttctcgggaatatcataaagatagcggtcacaaaaaaaaggggtaaaagcgtagattgaacggagctaataaaagagataacaggaaagtgctgaaaccctgaacgaaatgtgacaaatgacgtcttatttaataaattggcttaaatggttgacatgcagtccgaccaccaaatccctgaacaagaaggtgttaactagatatgacaggaggacaggtgactagtggttgacttgacatttgtgaggtgaactagaaatggccaagaaaaagttgggagtggcttatattttttataacaggacactgttggtaaaattaaattcaccatttaatagacagcattaatagtgactatcctagatagaagaatcccaactgaatcccctcaaggcggctttcgccatcgccattgttccgttcatcggtcagttatctttgataagcagctctgggatatggagacccatctgctgctcccaaggcatttcggcccggccaagtcgtaatgataaatagccggacagagaaaaaaggaatgccaaataggtaagccaatgggcaatgcaaacttggcatttttggccaagtataaagtcaaggcaattgacaccttctcgatgagatgcgtcattaacatttccatttgatggctggcggcagtcgccttaccttccaccgttctcatttggctcgttgtgtggcagcctttgttttggccaagtccccgaaccgtctcgttttgtttcgttctgtttatcgccagctgtcaatcgttaaatgacaaacaaagaaatgcggccagcaatttgcagccagccaaatggcgtctatgatttccaactgtcaatgacagttgctaatccacggcattcctgctgtctcgggcttttgcgctgtcttgcttcggaaatgaaataataaatgatatctccctctggactctgcatttttgtgcccgccaatcgtaaagagtggggtatattgtgcaaagggtataaaaggtataatgaaagcagcttacatttttgcaatgcatatttaagcatacccatcatattaagctttgccagcactgagacaggaaaatccagtttagtattgctattgtacttatgctacttgtgaaacgcataagaattaataagttattcgccaataagctaacaaaaaagtaggtatccaatagtcgagacaatcgcgagtgacagcttttcgtgcttaatatacatatacccaaagctagtttttcgctcagttccgtctgcatccatattttcctcaatttcttttctttgtgaattttcctcttatccgcattctttccgtgttttatttgacattctctttttgaaagcgttttgctactttcgcgtgtcaaaaactgcagcagaatgccaaataaaaggcttgtttatgtcacctgaaatggtggtggggattttgtgcttttcctttttttttgcagcttggtgactgtcgctggtaatatgcagaaaatgtattaaattaagcttaaacttttatagcgtttggtgccaatcaaaatctgctcggattgcagatgaattggaatatttatcttttcgacgcgacatttcttggtcatcctattatgaagacttacagctattcgttacgaaaaattcttgtggcttgaaaatcaataaatatgcaagtaaaggaaatatttttttctggttttaggcaaccagcaagggtagtcgaaacttttgagaaattgcgaaacgtcatttatctattgtaaaaggagaaaatgagtacttgggctatgagtgcttcttggccctcggtttaattagagccacatccactgggagcgtttacatcatttgccataattcatctgtccactgactgccagctgctgttgtgcatcgctcgaaataaaaatcaaatcacagagccgtccatcttggctgtcagttgccatgatgcttgcttgtttttccttgccttgtctcttctcagctgggaaatttcttttaatataacaagccatgcgaaatgcgtacacaaaaagatggcaaaatgcttgctccaacgcccgctcacactaactagccacaagcagcatttcccactgacatgcagcttgtgcattttccccgtcttgcatttgattaacctacaaaaaggcgtttggacgtgcgatgcagttcgcacagtgggcgttcctgtttgttgctgcggtttctgggcttttcttaacgggcaactttaataaaaaaaacggtcagcgggggacgggatgcagctgcagcgggggaaaatgcataaatgcataaaaaattggccagcttacaagccgctttacatatgcaacatgggcgcctgctgtgcgggtgtgtgggtgtgcggaagtgcattggcacacatatacttgtacgagcacacattgttgcaagcagacatttttccgacacgtgtttgctttcccgcacttccgtttccgccgagccattgatgtgactttccgtcattttgtgggagaacgagctgcttttccgacgccttgccagcccctcaaagacttaattatttttcaccaaataattaatcagagtgaaatgggaaactaacaaaatcggacaggatggtgagaccgaccccatttactcttgtgatgaaatttcgaaactttggtaaaacactttttggccctgtgcgaaagtatgctgtgaactattgcagccacctgaaagcattcacgcatattcgtatgtgtgcgcgtgtgtgtgtggccaagcgtttgcgctcgtttgtgttttgtgggttggccatgcatttccggttttaatgattataacacaatcaagtgcatattgcctaattagcgatccccagcagcaagcgccgtccaggccgcataaagtgcataaaatatttcccgcactcgctgcgggcgcttcatccgcatgtgcatatgcatgtgttagtgttcgctcgcgtgcgctagtgtgtgtgagtgctcgcatattttatgtcgcttattggacggccatccacaacgagctgtgcatctatagtatgtatgtgcatgtatatgcttctagcagctaaatttcatattcatgttgtttatacggcttccgttttgggtgcgtgtgcgaaaatattgtgtgtaattgtgcggtcggctacccgttttatttgataattgtgcacaaaactccccacctattcattagcgctgacgaacagcgccccacaaatttgtagacacaacaaaggcaaactgttattccattttcccccccaaagtctgacacttgacgcgagctcccaataatttagttaaagctcgtccttgggtgattttcgtcctgcacttcaaactgttttcgggctacaagtgaagtaaagttatcaaaaaagtttgctgataccaagtattcgacgtttcgcaaacttttctgaattatatgtgtatatacgaaagtagtgaatgcatataataaaggataaacgttgcttaagaaatcatgttgcatggaacttaatttgttaagcacatcattcaggcttgaatatttttagctagcaatggcaatgctagaagtcaaaggaattgtaataataataaatcgctattttgtttatgttgataacgagaaggatattttaggatactaatatacaaaatacaaagacaaaatatcctaggggtttcaaatcatagaattgggcagagctaacaagttattaaggcataaaaaccaaatatatatatataaatatatatatatatgtatccttttgccattaatgttaacctttattgtatacaataattgtttttctgaccctgttgtttaagttttcctttcatcaatataaaagcttttttccttttttcttagatttattacgcgttttataacaaaccgctgctgtaatgtgacacggctttatgttgtcaaccactttcgaaagtaattcattttttttcaaacaaaatttcataatttcgttgcgttctgtttgatcataatcctgttttgaaacgacattttttgttgatgctgcgctttgcgggccacttttaattgcaataattaaatgtcaaattaaatcctaaattcctcggtggaattaattcaattggcgtgacagtcaaagtgaaataacgaataaaataccacaatttcccagcgccgctagggcccttctataaatgccgtttgcaggctctaccagccgagagaaatgctgtgattgtttttccgcaagtcggcactcctctttcattttttttcgccagccatttaatgagccacgctcgacttgccgccaagaatgcaatcaacaggggaggggagcggagaatgcacgggtatgcaccaggaccttagtacccagcaaggagccaggaccggcacaatttgcgttaagcgggctgtgaaaaatgaagtaccaaattgaagttggcagccagcgtctccggttgtgtcttgcacttatttatttatttaattctggccattccttccgcttacgtacagtgctgagctattgtcctccgatgatatcgcaggcactcgcgactcgcggcattcaattcaagcgagggacgaaacgcgagcgcgtcgactttcgacaccaacgtgttaagagctgcgaactggtgcgaccgtcagcgttgcgcactaaaaccatactaaactaatttgcttagcaggacgcactgattacacaaagtcctcgaagggcgataatcgccgtcattcgtcacgactgtcgactaccgagcgctcttcggctcggagttcgtggagttcggcaagcactcgcgaacttgccgaagcgagccgaactccaaaggcaaagagaaccaggtcccgttagagagcaacagagccagagctctgttagctggttaacagtgctgtggcaggataagaaaccattgttggggcatcgaagtcgacccttatagcagcaaactattcttcctatttggtgggcttaaatctacaatgcaacttccaaatagaccaaacgactcatatcctggcatactgatttttagagctctttccactaatttatcgatttaaatgcaaaaatttcgtgccatctagcccggcattccccaatgatgaccgagctttcaatcatttaaaattccccaaatacacacacacacgcggaacacactcttccctcatcaatgcaaaaatcaaacattatttatgcaaattacaagccattattatttaagccaacaaccacaaaggcagtaatagtgggcaagtacgaggaggggaaagggaaactccgaccaacaatcatatccgtcatagtcataaagccagggaccaggggacagcggggcctgccaatgctttggggaaccaatttggcagccggcataaataaatttttacttaatgtaggtcagtaatgtgcgcttcggtctctcttacccaaggcttctctcttcggcaagcggtgctctttagagcgttctctcttcggacgcagcgccgtgaaatatgctactaaagttgcttcttttccggctgcgtgtgtgtaggtgctcgggaaatgccatcaagcatcaaaggaccgggtatgcttgcataatgcaaacagccaatgatattgccatgattcgttgaataatttcaattccagctttcaa

SEQ ID NO: 33434 - DNA, 741 bp, DROSOPHILA
cgcaacgctgacggtcgcaccagttcgcagctcttaacacgttggtgtcgaaagtcgacgcgctcgcgtttcgtccctcgcttgaattgaatgccgcgagtcgcgagtgcctgcgatatcatcggaggacaatagctcagcacttggtatacatacatccggaggtagttcgaatattgcaacaacgtctgctgtaatgcattggaaattttctccagcctctcggcccaaagctgagcaacacggtggccataaatatttgagaattgcggaaaatcgaaagtgaatcgctcgggctagagcaagtattcttacgccaactgccaagaggcgccgcaatcaggaggcaaacaattacgaggagaacgaaaacgactagcaagcgagaccggcgctagcaaataaaaaatgaaaattaaaatatttccgctgacagcggatgcagcgacaattgccgcgcgtcgccagcgcagacgggcggcggggaagctgcagcggaagcgagaaatgccggaaatatcctcccggctaattgttgccactgccaccgccgccgtcgtctcgattatctgcctctctctcgcgctacccggctgcgccgcccaggagagcgacgacgagggggagctgcaccacctggaccagatgcaccaccagcaccaggacttcatcatcggcgagtccgaggagcacgatcacatcgcccatcatctgggtaagaaactgtcatctgtttactaa

SEQ ID NO: 33435 - protein, 77 aa, DROSOPHILA
MPEISSRLIVATATAAVVSIICLSLALPGCAAQESDDEGELHHLDQMHHQHQDFIIGESEEHDHIAHHLGKKLSSVY

SEQ ID NO: 33436 - DNA, 12036 bp, DROSOPHILA
tttccatgtgggtcgatggcgaacaaattcactggcaaagtaaacaatggcaacgggcggtggggcttcacttgtttgggtatagtacattttgcggttcagtaaatattcgccttggggcaccagcattataagggttgcttcgttgctaccaattttggctcgttcgcgttcgttcgacgcgaaatacttattgaactgaatcgcaccttctatgaatgtggctctccaaacccaaacccggtccttttaaataatacaagccaaaaaaatacaaaataaattggtatttggaaataaaaaaaaagttgcttcatgttttgtggaacctcttgtttcatcaccccaaaatgattaaaagcattccgaaaatgttgaaatcgtttttttatttccaccaaaaaacgacacatttcgaaggaaaggggtttacaagatttaagacggcattttatttttacttaaatcatgatgaaattgtttatgtaatagttattatacagcttgcagtgcttggaaactaagctagaactgggctaatagtaaaaatatttttttgtttcaactgatttcggtgacttagatctaaactcgcttcgagtctcatgctgtagacacgcgcacctgctgctatttatactttcgctcttgtaaagttcaattcaagtccaaataatagaaatttgcaagtatttcgccagaaatataaacagcaactgatgcacttggcctaaaacattctttggtttaagcccttatgttttatattctaatactttgtatttccgttgcgaatcccagttcccatgaacttcttcaaaatgcgacttaaattttagttttaccttaaacatcaacaactttttacagtaagcaactttccacatagcacaaaaataatagttcttcggccaacacgatttataagggtattgcttacaaagtagtttatcttagttagactaacatcggttatatatatgccatttttgtacactttttagcccggccacggccccagatagccgactcccagaatcatcgaaagtccaaggatcggcgaaatgggagacagccggctggcccatcctttgaggtcctgcatgcgatccaggtcgtcggtcaaggacttggcgtcgtgattggtgaggtgtggacttttgccatcggagcgataagaggcgccgtgatcggatcctgaaaggaggagatgggaaggagatttcaaatgattgattgaaatatttatggttcttttgtggactcttggtttttactacgcggacttaatcaactgacacatgccactttatggtgcgcccttcatattgctgggactcgaatgtcatcagctgaatgtcctttttcaattatgcgcttgccacacgccaacgagcataaacaatagactcaggatgcgtttatggccagccatttgtaccaggcgacaatgcgaaagagataaaacgacctccagttccaggggaacgcagaaagggggtgagctcagtgagctcaggctacaggatacacaaaaccaaactgtttgtcaactggccaactggcagggcagaaagtattgcatataaaagggacacaacttcgcttgccccacttatttgttacattctcacttatactccgctccttttgcccaatctctttctctctctgggaaaagcgaaagtataccaccgccctccactcgtccttgctggtattttgtttcaatttcacttggcagcatcgaaaattgtttcgatttttattgcttaagtgcgttaaacccttgcgccctgcattccaaaatgtggggttactctgggtgtgtgggtgtatatgtgcgattgtcctgtaggacacatggctatcgtgaactgtggagtgggcctgctattgtttttgccatcaatttatcgtgcagtttgtattttttgcgagtcgtcttcctttttcggctgtttgtttgcccggaaatctggttcattggacatttgtttgccagttgggcttggccaccgcctgaaatggtgtgggggcgttttggcccattttttgtcccctcgatttggctttgtttgactttgacgtgagaccattggtcattaggtggatggcaaacaattgcttgcgggtctttcaaaaacatgtttgggttgggcctacgaacatcctaatatataaacactcttcggagtttcagttaagctggtgccgattttgattgattgaaattgaaagtaacgagataacttcataagttcaacagctaattaccccctgattagtattttctgccagttcagttgaataggtcaatctaccatagttaccatttataaccatcctttcatcggataaacatagtatttaaattaagaggcagtcacatatgctgccaacgaggactcttggtccttgaaccgtaatcggcgcaatcgaacttcattggatgaacgaatgaacgaacgaactttgtcataactatgaaatatggctcgacggctggtccttcatttttggtccatccagggactttttggaattgtttttaacgagaacccttttatttttataacggaaatgcgcaaattgctttgcaccgggctgccaatgtatttgtctgtcggtgttcgcattggtgttagtgctgctggtgttagtattggtgtgtctctgcgtttttttttttatttctccataagcagctttccacaaaactcctttgcgctgccattcctggctggtgttgccttggttattttgctggcgtctgcaaacatttccatgtgtgaacgccggcaacaccaacacgcatcgagtccttgtttgtgctctgcgtatgtgtgcgtatgtgttcataggtgtgtgtgtgtggctgatttttattgacgtttgagcatgtgtttatgggggcgggttgggggttgggttctttgcaaggtcccaacggtgtctttaaagagcttagacccaaacggttggggagcgggtgcgaagatggcgaggacagcagaagaaagccccgtttgccggagtataacgatttggctcaacggagcactcttaaaactactaggaactttaagtcatttttgcataattcccccggacgatccgcggggagcaattggactaatagaatgaaagtgcgtctgcttttgatgcacacgcacctttattcccctccgtagaagtgggagccttaatatgaatataactacaactaaagttaagcaggttaaagagtgccgaaatagtcctgttgacaccaccataacctggaaattggtacggaaagtgtcaatgtaaaacttttctgatggctgtagttcaaacctcgtcattacaagagactttaataccagtcactcgtaaaatgaaaaagctgcaaaagtttgtacggttaaataaagttcgtctgtcatctagaaaattttcgctttgctaattgaatatctgcacttccctcgcatttcctttggctgagtaatgagcatctgatagtcgaggcactcaacttctcgacttgaactccatttggcagcggttttaacacctctatttccgagcctgctgcactcgagcggaacaagaaaaaaaaagcgcagcttgcactctgcacttgagacgcacttggtcctgccatgcgttatatttatggtgcgcggcattgccctcccgttttccgtgccccacttactgcccgaaaggctgttgcatccataaaatcgcgcggcacgcgatgaccattcggagtctggctgtctgttgcattgcattcacttcatcgtttctcacttcccggaaattataggcaaattattgccagacactgaatgctgaactgacgctgaagtaatcatccatccgaggtccaaggtccgagtgcagtccggatttcgcatgttaactccctggccgtagcagtgcaattttcttttattgcatttccttgtaatttgtggcatattgtttggctgttggccgcacaaattaaatatgacagcgacaacggagcagcagctcctgtggttgattgcaacattttaatgacagtttaagtggcgagccgagagcatctgcagcacttaatggggacaccggttttgtggcctctggccaactaagcgctgactgggcggacatgtggaggagcattcgactcaactccagtgataattggaaattgaatttaattgacatgcggatagccgtcggcacatctggacaaccgatgtgctcatccgctgaccattgaatgaatgtgtagtcaaatgtatgtggtgtgtgttatttgtttaccaattgccactcccattgcaggtggccttcaactaacttcgaacctcagctgggaatccttgtagtagttgaaacaagagatgggcaattataagaccatgttgtgaaattcaagtgacagggctagcatagagtttcttctgttaaggcatcctttaagcatctgagtccgaaaaatcccttatgatagcatcactttcgcccactccgtgtacccgcaaatcgaggggcgtgtggaaatgttgccttggtcatgaaactctgcttgtcgctggcttgttccgccttaaagtgtcatcggatgggcaaaaacagtcgcgacatatgcaaaacgcggcaacgataagcgaacaagccacacccactcccacttccatttctactcccactgttagccaccaaaaatgggggtggtggctataccgtgcaatgctgtagtataccacctactggcacgatatgtgcaacatctagcaggtaataaatctaactgtaaacgcagcgcttacgacgttgcatgcggcgcttggaagttgtcgtcattgtagcacccgcatccatgcgcccatttaccaccccccatgtcccccattcgcccttccaaaagtgcgccccctttcgaatggacggccatccagcgagggatgcaacatttttgctggcgtttgccaaaaacggcggaataagttttggggcagggggagctctgccgctttgacgccttgtgtgcaatttgtctgctatttttatattgcgctttttggggacctacccctccccagcccctgcacttgctaccccgcaagcccactctcatattcaatttgttcgatttgattttgtcgagtgcattttattttcagtcaagcgcgtatgcagaaaattccacatcgcagcaaagggcctgtaaagttttatgcgttcgtccttgcggagcgggcgaaaaagtggggaggctggggtgagcattgtcgccaattgtacgatcgggaaaatgcgggaagaagcgggaatagcggaaaatgcaggaaatgcaggaaatcggaaggcaagtgtaaaactttatgcttatcgattggcagctgttccaaagagactttgactcgtgctttaacccagcagctcgatagtttcattggcacctcgagctacatatctctctcacttctgctgagaacaaatgccagaaagcccattattatttattgtgattgtacattacgatggtccgcattagcagcacattatagccgacacaatgtcaactcagcaagaagagatcccagaaaacctttccattgcatgctacaaagtcatattttcccccaaaaagcgccaaaaaaaaaaaaagaatatataccaatggacagctaagggagggatacaaaaacatactttccttcgagttggccaaatatttatacgcttacgcaactgaaggagcggtatatttgctatactattaagtgagttattcaaaagcaaacatccctttttaatatatcaagcccaaaagtatagggtattcggcagtcaaccattcccgcatgctgccaaagttcgctggcagctcgagccaaaagtatctatatctaacaagtggcgacaacgacatgccagagacccttaagccaagcggctaaagtcgttatgatttgtcataagcataaaataaatggcgaaatatttatggtgtgttacggcgtccccagggaaggattttccatcaattgccgactccgagtggcttagatagtcgattccccgcagtgtcgacgaagggctccttctccaacgaaactccaactcaccatggttttgttgctgctgctggtggtgctgctgctgatggtgatcccttccccttgaggacgcagaggaggaggaggaggaggaggagtggtgatcctgcgaattccacaggctggacgtggctcccacgaagacgttgttcagtccggagggggactgatccgagcccttgctattggacttgccgcgttgcaacttcgtgttctgttgactgttgccgggattgaagttgtacggattagtattgctgttctggctgctgccatatcgttgttctgcgattacggatagctgttagctgggcttgggattttagaatcatagtaccttacctttgttgtacttcacgagcaccacgggcaccgtgttgatcgagaccgttggagccattgtcgtcatcgtggtggtttggggaatatctgcgtcggaaagtttaagcaatttagctaagcagtaaactaaaaacaattccatagtgtgcaataagaacatgagtgtctgagaaaacatctttaaagtgagttttaaagcaatggcgaacttccaccactttccatatctttgatttcccccaccgagtgtaacccgtttgcagccctgaatagcctgctgctcgtaaatcaatcactgacactggggatatggccaccttcgaactccgactgaccctttgttttgggaatttatcaggcaaacacacatggctgtcggctcaagcagagtcattgacttaaattaattaaaagctcgtgccgggcaaatagtttgcgcctaattgccatgggcgccctgacttatgaccattgtttattgggcctacggttatggttattgttattgggcccagccaacgtattcacgtagttattgttacttgggtcaatacttacggtaaagtttgatagcgccgtcagtgtcgcccagagagtttttggccacacatcgatacgccccaaagtcctggatgtccacctcgtatatggtcaggcgcatggttattttgtagcccgattcaaaggtttccggtacaaagcgctcgcctgaaagagaagctaggcagttaggcggtgtgaaagggtccaagagccgccctgaaaccacagtgcactttgacccctattcgaagtaaactgaactgaactgaactgaactcctgttcaccgccctccttcgcagcctcttgtcaaagtaatttaacttactaccaagaaaagaacttttgcattcgccccagctcaactcaggtcggcttagctcagctcaaatgagtccaactgggcgagacccaagttggtcctgccattctggccatctcgacatcctcgccggcttttagggccctgctgcccctgtcaaatggctcgttttaatttatacaaaaacaagtctgttctcggtattgttgcctgtcccgtttttgtttgtcatgcaggttttgatttacgtttgatgtcggttagatttagtagcactaagccgagcattacattttgtacaggttcggtaattgttatgcatgccggttaggcgactgattacttcagcaaatatcattgtgatggcgcaagcagggatgtagatttcggccctcagtcttgattagaaataattgggtttcgggggcgagatattggatagagtacagtcccatccttctcctacatatccgacttgttcgactaagttgggccattttaaccagataatacgatggctctttaagcattcgctggctttcagttgctgctcttgcggttatggatcctctgactatctcaaaactaaaacacaaaactccattaaaatccaacggcggtcggacagtactcggcaactgcttctgacttgaggtcattttcaatcactttttcccattttctccgctggcaaaaaacaacttgaaaataactggaaaaaaaatgaaagcgttccgactgcatgtctgtgactttttccgccggcctccatgccgatgacgatgccttttcctgtccagtccagtccattgcgggcagttgggggttaagtggaacgtgggatccaccaccgcagttattcagcgaccgcggattcgagtgttcggctggatgtatattttttccatcgctttttcacttgaagtccacaacgttttttgtcatcgcactcagttcatttctcagtgaagatgagtgggagagttgaagaggttaaatgaagagatggacccatccatcgttaaaggtccttagaaaattaaattgcacgtactagataagaggctggccatggagcagctacaaactattgaaattgagctggaaataagatacctttggcgcagaaggctatcgaactaatatctttatactaaagatgtagaaatgacttcttcaaggaatgcacttaggtcaagttgcaaattttccaattcaattaagctcgaatgtaacattatctgaattggtaggatactaccaatctattgaggttttagaatcctcaaagcaactgacatttcattgaacattcagactctcataaaattgggccatacctttacacacttctctattttatcaaaacacctgatcccaacgtaagaacctgaagtttcacttccattgaataacttacctggcacaataatcgtatcgttcttcatccaatagttgatggacttgggatacgcctccgactggcattccagggttatgttctgtgtaagggcagcgccgactaattgattttgtatccaaatcatgggcggaactggaaggcaacgagagaaatggggagttaggcgtcagaacgaagggtatggataaatgctgatgggaaatatgtgggccggagtgttgcgtcaggtgtggaatgtttgagcgatttcagggaggtgaatgggcgacggaaacaaagaattcccatttatagagaaattccgttcgttatcgttattgtttttctagtgctttatgctcccgtttggcggctgctcactgcggttgccatttattgtttccaactaattgctttttaattttatagcaaagccacaaaaaaatgctttgcaatataaacggaaacgaaccgaatcgaactgaaccgaattgtggttggctaaccggctaggattgttccggaataacttctacggcggttcggcttaaatatgtgccgtgaacttacctaacaaattgttgagcaattttaatttttatttaattagcgagaaggagccgggcaaagtgccctgaaaatgctaactagctgcgagcgccgggagcaaggcggtgcggggtgctgagcacacacttaattatttgctttatgctggcacctaaaagtatacagcattttccagacgcccctcgctgggaaaattaaaatgcagggcatatttagcatggcaagatttcgagtgggactttgtgtgtgtcgcattggcagtggtagtctgtgactgtgtctggtgttttccgctgtggtcttgtctggagcacacggctccctgcaacctgctccctgcttcgtgcccacttggtcccacgagcaggatgcggtgccagagcctggcgcagaactataaatatttaaatatgctaaaattgatgggcccgccccgccccaaatactcacagtgcacaatgagcatcacacgcttgctgactgttggcgggatgccattggaggcgatgcagagataggcgcccatgttcagtcggttcactttggcgatggtcaggaaggagccgttgtaggcgacggctgcgaatggagagatgcaaaagtatatagatagatagacatacgacgcagtaaaagcgatagcttgcgattaatatcggtggtggcaatcacttttcaatgccatattgcttataagccggaatgtctacggcatcaagtttcccaagggaatctcccttggctcgaggaaaatctgcatattcgaacacacacacacatacggagtcatgcagctaatcatcgcgttctcattgcttatgcaactcggaaaatctcaacagcactacaagaaaattcctcaaaggcagtcttctttctcgagttgaaatttacagaatttacttaaataataataatgatttaaaaattggcttgatgtaattcatttatgaaatgacaaagttttgtattaaaacatgccgttttttcattttgaataaatttcaaactaaagacaaaatatatttttaactacaagcttttacacaacagtttttccttcagtgaactctgacagaactcatctgatgtgaaatccttctgacaattccactgcaaagatggaaaattcaaattgcatagagtcgacatgtttgctcgtttcgctccctgcgttcgttttcttattgcatccttcgtgttggctacaagtccttgatttttggcaataaatttctgagcacagtatctgctggtcgatcaaatttgatctggtgttgcaaattctaatcgtttattaatagtggcatgtggcagctattaggggcaacctaaatttcgttcaagtggctagcaatcaaaccgttttacttgcaacaacctcaataaagtaaattatggtactccgatttgttactgtgttcgagcagcttcaacaccagcacactcgagttaattaccgcacagaggaaagtaactttaaaatgttttgcaatgaaacttaatgctgcggcaacatgcaactcaccctcggcgccatttggcagcggtatcagttcgccaccttcgcgtcgccaggttatcgtcggagttggcgatcccgtggcggcacacttgagggttacgttggagccctcacgtattaccatatcggtgctggtcgggtagtccagtatgtcgggtggcactgttgtggtggcccagggcacgtgtgcacacgtatgcggagatacaaagttttgaggcggcatattattcatacgcagtgtgggacggcgaccagtgaattgtgcggcgggttcagatacatagccagtttgtttgcggtgatgaagtcgtttgcatgaaagagaaaaacgtaggaaagaacattgtcattcggttatttaagttgctggttcttaaattaggttttttgtctgtgcaacctttaagttcgaattaaagcgattgctgtgctgcaactagtctcgagataatacaaagattttccattggcatcaagccgtaattaagtaatatattttatttcacgtttacgcaaggcagaacgaaaggtaactctacaattccttgaacccttttgcatttccatgccatttcatactggagggcttcatgtctgtccttttgcattgcactttcattaattataattgtacgctcgactattctgcacttgctaaaaaggaaatagttaagtgaagataaactgagtggcagaaaaataatggaaacaagctgttttaaatatttcatatctaatattcgaatagacgaaagccatttgtgacaatatagcaccattttcacttcaatctagttatactacctacattttcccaaaatagaattagattccggcatgattggctctattaacagcacttgatttgcccttttattgaatttgatttgcaacgccgtcgcacgtttcaattttacaggaaagccgtccaaaagccaagttatgactttcacacacacagtgtgacttcaaagtcttcatgccaacaatgatgtgcatgttttacaaaatgtactttgacttttcacccggcccacacacacacacacatccgtatacgtcatgtcctacaaattgaatgtaggcttcgttccagctccagctccagctccagctgcttttttcctgtgttgacttttcctttaatagcccgactcgtgtcacaaaaaagcgaccaagtgggcgtggctggctggcaatttcttttctttgacactgttatt

SEQ ID NO: 33437 - DNA, 1404 bp, DROSOPHILA
atgccgcctcaaaactttgtatctccgcatacgtgtgcacacgtgccctgggccaccacaacagtgccacccgacatactggactacccgaccagcaccgatatggtaatacgtgagggctccaacgtaaccctcaagtgtgccgccacgggatcgccaactccgacgataacctggcgacgcgaaggtggcgaactgataccgctgccaaatggcgccgaggccgtcgcctacaacggctccttcctgaccatcgccaaagtgaaccgactgaacatgggcgcctatctctgcatcgcctccaatggcatcccgccaacagtcagcaagcgtgtgatgctcattgtgcactgctctggcaccgcatcctgctcgtgggaccaagtgggcacgaagcagggagcaggttgcagggagccgtgtgctccagacaagaccacagcggaaaacaccagacacattccgcccatgatttggatacaaaatcaattagtcggcgctgcccttacacagaacataaccctggaatgccagtcggaggcgtatcccaagtccatcaactattggatgaagaacgatacgattattgtgccaggcgagcgctttgtaccggaaacctttgaatcgggctacaaaataaccatgcgcctgaccatatacgaggtggacatccaggactttggggcgtatcgatgtgtggccaaaaactctctgggcgacactgacggcgctatcaaactttaccatattccccaaaccaccacgatgacgacaatggctccaacggtctcgatcaacacggtgcccgtggtgctcgtgaagtacaacaaagaacaacgatatggcagcagccagaacagcaatactaatccgtacaacttcaatcccggcaacagtcaacagaacacgaagttgcaacgcggcaagtccaatagcaagggctcggatcagtccccctccggactgaacaacgtcttcgtgggagccacgacaatcgcacatatacacccacacacccagagtaaccccacattttggaatgcagggcgcaagggtttaacgcacttaagcaataaaaatcgaaacaattttcgatgctgccaagtgaaattgaaacaaaataccagcaaggacgagtggagggcggtggtatactttcgcttttcccagagagagaaagagattgggcaaaaggagcggagtataagatccgatcacggcgcctcttatcgctccgatggcaaaagtccacacctcaccaatcacgacgccaagtccttgaccgacgacctggatcgcatgcaggacctcaaaggatgggccagccggctgtctcccatttcgccgatccttggactttcgatgattctgggagtcggctatctggggccgtggccgggctaa

SEQ ID NO: 33438 - protein, 467 aa, DROSOPHILA
MPPQNFVSPHTCAHVPWATTTVPPDILDYPTSTDMVIREGSNVTLKCAATGSPTPTITWRREGGELIPLPNGAEAVAYNGSFLTIAKVNRLNMGAYLCIASNGIPPTVSKRVMLIVHCSGTASCSWDQVGTKQGAGCREPCAPDKTTAENTRHIPPMIWIQNQLVGAALTQNITLECQSEAYPKSINYWMKNDTIIVPGERFVPETFESGYKITMRLTIYEVDIQDFGAYRCVAKNSLGDTDGAIKLYHIPQTTTMTTMAPTVSINTVPVVLVKYNKEQRYGSSQNSNTNPYNFNPGNSQQNTKLQRGKSNSKGSDQSPSGLNNVFVGATTIAHIHPHTQSNPTFWNAGRKGLTHLSNKNRNNFRCCQVKLKQNTSKDEWRAVVYFRFSQREKEIGQKERSIRSDHGASYRSDGKSPHLTNHDAKSLTDDLDRMQDLKGWASRLSPISPILGLSMILGVGYLGPWPG

SEQ ID NO: 33439 - DNA, 5336 bp, DROSOPHILA
tcgttaatattggtatttgataaatatatatatatatatttatatttgtgtgagtgtgtacatgatagcgatttaaacataactgatatactttgtatttaacaatttaattttgtctggaaatatacatttagttatattaaatggagctttatccgcactaaatcgtgagattaatttgcgcattaaatttacggcttgcctatactttttatattacctttaaatgtacgaaattaatggattgtttgttgaagtttaatcatacaagggaacgcattaaattaatttcaattttagatcgctgaataaatgatatgtattttgttgaacgaggcaaatattgttaaacattttaaattggttcataatatatctggagcaacgaagcggagtaagacccaaaacatttcgaatggttaaagtttttaaaaacacagccagctgctgagcttattataatttatttttctttttttacattaagcttttggcggatatctaaatctgttttgcagtttcgcgatatagttaggtataccggttaatatatactgaattatatcttgcaacattccttttggaattcatttcccttcccgtttgccaacttgttggtgacttaaaataacaaatataaatcaaacatctggtttatacaagtgttataatacatagcgccttgccttctccgatttatttacctgctagagttatacacaaaaaccttgcacttcgtctatatacatgtgccgtacctgaagtgcaatctgcaatattttacaacggttgctctgctggctaaactcgaaatcctaactagaatcctactgctggacaatcgcgcgattgggaattaggaattaggaagcctagtttgcttactggctacagctggatttgatatatgtaatttcgcgtcgacgaactttaactaaaagcagccgcaacgagccataaatcagcaccaagcagcgtttggcattgacaaactcaatcatcattgcactgccacagaccgtgactcttgcttcagcttcggctccatctctagctccagctccatctgcagctccacctccggctgcggcagcaagtacagatttagcactgactccatgtccatgtcaactcggcgtctgtgtcaaacatgcgtcagtgtttgtggcggcagtgtcatctgagtttcccgcatcactcccgccgtcgccagtgacatagccactgccacagcgactggcaggagtaggagcagcactccgccgaggtcctgtcgccgccgactcccagctgcggagtttccgtaaatgctgtcaatgctctccgcacccagactcaaatcggctgcgggaagaggagacactcgtatgttaatggcatcgctgggcagcagcggaaattggataaggcttttgagtgaactgattagctggcctggtcggtttaggtccagaatcacaggtacttttaagtgatcgattaattgaatttcgaaaggtgcaaccgatttaactatccttctctaccttattcattatggtctttaaacattaaacattagactcgattttgggctgagaaaaaagttcttctcattcctctgactcaatcgataaaaacgcagagcttgggattcaactttcggccagcaagcgaacaggaacgaatttatttgattgtggccaagtatttacaaatcattaaatggccataatgccaagccgagcgtgtttattgatatacaattactccgcaggagccaaaggaagtgaaacttttacctgctacctgccccaaaaagtatactacgatttgccgttctgctccacatccctcactttttgtggatcgctctgctttgcaaattagtgtgaaaatctgttaaacagtggcgtggtggggggtgcgggggctggtcccctttttttatggctttcgtcccgtctcaagtggcctgttaagctggacccaaaccgcagggcaaatgcctgaaatatggcccataaccctaatcggcacgccgcactcgccgcaagcccttccatttcgttttcccttcttttggttcggctctcttacctttccttttgcccggattttccatatcctcgccactgtgctcctgggccctggccggatgatgcgactccgagcttttcgttcgctttttgcctgtgcaacgagaaatgatcgaattgcggttgagtttaggagccgagtatctttaaattactgtgccgaaaaaggattcgagtctacaatgcatattcataataccctgtcgctgtttgtcgctgtttgccgccgcctctcgtcttccctcctttcccccaaacaactttcactctgacctcaaccgcacttccactcgcctgccagcattcacctgatccgtggcgttgacgatttgaaacggatttgcatggcgtatgaattatttatgcgttttttcctcgccttccactcgttcgccaccagctttatatttcccatgattcctgccacgccccgccagtccgcgccaacttgaatatttgcagctcatcttaaatttatgccaagtggctattaaattttccttctctcgcgctccatctccatctacttcagccaaagctgctgctcttgggcggcacagttcgagtgcagggtatccagagtgctaaactcccaacccttgtcggcgaacatgcagcaattgtcttacaacttataaggtaatgcccaaaaatactgtcgagttttcttgtgccacactcacctttgtgccgcgcctcaaagttctccacatagttgacggcattcgggggaattcctgtgggcgatagaacaccgatccttaccgcatctgaactataagcgtaatgggttctgagaactacttacgatacagcttaattgtgccgtccgtgtcgcccagggaattcttggccacgcaacgataggatccaaattcggcctgtgtgaggggatttatatgaagccgcatcgaattgcgatagccgccgatttccgtgacattcgcggagtatttgccacctgtttggaggtagggcgtttgatatctgagttaatatttcattaaaataataaactaattaatatttaattgaaattttgccttatttaataattaaatgcatgtcacgcgcacatcgaccgtaagtacgggcgggcaaaagtttcaacaatgttgctgacaggcataaatttatgcacgaactcatgtcacaccgcaggccaggatcagaatggggtactgtatgtgtgtgtgtgtgtgtgtgtgtgtgtggagtggggctgattcggtttttctggtgtcaattaaaatctgccagaaacaaaattgtaaattaatttaatttccagttatgacaacgactgcgaatggaggcagcaaaagcaggaaatcagcagccaagccgcttcttcgagccatcgcattgccactttcaccgacagaatgaaaccgcagcactgcggtcctgtcgaccgagtatacatccgtgttagtgccgcgactaaatcagctaattaacaactttttcggtgtgtctgcgtctgtcgcgagcagcttgcactcggcggtcatcagtttgttagtcgctagttggctggtggctccggcgggaaatacaacttttcctccaagggtttggcggccaggagtctgatttggcttcgggcttggggcttagtgctaatgtgctaatgtggtcgtcacggtttatgacctcttaaatgtcccttagcactaaccgaatgtgaggtaataaaatgttggcactcaatttaaatagataactttatgtgaagcggacaaattgtacactcaaataaggtacttgacagctttttaacgtggaatttttagcatctaacttatgacgcatatatattattactacaattagcaatgtatctgatggattgtttctcgccaaccaaaaggtttcgattcgctaggagttcggtatacttttattttttagtactatttgtgacttctcacctggtggcacaatctctccacgttccctggtccagtaattgatcgacttgggatatgcctcggattcgcagtccaaggtgacaccctttccttctacagcgccaattagttggttttgaacggtgatcatcggcgggacttgaatcgaagttgcacatatagttatattcctaaattggtcctaagtgggtactcacagtgcacaactagcgttatccttttgctcaccgagggagggactccattggaggctatgcacaagtaggctcccatatgatgacgcctaacattcggtataactagatcagtgccttcgatgctcataactgaaatagaaatgaaaatttaacttcaattttatgcaaatcggttattattttctattatttaatcactagaaaacttgaatacgttaaggagcttatttcctgccgaaaagcttgacatcaaaaaaaaaaactcagctcgtttattggctctaatttcctgcagaaaagttctaggttggataaccggaaatacacagttgtaattaccttctagcgacaaaagtgcgaacaaaactttaccattattgcaataataataacatttttctaagctcgccagcaaatgtgtgcaacttcagtgctgcgcattcaacaaaagttgagtgcaacttaacaaaattatatatataccagatgctggcgacttttatggcgttgctcaacattttggtgttccgaacaaacacaaacatcctgttatcatggccgggccgagattgcattatataaacggcattgaagctggtttaggccggcagcaccgccgacggcgatacgaatgaatgtgactacgtttgtgggcgccggaagcggaagtgctggctagtttgcgcttgatattgttgggtaaggttgtggcacataataatatgctgatttttcgtttattgatttggccttttgagccacgggtccattttagcccgaccgagtcgcttattagccaaaacccgcggccagtttacatttttttcctgtgcggtttttccgacggttcacagtgcggtcattaaacgtaatagccacgaaatacgtgtaattttgtttgagcccgccacggcataaaactttacttctgttcggccgatttcattttatttcagagcaccggcgaacgaacacgtaacgaaataatcaaatttcaaatgaaacaaactttgtccagggaaacaaaaagggatttcaaacaatagagaaagtgcaaatggaatgggaaatactcttttttggctagcaaaattttaaatttaaataatgatattttagaactgttt

SEQ ID NO: 33440 - DNA, 843 bp, DROSOPHILA
atgagcatcgaaggcactgatctagttataccgaatgttaggcgtcatcatatgggagcctacttgtgcatagcctccaatggagtccctccctcggtgagcaaaaggataacgctagttgtgcacttcccgccgatgatcaccgttcaaaaccaactaattggcgctgtagaaggaaagggtgtcaccttggactgcgaatccgaggcatatcccaagtcgatcaattactggaccagggaacgtggagagattgtgccaccaggtggcaaatactccgcgaatgtcacggaaatcggcggctatcgcaattcgatgcggcttcatataaatcccctcacacaggccgaatttggatcctatcgttgcgtggccaagaattccctgggcgacacggacggcacaattaagctgtatcgaattcccccgaatgccgtcaactatgtggagaactttgaggcgcggcacaaaggcaaaaagcgaacgaaaagctcggagtcgcatcatccggccagggcccaggagcacagtggcgaggatatggaaaatccgggcaaaaggaaagccgatttgagtctgggtgcggagagcattgacagcatttacggaaactccgcagctgggagtcggcggcgacaggacctcggcggagtgctgctcctactcctgccagtcgctgtggcagtggctatgtcactggcgacggcgggagtgatgcgggaaactcagatgacactgccgccacaaacactgacgcatccggaggtggagctgcagatggagctggagctagagatggagccgaagctgaagcaagagtcacggtctgtggcagtgcaatga

SEQ ID NO: 33441 - protein, 280 aa, DROSOPHILA
MSIEGTDLVIPNVRRHHMGAYLCIASNGVPPSVSKRITLVVHFPPMITVQNQLIGAVEGKGVTLDCESEAYPKSINYWTRERGEIVPPGGKYSANVTEIGGYRNSMRLHINPLTQAEFGSYRCVAKNSLGDTDGTIKLYRIPPNAVNYVENFEARHKGKKRTKSSESHHPARAQEHSGEDMENPGKRKADLSLGAESIDSIYGNSAAGSRRRQDLGGVLLLLLPVAVAVAMSLATAGVMRETQMTLPPQTLTHPEVELQMELELEMEPKLKQESRSVAVQ

SEQ ID NO: 33442 - DNA, 3167 bp, DROSOPHILA
caggtggctatctaatttttgattattcgcgcgatttgtgcgaaaaaattaattgaggcctgcggttttgttttcttgcgcggcattattgctgcttttgcacccattattcattttgtgtgcgctcgaagtcgagaaattcgattgggaatcgaaataatttggcataatgaatgcgcttcgttaccggcattttccattatactaatatttgaaatacgagcaaaacaccacaaaaatatactcgtttgctattgagacaaaaagtgtatcatgtgctcacattgttgtgagtgaaaatttgagaaatatatagcagtagtgtataaaatgttatttcattaaatatacagacatattcaatcatctttgcaatcttgagcaaagcgatgcaagtaatggatatcttatagtcgatgtaactatatctctctacctcttgcctttactatggaaatttcacataaattgttgcattgtaaatgcatttgaacactttgagactgaatatagacatatatcgcctagacggtcaaattggatatatatgatttatagcatttgctaatgatgatgagcatgtgtaccgtcgggggcatgcaacatctcctttgtggggtcagcttaatgcagctcattaacggaccaccgactctccttgtatgattgtgtagcggtaaactgaatgcttttgacccactaatgagcaagtggccactaactgctaagagctagtaaactgatcatctttaaggtgcaaactgttctacatattcacttatggaaatttatcaaaattacaattatctaaggcttactatgactttagaaaactaaaccaagaaacattcttttcgggtatttaatagtgctaaataaataaatatggttacacttgttaaaactttggtttcacagggcgagctaactctcaccttttaggcagcctgtccaggccatacacttctccccacctccgaccatttcaaatccgaccagcttaattcacccactgcttggggtttataaagatgtcggaaacggtgccgcgcagcgacttcattccctggctggaggggacgggcttgggcctctgggccacgttgctcatccaccgactgaaggcctcttccgcctgcgagcggcgggcggccttctcctcctggcgccgccgctcggcattccgctgctcgaggcgacgctgttcgagcagcctaagcttgtgcagctcccactcctgcaggtgatgttgcacagacgccatattcttttgcggcggcagctgggcagaacggtcgggcttggtgagcttggcggtactggtggtctgctgcgccttctgctgacaccactgctcgtacttctccttggcgagccgctgcctcagctccgttcgctgccgctgcgcctctctctcggcctgctgcgcctgcaacttgtactggcactggcgttgcttgccggacagccagttctcgtaggcctcaccggcggaccgccggatatggagcggttcgatgcggcgggtgtaggtaaggggcggcgatcctacgctcgatcccaggcgcagcgagggcaggctgtggcttagtggcaactcgagcggggccagcatgctgtcgtcccgggacatggcctcctcccagctgcacatcgaggtcgtcgagtccttgtcgctggaattgttgccgctgcgggaagaggggcaggatcggctgctgcagctactccggtccgtgctggtgctactgctgggactgcccagatgcaggcagaccgtctccgactccgtctgcagctcgatatcctctcccagttcaccgacgcggggcccctcaattgtcttggtcgacttcagggtgcccagggacaaatccgagcagcagcgcagagtggaggtctccgtctcgtccaatgagttgacttcactggacgactcggagctgcccacgtagcgcactgtgctggggctacccatagagcgcacgaggctgtccttgtcacaggtcttgatgaaagtcctggaaccctttcttcgcggtagcagtacacgagcccccatctctctggcttggccatctgaatcctgctggctgggctgggtcatgcagaatagttcatggtcgataagggttccctgactgttgactttgcccagaaatgccattttgcagtgctcttctttcctaggattcctcttctgagtacagatagtaatctttatggggcagatgaacctaccttcttgtgtagccaatattcaaattcaatacgtcgtcagggacgatttatggaacaccttgctggcttcagaaccgataaactttgaagtctatgaaaagtgtttaagtttgtgtgttggaatagcgaacaataaactttttcgtttcttgacataaaactcaaatgagatgaatagtcttaggttcattttccccttttcgtttaaatgtgaatgaatacgacatacccttgattgcatgggtatgtcctacatatccttgcaccaccctttcgacggctgccacccttctcagctcaggacaatgtaatgaaatggttgtctaccgcacgctttgcgctgcataacatttaggtttcaatttctattaatatgcaatttagctcttttttcctattataattctacgtctgtggcacacagctcccccactcaagcccgggtccacggattgccgatcgggccgcgcacaacttgattgcagcagctgaagttgccgcgaacggttgttgctcttacattctaatcgaaatttttattgttcatagtcacgaaagtgcgcggctctggagcgatgacgacaacacggcgtcgtctgcggtggtgcagtggctcaccggctctacaagccgggtggaggtggtgcggtggtgcagctgtggcggcaaggtaatgtcagttatttgacagcgccgacagtcgagtacgctgccgtggcagacatgccacactgcctcactgctacatcacatcggctgctcaaagccagaggctgatcttgggggggattaagggggccctatttcagttgggtttcaactccactaaccttttttatatatcagccgaaaaactagctgcccccaaaaaagtatatgctgccactgccactggtgctcaggtatgatttctagtcgcgatgttt

SEQ ID NO: 33443 - DNA, 1167 bp, DROSOPHILA
atggcatttctgggcaaagtcaacagtcagggaacccttatcgaccatgaactattctgcatgacccagcccagccagcaggattcagatggccaagccagagagatgggggctcgtgtactgctaccgcgaagaaagggttccaggactttcatcaagacctgtgacaaggacagcctcgtgcgctctatgggtagccccagcacagtgcgctacgtgggcagctccgagtcgtccagtgaagtcaactcattggacgagacggagacctccactctgcgctgctgctcggatttgtccctgggcaccctgaagtcgaccaagacaattgaggggccccgcgtcggtgaactgggagaggatatcgagctgcagacggagtcggagacggtctgcctgcatctgggcagtcccagcagtagcaccagcacggaccggagtagctgcagcagccgatcctgcccctcttcccgcagcggcaacaattccagcgacaaggactcgacgacctcgatgtgcagctgggaggaggccatgtcccgggacgacagcatgctggccccgctcgagttgccactaagccacagcctgccctcgctgcgcctgggatcgagcgtaggatcgccgccccttacctacacccgccgcatcgaaccgctccatatccggcggtccgccggtgaggcctacgagaactggctgtccggcaagcaacgccagtgccagtacaagttgcaggcgcagcaggccgagagagaggcgcagcggcagcgaacggagctgaggcagcggctcgccaaggagaagtacgagcagtggtgtcagcagaaggcgcagcagaccaccagtaccgccaagctcaccaagcccgaccgttctgcccagctgccgccgcaaaagaatatggcgtctgtgcaacatcacctgcaggagtgggagctgcacaagcttaggctgctcgaacagcgtcgcctcgagcagcggaatgccgagcggcggcgccaggaggagaaggccgcccgccgctcgcaggcggaagaggccttcagtcggtggatgagcaacgtggcccagaggcccaagcccgtcccctccagccagggaatgaagtcgctgcgcggcaccgtttccgacatctttataaaccccaagcagtgggtgaattaa

SEQ ID NO: 33444 - protein, 388 aa, DROSOPHILA
MAFLGKVNSQGTLIDHELFCMTQPSQQDSDGQAREMGARVLLPRRKGSRTFIKTCDKDSLVRSMGSPSTVRYVGSSESSSEVNSLDETETSTLRCCSDLSLGTLKSTKTIEGPRVGELGEDIELQTESETVCLHLGSPSSSTSTDRSSCSSRSCPSSRSGNNSSDKDSTTSMCSWEEAMSRDDSMLAPLELPLSHSLPSLRLGSSVGSPPLTYTRRIEPLHIRRSAGEAYENWLSGKQRQCQYKLQAQQAEREAQRQRTELRQRLAKEKYEQWCQQKAQQTTSTAKLTKPDRSAQLPPQKNMASVQHHLQEWELHKLRLLEQRRLEQRNAERRRQEEKAARRSQAEEAFSRWMSNVAQRPKPVPSSQGMKSLRGTVSDIFINPKQWVN

SEQ ID NO: 33445 - DNA, 2849 bp, DROSOPHILA
aggtaaaagcccctattgcagagacccttgtttttggtgtgccatataagacagaaggatgagagattgcagctgtcagagagaatcgagtcttcagatcgacaacaacatgggcaacgtaatggatcgcaaggtgtcctgctcagaggcacgtgccacaaacaccacgcccactccgattgcgagtgaaaaggagacggaggcgccactgaaggaacaagtgctggagccgcaggagattgtcccaaatttatcgttccatttgttcagctatcgacagcaaatgggcagcaagaagcaccagttgatgaagtgggccacatccaagttggtactcaccgaagagctgctcaaattgcaaaggcaacgactggcagataccaacgagtcctggaccgattttgcatccttgtacgcggacaaggatgatgaggagaatcgtgaaccaaatggtgacgatacattagttcaggaactgagcaacctgagaaactatcgaatggaattgaggggcaccattctggagtttgcccaggagaagatgaagaagcgagagaagaaaaagttgaagcgactgaaacgacgcaccctcatctcctccaagaaacccagcaataagaataagatcgactactggtatccgcatacggatatcgaggagacggtggacttggatcctcaggatcaaacggaagtcgttgtcatcgattaggttagcattatactaagccttagttactttagtcgttattcttgttataattgtacatatacactgataagcttagagaatattcaaaatataagaacaacatattgtatacaaatttttttttatacttacacactctgatgatggcttcgactatataatacccattactcataatgcagtacagagggtttatgcaattttactttttaatactttctgcttttatatgaacattacactttctatatttacaattttgataccgacttatcccatctccacgttctataccttcttgcggacaaagtgatcgtagaacacaacatacccgaacttgggagagtagaccatcgatcgcttggcgttcctcgagtaaatgttgaactggccgcccaccgaaatcattttgtggtcaccgcgatgcatgaacatcagtccgaagtgatggtcgtgcatcacctggtagttatcgctatccgtgtacttgaccacgttataccggggattcgagtagctgagatggtgtggcatgggcttcagacgagagcgaccttggaagactccccgccagtctgtgtgcttgattgcctcgcggaagcagttgcgccagctcatgtccaggtctatgtagccggagatctccgagccgtccatgtggatgtacgaggtaaaaacgatggtctgttatgcaattaatagaaaagagagtatatcagctaagatgccgagcctaccgatagtatcttgttcaagttgagcagctcgcgggccttgaactccagaagaactgggtccctgttcgtcggcgacaggaggtcgctgaacaggcccacgtgtgccagcttcggcctaatggcctccagggccaggtcaaccctcttctcatactcttcggctgtgtagggtatcttggtggtgcggtagcccagctggacgatggtcttgatcgtgttttgattgcccagatatctgtggtccgtgacggtggcaaacgaggagatgtagtcattgtaattgtcaaactccaatacgctaaagtccacgctctttccctgggtggccatcttagtcctactgctgtgtggtgtggatggacttcagccaagagcaggttcctgctcctctttgtggttcaggaaaaagtcccttttaatgtgtaagtgttatatttaaaagagtgtgtgtttgtgttgtgtgttagtgtcagagttagttgactatttaatatttacattttgtttggctgtcaccacatgtttttggcttacacatatatattcgtatattaataggtctattcaatcatttgtatttttaacccacgacatggaggactcacaaaggaaacacgccggttccaaaggatttcgagctttggaaaatcgaaaacaagacatcgcctacaatcactatttgaattcgtttgtcaagctggaggacagacggtatctacccaacgataatgtgatacatcaactagtccccctgagggcagcagtgggaacaatcgtgatgacacccacccagttcaacgaggtgcacttctctccactgggaacgtgcttctatttcagcgagaataatgtccccaatgatccactgactatggcacttctagagcgcgaaaagctgaatgcaactaaaacgatttcagtatgatttataatcatgaacgtttagtaaggtaacttttattttagtgcatttactcatagaccatcgtattcgtgagcacccgagattccaagggcttcaatatctccggctacatcgatttggagcacagtttgcgtagatacaagaccgctggatcgaagtctcatccgtgggcagatattttcgccggtcgccgccgcctggagcccaatcatcaggatctaagcttcatcaattggagcaacggcagggtgcattccaacgactcggataactacaaggttattccggatgccgtcaagggtttgtgcttcgcgcacaagggcgatggttcgatgctcagcatagagaagtatataaccgaagagcatccgttgtgcaaatttatagaatcgccaaaacacggctacactgtcgtctacgatcattatatacggcgaaagatgtgattgctgccagatcacattataatcgaaac

SEQ ID NO: 33446 - DNA, 796 bp, DROSOPHILA
gaaccacaaagaggagcaggaacctgctcttggctgaagtccatccacaccacacagcagtaggactaagatggccacccagggaaagagcgtggactttagcgtattggagtttgacaattacaatgactacatctcctcgtttgccaccgtcacggaccacagatatctgggcaatcaaaacacgatcaagaccatcgtccagctgggctaccgcaccaccaagataccctacacagccgaagagtatgagaagagggttgacctggccctggaggccattaggccgaagctggcacacgtgggcctgttcagcgacctcctgtcgccgacgaacagggacccagttcttctggagttcaaggcccgcgagctgctcaacttgaacaagatactatcgaccatcgtttttacctcgtacatccacatggacggctcggagatctccggctacatagacctggacatgagctggcgcaactgcttccgcgaggcaatcaagcacacagactggcggggagtcttccaaggtcgctctcgtctgaagcccatgccacaccatctcagctactcgaatccccggtataacgtggtcaagtacacggatagcgataactaccaggtgatgcacgaccatcacttcggactgatgttcatgcatcgcggtgaccacaaaatgatttcggtgggcggccagttcaacatttactcgaggaacgccaagcgatcgatggtctactctcccaagttcgggtatgttgtgttctacgatcactttgtccgcaagaaggtatag

SEQ ID NO: 33447 - protein, 241 aa, DROSOPHILA
MATQGKSVDFSVLEFDNYNDYISSFATVTDHRYLGNQNTIKTIVQLGYRTTKIPYTAEEYEKRVDLALEAIRPKLAHVGLFSDLLSPTNRDPVLLEFKARELLNLNKILSTIVFTSYIHMDGSEISGYIDLDMSWRNCFREAIKHTDWRGVFQGRSRLKPMPHHLSYSNPRYNVVKYTDSDNYQVMHDHHFGLMFMHRGDHKMISVGGQFNIYSRNAKRSMVYSPKFGYVVFYDHFVRKKV

SEQ ID NO: 33448 - DNA, 2987 bp, DROSOPHILA
aaatctaatctttagaagcagaagttggatacatgtgaactcttatatggttgttagttaagtctaagaattttgcatgcctatatgcttgtaatataaaagcttccacggttgtaggcatacggttaagtagaacgttaaaagagacagcattttgttaacgactggctgactggccattcccacaatttcacagggcattctcagagatctagacgaaggctccccactggagggctacaaaaactgataatgcgtaaagtatacagctttattttccaaagcaatttttaagtaaatgatattgattccaaggactatttctgtgattaagagagtcaacaagtaatgattatcggatggaagactgcctgctgctataaactagttcttataaggtcattagaataatccagctaaaaaaagaaatcaaaattaaatattacttttaaatgcctttttttccaagttttttcattttaagaaatataaagcaattgtcttgataaaatcttaggaccttgacatgaattaaaatataaatatacttgcagacacgttatattcttctaataaactctaaatattattataattaattaatatatataccaattttgcagagtctgatggacgtccattccaagctgatagagcaacaaaagacgacgtaaccccagatactaaagggaataatggagatctggattccatcgttaccagcattatagttttttcaatcaaaaggaatcgaatttttatacaataaatgaatttttatatgttatcgccttaaatttctttaaaatttatgcgaaagatgttgagtaatcttttatttaaaaactataaattttaggttgcccataaatattgaaagttcaagttcactgtataattttgtggtttccattttattatctaaatgttctataattacaaatatgtgtacactataaggggtataaaagtggtggctatgccattcaagaagggtccgtcagattctagacaggatcttgttgtccgtgtagacgaactcctcgtgatcctcgataaggcggaagagctccttggcatagtagatggatcgcaccgactcctccagaatgagctggtggttctggacggcccgtcgcacttgttcgtgtatgaacatggcctccagccgcttggcccgctgagtcaggcgacaggcctcgttgttccggagacgtgcttcgccggccgtcagacggcgctccacgacgggctgatggcgagccgcgtggctgtggtagctacagatgtcgccgatgacaccggcattcacattgaagattccgtcggaggcgctgattaccgttctgcatgcggccggagtgcagaccatttctcgtgccaagtgctcacggatcatctcctgcagggcttcgcggcgtgcgatggtcagatagccccggcggatgtacttcctgccaatcttctcgcgcatcgatttgaagcagaagacttgggtgccccagcatttgcctttgagtgggttgggattcttgcgatctgcccgtggatcccggaaaagttgcctcttcacccgcttcaggctctccttttgcggcgtcagtcgttctgggagcaggcaactgttcacctggtgccacacttcgccgggtgtactcagcgccattgcacttgtagtcctccagtacatcttgtgacccatgccgttcatcagatacaactggcggatgcattcgttgaggaagctcctcttcgtggggctcttgaagttgggcgggttattgagcacgtagtgatctcgcttgtacaccacgcagtagccgtagtccttgtctccggtgaggatgcctggtttctggtacacgatcagctgctggtccttgtagtcaatgggcgagttaaagatgaagatctgattcttcagggcctcctcctcgttgggagtgcggaacatcatcagcttcttggaattcgtggactgagccatggctatcggcggttggaatgtgagtgataatgatgaggttgatttggtgggtttatatagtgcgacaggtagtcgatgtgggtggtgctctgacctgtttgtgattatgagcaggtcaaaggctgggttttttcgaagctttaaattcttatggccgattttatacctgcgatgcgacagatggtcttccagatctaagtattgcctgccaattcgcatttcccctaagaaaaaccaggtatagataacaataggaaatgtttaagcaacagaatgcatttcgcttaagatcaggcataactgcataacttctacttttgtttaaatactgcaagttatatttcaaaaagtgattatgtttttagtttcatcaaactgacaattctctagctactttgaaataaacgagtaaacagaatggataaaccgtgatttttggggttacgatattaaatatcgtgtgaacggaaaatcctattgcactaaaagatttatatcttttatatcaatacgtgatatgtattattaaaacagattgggttcatttttcttaggaagtttatttatttaaattataagttagattgtacgtgagctactttatgatatatacaaattttcataaaaaacatgtaaactaatttatgttcataattgatttaacacgtgtcacatatgtgttggcttaaagaatttccaagcagtgttggcctaattgggtggtagttttcatgagttgtcaactggcaagtatatattacttgaacaaagtaatttgattaaactggattttgatttcagtcaaacatttccttgtgctaattctaacgtttcactttttaactgggattagaaaagccatcggtcagaagcagaaagttaagaatatacgaatataaagaaaagcaacggatattgcaaactgtaaaattgtccaaggtaagcgcggtatttaaccaatgtatagtctataagaacaaatcccaaaatggatttaatt

SEQ ID NO: 33449 - DNA, 987 bp, DROSOPHILA
atggctcagtccacgaattccaagaagctgatgatgttccgcactcccaacgaggaggaggccctgaagaatcagatcttcatctttaactcgcccattgactacaaggaccagcagctgatcgtgtaccagaaaccaggcatcctcaccggagacaaggactacggctactgcgtggtgtacaagcgagatcactacgtgctcaataacccgcccaacttcaagagccccacgaagaggagcttcctcaacgaatgcatccgccagttgtatctgatgaacggcatgggtcacaagatgtactggaggactacaagtgcaatggcgctgagtacacccggcgaagtgtggcaccaggtgaacagttgcctgctcccagaacgactgacgccgcaaaaggagagcctgaagcgggtgaagaggcaacttttccgggatccacgggcagatcgcaagaatcccaacccactcaaaggcaaatgctggggcacccaagtcttctgcttcaaatcgatgcgcgagaagattggcaggaagtacatccgccggggctatctgaccatcgcacgccgcgaagccctgcaggagatgatccgtgagcacttggcacgagaaatggtctgcactccggccgcatgcagaacggtaatcagcgcctccgacggaatcttcaatgtgaatgccggtgtcatcggcgacatctgtagctaccacagccacgcggctcgccatcagcccgtcgtggagcgccgtctgacggccggcgaagcacgtctccggaacaacgaggcctgtcgcctgactcagcgggccaagcggctggaggccatgttcatacacgaacaagtgcgacgggccgtccagaaccaccagctcattctggaggagtcggtgcgatccatctactatgccaaggagctcttccgccttatcgaggatcacgaggagttcgtctacacggacaacaagatcctgtctagaatctga

SEQ ID NO: 33450 - protein, 328 aa, DROSOPHILA
MAQSTNSKKLMMFRTPNEEEALKNQIFIFNSPIDYKDQQLIVYQKPGILTGDKDYGYCVVYKRDHYVLNNPPNFKSPTKRSFLNECIRQLYLMNGMGHKMYWRTTSAMALSTPGEVWHQVNSCLLPERLTPQKESLKRVKRQLFRDPRADRKNPNPLKGKCWGTQVFCFKSMREKIGRKYIRRGYLTIARREALQEMIREHLAREMVCTPAACRTVISASDGIFNVNAGVIGDICSYHSHAARHQPVVERRLTAGEARLRNNEACRLTQRAKRLEAMFIHEQVRRAVQNHQLILEESVRSIYYAKELFRLIEDHEEFVYTDNKILSRI

SEQ ID NO: 33451 - DNA, 3651 bp, DROSOPHILA
ggtccaccaactcgcgcacctctgtgttcctgcagcctgcattacagggtatatgagtgccgtagggtatatttatgcttatagaaatgaaatcataccaacgcatcgacagaacttggtgcagatggccatggactgatagcagtcgcagtagttcttgatgcactgcgaccgcttgcagcagcatcccttcacgccgcctgctccttgacccttgcccttcttgccatccgctttatccacacttcttttcttgggcgatggcatgttgctgccttaatctcttccagaaacgaactgatgacagctccaacaaaaaaaatcagtgttgaaaggatggcaacccttatacatataaaaatatatatgtataaataaaacagcaatattgtgggcactaaactattaaagcttagataaagtatttatatgtcgtactggtaataaagttaaaatttgttaagtaccaatcgtttaacaagtgtctagtttatatcgttataacatagataatttcctttggtgtctacataatatggcatggcattaagttatgatattgttctcctctactcgtttagtctacgataattgaaagctattttatattatagatgtaataaaaagagttacattattaattgatatcaattgtaattgctttcctttcatatatattctgtgtcgagtgatttggcagcgaaaccaactcaaacctcttctcaaaattctctttttttgattggcgtttagtacttaaattacttatgtaattggaatgaagtgcgttgcatttcccgccaaaaaactcgacatttgggcgcgcgttttcaaaaatatcactatcaaaacgatatatttatgcagtgtgtaaatgtgtgcagcagaagacttcttaacagttggaaagtaattgagtggcctgcaatcgttgctattgcttctaaagtaactaggattatctccgctgcgctcctaactagtcccacttggtgcgctcctagcatatggttccattgagcagctcgtaacagttgggcggcgatgctggcgaggctgctgccgccgcctcctgtcgcgtcttcagaaagttgcccacccaatgggccgtgagatccagatatttcgttctcgagcccggattgtagtcgaggaagccggcgcgtggcatcacctcctcgatctggctgccatccggccagttgttgtagctggctatgttgatgaagcccacgtggttgagaatggctgtccgccaggccacgccatagtactgcaagatcaaatgatattagtattagtagcctgttctggcactccagttgatggctgctccttcacccgtccattgctgcgatgccgctggatgtctccgtgtcgcggaaacttgttcctctccgcgaatcccggacccaccgtgggcacaaagagcatcttgtaggacagcgcaaatgacttcagatacgaccagttcttccaagtgctggcgaagacagctccattgctgggcagtttgctgtagaagccatcgaagcacaacctccgcaggacatcggcatggcttttgagcctggagagaaacgaaaggatatatagaatcacctaggataatctaaggcgcaccccaccttatgtgtccaatgaataaggcatccagaattctccgcagaccatccggttccaccagcgaaggcgatcgacacaacagccttcccagactatcactcaacttgtaggcattgctcacgtagagaaccggcagggagacacctctcgactgactccacaccttgtagaatccagctaggctggtgtatgtggcaatctcctgcagctgctggcgcacaaactccacgctctgattcccggccacactgagctcaaaggtaacgctaagattgtgctgcggtgccagttccaagatctgatgcagcagtgccgcctccgcgggcttgccaccggagaagctcaggatgagcacaccgatgccacagctgcgtatgttctcgaaatgctgggccagcagcgagccactgggcttgtacagacccagtgccggatagaaggcggtgtttaggattcgcactggtcgcggcgtggtcagtggcacatcgtttgggtgctccgctggcggcggaggcggcttcttcgacttgtaccacggcaccggggcagtgtagaatatgtgcactgcactgatcaccacatccaaagtggtacgcgactgaacaaagtgtacatttttaagatttaaggactaagattggccaccttcttggactgaactggaaacttacagactgctccgcctcgtggtcccgctgctgctgctgcttcatcagatcgattttgctctgaatgatgcgctccttgatcttctgctcgtcatacttctcgggcacaatcactccgttctcccgctgcggctggagcagcgcgacggccaccggcggcggcttctccgccacttggggctgatccccgggcctgtaggcgcgtgcgatgaatcgctcgtccagcagcagttcgatggccgcattgcgtccgctggagcccagcactatgatggtgatgaccagcagggcgacgatggccagcaggagtagaatcttcagcttacgccgcgttttcacatacttttttagcagcattttcgcaagcgtgcattttctctcattgtttggacgtcctcgttgtttttcgtccccagtttttcgtacctccaccccacaaccccttctcttcctgtcgcaatgcagctgccggaagttcctggccattgcgcatgtcctgaaacggacacactaaactatgcccagcgagttcccaattaccatttcaccattaaagcatatgcgagtttgttattttttttggacattttattgtgagttgatttataatattgtacacattaatattgctaagttatttaagggaatatgccccagaaattttcacaaataaaatagtttaaacggaaatgtgaaacaagtgggttttagaatccattcccaaaataaatacattacttataattccgtttttgtttgtcaacacattgtctgaatagtttttatttagttataaagtagagttttaaaaaaggttttaggtttgtatctattcgaagtgcatagtcttgttccgattaacatgcaccttcgagctctagcgtccctcaactggaaaagaaaatcaagttagcactgctggtggctggggattactcatcattgcaacttactgtatgtagagagatcgatttcctcgggcagctcactgatgttcacatcgaaacgatcctgtacttcgttaagtatcttggcgtcgttctcgtccgaaacgaatgtgattgccagtcccttggtgccgaagcgaccggcacgggccacgcgatgcaagtaggtgtcggaatcctcgggcatgtcgtagttgaacacgatgttcacacgctcgatgtccatgccgcggccaaagagattggtggccaccagaatgcgcttctggaagtccttgaactgctggtagcgattcagacgctcctcctgggtcatcccacgatggatgccgatggcggggaagttctgctccgtcagcagctgcgacagagccacgcaacgttgcacagacttcacaaagatgaccacc

SEQ ID NO: 33452 - DNA, 1380 bp, DROSOPHILA
atgctgctaaaaaagtatgtgaaaacgcggcgtaagctgaagattctactcctgctggccatcgtcgccctgctggtcatcaccatcatagtgctgggctccagcggacgcaatgcggccatcgaactgctgctggacgagcgattcatcgcacgcgcctacaggcccggggatcagccccaagtggcggagaagccgccgccggtggccgtcgcgctgctccagccgcagcgggagaacggagtgattgtgcccgagaagtatgacgagcagaagatcaaggagcgcatcattcagagcaaaatcgatctgatgaagcagcagcagcagcgggaccacgaggcggagcagtcttcgaagaagccgcctccgccgccagcggagcacccaaacgatgtgccactgaccacgccgcgaccagtgcgaatcctaaacaccgccttctatccggcactgggtctgtacaagcccagtggctcgctgctggcccagcatttcgagaacatacgcagctgtggcatcggtgtgctcatcctgagcttctccggtggcaagcccgcggaggcggcactgctgcatcagatcttggaactggcaccgcagcacaatcttagcgttacctttgagctcagtgtggccgggaatcagagcgtggagtttgtgcgccagcagctgcaggagattgccacatacaccagcctagctggattctacaaggtgtggagtcagtcgagaggtgtctccctgccggttctctacgtgagcaatgcctacaagttgagtgatagtctgggaaggctgttgtgtcgatcgccttcgctggtggaaccggatggtctgcggagaattctggatgccttattcattggacacataaggctcaaaagccatgccgatgtcctgcggaggttgtgcttcgatggcttctacagcaaactgcccagcaatggagctgtcttcgccagcacttggaagaactggtcgtatctgaagtcatttgcgctgtcctacaagatgctctttgtgcccacggtgggtccgggattcgcggagaggaacaagtttccgcgacacggagacatccagcggcatcgcagcaatggacggtactatggcgtggcctggcggacagccattctcaaccacgtgggcttcatcaacatagccagctacaacaactggccggatggcagccagatcgaggaggtgatgccacgcgccggcttcctcgactacaatccgggctcgagaacgaaatatctggatctcacggcccattgggtgggcaactttctgaagacgcgacaggaggcggcggcagcagcctcgccagcatcgccgcccaactgttacgagctgctcaatggaaccatatgctag

SEQ ID NO: 33453 - protein, 459 aa, DROSOPHILA
MLLKKYVKTRRKLKILLLLAIVALLVITIIVLGSSGRNAAIELLLDERFIARAYRPGDQPQVAEKPPPVAVALLQPQRENGVIVPEKYDEQKIKERIIQSKIDLMKQQQQRDHEAEQSSKKPPPPPAEHPNDVPLTTPRPVRILNTAFYPALGLYKPSGSLLAQHFENIRSCGIGVLILSFSGGKPAEAALLHQILELAPQHNLSVTFELSVAGNQSVEFVRQQLQEIATYTSLAGFYKVWSQSRGVSLPVLYVSNAYKLSDSLGRLLCRSPSLVEPDGLRRILDALFIGHIRLKSHADVLRRLCFDGFYSKLPSNGAVFASTWKNWSYLKSFALSYKMLFVPTVGPGFAERNKFPRHGDIQRHRSNGRYYGVAWRTAILNHVGFINIASYNNWPDGSQIEEVMPRAGFLDYNPGSRTKYLDLTAHWVGNFLKTRQEAAAAASPASPPNCYELLNGTIC

SEQ ID NO: 33454 - DNA, 2794 bp, DROSOPHILA
cgatggacgagaacgtgctgttgctttacttcggccaactaaaactgctggcaggtgagtaaagttgttttatacatacttcaagtagatatgctaagatatatatacttcttgtagaaaagaccagagaccaagcattcatcaacaatcccgacgccctgattgtggttcaggatatgctcttcatcatgcgccgcatttgctattgcaccaagggaatgggtaaagagaagaactctcgtggcgagggcgacaatatcgatgaaggtgaagatgcgtcatcggagccagcaactccaccaactagaccagaagcaggcgaggcaacaagcagaggaagagggcgaaaggcggacatgtccgaggagccagtatgtaaatctaactgattaacttttcccccttgagctaaatgttcaaattcctttgcagctcaagcaactggaacgctgtcttcgctttgtggaagaaacccatcgcaacatagtgcccgtcatgagtcccgagcttagtcacaactttgaatccttttgccgagcgatggccatgagattccccaactacattgagttcgcccagcccgcgcaattttggcggcagtttcgatcatcggcgaaagctcccagagcgagcagaagcaagcgacgacgtatggaggagggcgaagtcgagtcccatgaggagcacgagtcggagagcgacagtgacagtgagctgccgctggacaggcacaagaccacgccgactgcctcccgtttgtcccaaaggaaaaccagctgcgatatgcttgtcaccgagctgattttccagccacccgattggtagtttcaatttttgcgaccttgcaaactgaatttctcaattatttagttttacacaaatcgaatattgtattattttgcattataaaatgtacatatgtatgtatctataagccaaaaatggaatcaagttattcttgaccttgaaactatttaataagccattttgacgttttgagttaataataatccttgctgtactcgcatattttctccaaaatgttcttgtagccgcgcataaactcttcgagcaccagctggcacacttggagctcgttcaggcccaactgttcggcttccgtggcctggatgagcatgcactccagcagagccgcgttcaccggctgcacgaagagattccgatccctgcgatcgtcgtgccgcaccggaatgatcagattgacgggcatcggaggttccgccggttgcttcactgccctggctggagtggcggcagtcgctatgggtcgtgagatgggtatggggttaatgtgactactagccatcggtggtttgccagccactagggtatactttggcggcgtcattagcgccttgccgggcaacgccaaagtggatgccgccacctggagcgccttgccctggacatcgatgcccgccttggcagctgcggctgctgccttggcgctcatcgcagccgccttctgccttttcacagcgctggaattcttggccacggagttggggtccaccaactcgcgcacctctgtgttcctgcagcctgcattacagggtatatgagtgccgtagggtatatttatgcttatagaaatgaaatcataccaacgcatcgacagaacttggtgcagatggccatggactgatagcagtcgcagtagttcttgatgcactgcgaccgcttgcagcagcatcccttcacgccgcctgctccttgacccttgcccttcttgccatccgctttatccacacttcttttcttgggcgatggcatgttgctgccttaatctcttccagaaacgaactgatgacagctccaacaaaaaaaatcagtgttgaaaggatggcaacccttatacatataaaaatatatatgtataaataaaacagcaatattgtgggcactaaactattaaagcttagataaagtatttatatgtcgtactggtaataaagttaaaatttgttaagtaccaatcgtttaacaagtgtctagtttatatcgttataacatagataatttcctttggtgtctacataatatggcatggcattaagttatgatattgttctcctctactcgtttagtctacgataattgaaagctattttatattatagatgtaataaaaagagttacattattaattgatatcaattgtaattgctttcctttcatatatattctgtgtcgagtgatttggcagcgaaaccaactcaaacctcttctcaaaattctctttttttgattggcgtttagtacttaaattacttatgtaattggaatgaagtgcgttgcatttcccgccaaaaaactcgacatttgggcgcgcgttttcaaaaatatcactatcaaaacgatatatttatgcagtgtgtaaatgtgtgcagcagaagacttcttaacagttggaaagtaattgagtggcctgcaatcgttgctattgcttctaaagtaactaggattatctccgctgcgctcctaactagtcccacttggtgcgctcctagcatatggttccattgagcagctcgtaacagttgggcggcgatgctggcgaggctgctgccgccgcctcctgtcgcgtcttcagaaagttgcccacccaatgggccgtgagatccagatatttcgttctcgagcccggattgtagtcgaggaagccggcgcgtggcatcacctcctcgatctggctgccatccggccagttgttgtagctggctatgttgatgaagcccacgtggttgagaatggctgtccgccaggccacgcc

SEQ ID NO: 33455 - DNA, 732 bp, DROSOPHILA
atgccatcgcccaagaaaagaagtgtggataaagcggatggcaagaagggcaagggtcaaggagcaggcggcgtgaagggatgctgctgcaagcggtcgcagtgcatcaagaactactgcgactgctatcagtccatggccatctgcaccaagttctgtcgatgcgttggctgcaggaacacagaggtgcgcgagttggtggaccccaactccgtggccaagaattccagcgctgtgaaaaggcagaaggcggctgcgatgagcgccaaggcagcagccgcagctgccaaggcgggcatcgatgtccagggcaaggcgctccaggtggcggcatccactttggcgttgcccggcaaggcgctaatgacgccgccaaagtataccctagtggctggcaaaccaccgatggctagtagtcacattaaccccatacccatctcacgacccatagcgactgccgccactccagccagggcagtgaagcaaccggcggaacctccgatgcccgtcaatctgatcattccggtgcggcacgacgatcgcagggatcggaatctcttcgtgcagccggtgaacgcggctctgctggagtgcatgctcatccaggccacggaagccgaacagttgggcctgaacgagctccaagtgtgccagctggtgctcgaagagtttatgcgcggctacaagaacattttggagaaaatatgcgagtacagcaaggattattattaa

SEQ ID NO: 33456 - protein, 243 aa, DROSOPHILA
MPSPKKRSVDKADGKKGKGQGAGGVKGCCCKRSQCIKNYCDCYQSMAICTKFCRCVGCRNTEVRELVDPNSVAKNSSAVKRQKAAAMSAKAAAAAAKAGIDVQGKALQVAASTLALPGKALMTPPKYTLVAGKPPMASSHINPIPISRPIATAATPARAVKQPAEPPMPVNLIIPVRHDDRRDRNLFVQPVNAALLECMLIQATEAEQLGLNELQVCQLVLEEFMRGYKNILEKICEYSKDYY

SEQ ID NO: 33457 - DNA, 2792 bp, DROSOPHILA
tagaacacaacatacccgaacttgggagagtagaccatcgatcgcttggcgttcctcgagtaaatgttgaactggccgcccaccgaaatcattttgtggtcaccgcgatgcatgaacatcagtccgaagtgatggtcgtgcatcacctggtagttatcgctatccgtgtacttgaccacgttataccggggattcgagtagctgagatggtgtggcatgggcttcagacgagagcgaccttggaagactccccgccagtctgtgtgcttgattgcctcgcggaagcagttgcgccagctcatgtccaggtctatgtagccggagatctccgagccgtccatgtggatgtacgaggtaaaaacgatggtctgttatgcaattaatagaaaagagagtatatcagctaagatgccgagcctaccgatagtatcttgttcaagttgagcagctcgcgggccttgaactccagaagaactgggtccctgttcgtcggcgacaggaggtcgctgaacaggcccacgtgtgccagcttcggcctaatggcctccagggccaggtcaaccctcttctcatactcttcggctgtgtagggtatcttggtggtgcggtagcccagctggacgatggtcttgatcgtgttttgattgcccagatatctgtggtccgtgacggtggcaaacgaggagatgtagtcattgtaattgtcaaactccaatacgctaaagtccacgctctttccctgggtggccatcttagtcctactgctgtgtggtgtggatggacttcagccaagagcaggttcctgctcctctttgtggttcaggaaaaagtcccttttaatgtgtaagtgttatatttaaaagagtgtgtgtttgtgttgtgtgttagtgtcagagttagttgactatttaatatttacattttgtttggctgtcaccacatgtttttggcttacacatatatattcgtatattaataggtctattcaatcatttgtatttttaacccacgacatggaggactcacaaaggaaacacgccggttccaaaggatttcgagctttggaaaatcgaaaacaagacatcgcctacaatcactatttgaattcgtttgtcaagctggaggacagacggtatctacccaacgataatgtgatacatcaactagtccccctgagggcagcagtgggaacaatcgtgatgacacccacccagttcaacgaggtgcacttctctccactgggaacgtgcttctatttcagcgagaataatgtccccaatgatccactgactatggcacttctagagcgcgaaaagctgaatgcaactaaaacgatttcagtatgatttataatcatgaacgtttagtaaggtaacttttattttagtgcatttactcatagaccatcgtattcgtgagcacccgagattccaagggcttcaatatctccggctacatcgatttggagcacagtttgcgtagatacaagaccgctggatcgaagtctcatccgtgggcagatattttcgccggtcgccgccgcctggagcccaatcatcaggatctaagcttcatcaattggagcaacggcagggtgcattccaacgactcggataactacaaggttattccggatgccgtcaagggtttgtgcttcgcgcacaagggcgatggttcgatgctcagcatagagaagtatataaccgaagagcatccgttgtgcaaatttatagaatcgccaaaacacggctacactgtcgtctacgatcattatatacggcgaaagatgtgattgctgccagatcacattataatcgaaacataaattcagaatgcacttcaaccgatcatcaaagagcttttactggcaatcaaagcattttagaaatcaaaacaatatcgtgatcatgaaactggcagccagggagaggataaacaatcgccagactgactgatgccgccgacgtcatggacaagcgtcgcagggaaaatgcgcgagagcaagttgcgtatacgacgtgtggtactcggactctccgccgtgaactggagagagcttcccatcggctgagatgacattcttggccgtgccagtgagttccggcagtcagtaggcgtgcgaagcgctccaagactgggtgcttccgttgcgtgaaaataaattgtgaagaagaaagacggcactttgtatctgctcgttttgaattttttttttctgtggcagtctgtgtgcgtctgtagatatagatttgtacatatgcagttgggaagtgaacacgaaatggctgctgcatttagaaaattcaattagtttcgagtgtgttgaggtaaacgaaaaaatgcgcctttgtccagttgtcatctatgcatttataatcatcatcgggtttctggaggggattatagcccttggtggcgacgatcgcaatgaaatcacagtgggtaggtccctccattaattacttagtgatagcaatagctcaacgttttgccctcgaaggtgccattttctacgagaacgagaaggagatcgagctcagcttcgatcaggcctttcgcgaggtcaacaatatgaagttctcggagctgcgattcgtgaccatcaaacgctatatgcccaccaacgacagtttccttttgcagcagattagtaagtaaatacgctcggatgcggcagaaccaagttacgagaaattcatcttccgtgtgtagcatgtgaactgatttccaatggcgttgcggctattttcggaccaagttcaaaggcagccagtggtaagaaaagcacacac

SEQ ID NO: 33458 - DNA, 730 bp, DROSOPHILA
tttaacccacgacatggaggactcacaaaggaaacacgccggttccaaaggatttcgagctttggaaaatcgaaaacaagacatcgcctacaatcactatttgaattcgtttgtcaagctggaggacagacggtatctacccaacgataatgtgatacatcaactagtccccctgagggcagcagtgggaacaatcgtgatgacacccacccagttcaacgaggtgcacttctctccactgggaacgtgcttctatttcagcgagaataatgtccccaatgatccactgactatggcacttctagagcgcgaaaagctgaatgcaactaaaacgatttcaaccatcgtattcgtgagcacccgagattccaagggcttcaatatctccggctacatcgatttggagcacagtttgcgtagatacaagaccgctggatcgaagtctcatccgtgggcagatattttcgccggtcgccgccgcctggagcccaatcatcaggatctaagcttcatcaattggagcaacggcagggtgcattccaacgactcggataactacaaggttattccggatgccgtcaagggtttgtgcttcgcgcacaagggcgatggttcgatgctcagcatagagaagtatataaccgaagagcatccgttgtgcaaatttatagaatcgccaaaacacggctacactgtcgtctacgatcattatatacggcgaaagatgtga

SEQ ID NO: 33459 - protein, 238 aa, DROSOPHILA
MEDSQRKHAGSKGFRALENRKQDIAYNHYLNSFVKLEDRRYLPNDNVIHQLVPLRAAVGTIVMTPTQFNEVHFSPLGTCFYFSENNVPNDPLTMALLEREKLNATKTISTIVFVSTRDSKGFNISGYIDLEHSLRRYKTAGSKSHPWADIFAGRRRLEPNHQDLSFINWSNGRVHSNDSDNYKVIPDAVKGLCFAHKGDGSMLSIEKYITEEHPLCKFIESPKHGYTVVYDHYIRRKM

SEQ ID NO: 33460 - DNA, 5529 bp, DROSOPHILA
aggcttcgttgagggcgtctacgaattctgtgggtggtagggcttgcagcattttcgcttgctcgttggtggtgctccagaccagggagctcagcctgtccgttagtggtagcagtgccactggtccattgggcagaaacctctgccacgccacggaattatcacaggcatcttcgccgagttccagcgtagccaccaggcccatgcggtcgtagttcagggaaaatacatccacgttcatctcctttctgaccacggaattggcgccatccgctccgatcagcaaatcgcaggaaaagttgcgtccatcctctagctgcagctcggagtgattggagttggagtccctgggcaggcgaacgcactggattctggccttgttgaggatctccacattgggtgattccttggccagcgcatagaccgcatccaggatcaaatcgttctcaatgatgcaggccacgtcgctggcaaagttatcgtgctggaactggatcagtgcgtccgtgttggactcccacacctgcatctgcttgacgggcttgtagcgcgccgactcgatgtgcttccacgcatcaatggacttgaacagctcgatggagttgtgattgatggcggatacgcgattctggtatggcccagtgggattaaatccccggaactcgggcgcaccttccagcagcagtaccttcttgtccgccaacgtcgagttcttggccagagctgcggccaatgtggtgcccaccagtccgccgcctccgatgattatatcaaagtgttcggtggacgtcgattgtgtggattcaccgcggtttgtggtcatgtcagtggtggatttgctggccagcaggcggacggacagaagacgcgcctgccccgccgaagccaacgctccttggatacgtagaacacccaacatcttccgaaatttcaaaagtttctcgtaattccacgattatttcattatgtctctcgtccgctagagatgcaccaaaaatagatgcacttatcgaatctttgccttttgaatgctggcaatgccgcaccaaaactatcgagttttcgattatttctttaacgagctttcaaattttgatactaaaattaactttaaatttaatttaatgcatttttaggtgctcccggcctgcatggcaaatgttttgagctcttctcggagatagccaatgagcacaatggcgatgtctacgaaactctacacctgataatgcgacaaacctttccgatgcatgtttatacggatagtccccagatgattgcatatggacgccgtggagcgatgcaaagtggggagcacatatcagactggtttatccagctgatagataagtatcccgacattgttaaccgcatcctgcacttttacattgagtgcgtggtgtccaatcccattaaagcggtgagtacgtgtaaaatcctctgaaataatattgtaatctaatatataatttcagtggaaaagcaatgacgagaaggtggctataggctatgcagccaaatacgaccgggtactgttcaccaagtgcaacaaatcttgtgcagattacgtgctggaagccgtgaaagccgacgatgctgtgggcattcaaattcgtgctctcgatctgatcgagaagatacttttgcaggaaagcgaggtggagtggagcatctttcgccacgaggtgtccgacgtgcccagagaggtgccgctcctaagggaggtgttgcgttgcctcaacgatcgaacgttaactgtgcgccggaaggcgtgtcaagtgctcatcctggcgctgagacaaggatccccgatgacgaaaaaaattctgcaggaaagcattcgtttcgttcagttcgatgatactgatgtggaagctttggctgaaccctctgcccagcaaaacgagctgcgtttcgagaagcccggaattgtgcagtatgcctttagtttccagggacatgagcaactggagacggaggtgaagaacttgccccaaacggtgtaccagcgttttctggccgcggataatggtttggcgcgttccgctggcatagctctactcgaaagactggtcctagtcaatcccctgatcatctataacacgaattttgtgaaggaaacctccttgctggccgtggatcgcttgtcttcggtgaggaaatctgcactggagaccatagaaaccctgctggaggcctactccaattgtttcgccctgatttgtgtgtactgccggatttgggcttgcctaatgagcgatgaggatgtggcgctccagaaactggccatttcggtaggtaaacactttgaaagtttattaatatactaaactttgtaacttgcttgcagagcttcgatagaatggtcttgaaaaacattcagcccctggagtattcaaacgaagcgaaacactttatgccctggcgaatcatcagcaccctgctgatgactcaaccaagagcttatcttcaagagagattcgctgttttactggaacgggaaaccatagtaacgtaggttatatcattgctaagaatctcaaggattataagagtctcctttgatgtttgcagacccagactggtgaatgtgattatctcccacctatccacgtccatggctaccgatgcctggggattgctgctattcctgtccagtcgcatcaccaacaacatggacgcgctgattggcattttcaatggcctctcctcctacaacatgaagtccaatcaatttctggcgctgcagctgatcactggctgcctgaggaacttctccaagccggcactcaatcagctattccaaaaactactaaatgccctgcgcacgggcagcatttggttgggcatcatctcgagtgccgtcaatttgctcaaccagatccatcacctttctaccagccagtcacctacgattgcctccgagatgccatactggcagctcagtttgctggaagatctcgtcgagggcattctgagcagtgctcaaaattttcaggaggaatatgcccggctgcagtgcttgctgggcgcctataccgagctaattgtgatggtgccccaggatgtggacaataggatcgtgagcattgtgtttaaatatctgcaggagtgtaccaagctctgtgaatcggaattcgattcggataacgagcgcatgaccaactggatgattgtgatagccggtcgtttgtcattgcgagataatcatctggccaatagtgcatccaagctgtacataaccatactgacgaaaaacgacagacctcagatcatcaataccactttaatagcgctcaacgatctcggcaagaagcatccatcaattctagagagtaactttcaggcgatcttgtcgaaactacaatcgaaattcgccatgacccgggtgcgcacctttcgctgcgtcaaggatgtgattctgtccgggaatattaagctcaagggtccaattctcatatccatgctggctgccctggtggacgaaagtgccgaggtggccagggaggcggatgccttcttcactcgctacaaaaagttgtacaacaaaatgttattcgatcactgcctgaaggagtgccccttcgatctgaatgaccaggctattttgaggggcgtgagaacgaatggcaactacaagtcacctctgaagggttcacaaatggccaagaaacgtaggttgctctacaatcacataatgtcctcgatggacgagaacgtgctgttgctttacttcggccaactaaaactgctggcaggtgagtaaagttgttttatacatacttcaagtagatatgctaagatatatatacttcttgtagaaaagaccagagaccaagcattcatcaacaatcccgacgccctgattgtggttcaggatatgctcttcatcatgcgccgcatttgctattgcaccaagggaatgggtaaagagaagaactctcgtggcgagggcgacaatatcgatgaaggtgaagatgcgtcatcggagccagcaactccaccaactagaccagaagcaggcgaggcaacaagcagaggaagagggcgaaaggcggacatgtccgaggagccagtatgtaaatctaactgattaacttttcccccttgagctaaatgttcaaattcctttgcagctcaagcaactggaacgctgtcttcgctttgtggaagaaacccatcgcaacatagtgcccgtcatgagtcccgagcttagtcacaactttgaatccttttgccgagcgatggccatgagattccccaactacattgagttcgcccagcccgcgcaattttggcggcagtttcgatcatcggcgaaagctcccagagcgagcagaagcaagcgacgacgtatggaggagggcgaagtcgagtcccatgaggagcacgagtcggagagcgacagtgacagtgagctgccgctggacaggcacaagaccacgccgactgcctcccgtttgtcccaaaggaaaaccagctgcgatatgcttgtcaccgagctgattttccagccacccgattggtagtttcaatttttgcgaccttgcaaactgaatttctcaattatttagttttacacaaatcgaatattgtattattttgcattataaaatgtacatatgtatgtatctataagccaaaaatggaatcaagttattcttgaccttgaaactatttaataagccattttgacgttttgagttaataataatccttgctgtactcgcatattttctccaaaatgttcttgtagccgcgcataaactcttcgagcaccagctggcacacttggagctcgttcaggcccaactgttcggcttccgtggcctggatgagcatgcactccagcagagccgcgttcaccggctgcacgaagagattccgatccctgcgatcgtcgtgccgcaccggaatgatcagattgacgggcatcggaggttccgccggttgcttcactgccctggctggagtggcggcagtcgctatgggtcgtgagatgggtatggggttaatgtgactactagccatcggtggtttgccagccactagggtatactttggcggcgtcattagcgccttgccgggcaacgccaaagtggatgccgccacctggagcgccttgccctggacatcgatgcccgccttggcagctgcggctgctgccttggcgctcatcgcagccgccttctgccttttcacagcgctggaattcttggccacggagttggggtccaccaactcgcgcacctctgtgttcctgcagcctgcattacagggtatatgagtgccgtagggtatatttatgcttatagaaatgaaatcataccaacgcatcgacagaacttggtgcagatggccatggactgatagcagtcgcagtagttcttgatgcactgcgaccgcttgcagcagcatcccttcacgccgcctgctccttgacccttgcccttcttgccatccgctttatccacacttcttttcttgggcgatggcatgttgctgccttaatctcttccagaaacgaac

SEQ ID NO: 33461 - DNA, 3156 bp, DROSOPHILA
atgcacttatcgaatctttgccttttgaatgctggcaatgccgcaccaaaactatcgagtgctcccggcctgcatggcaaatgttttgagctcttctcggagatagccaatgagcacaatggcgatgtctacgaaactctacacctgataatgcgacaaacctttccgatgcatgtttatacggatagtccccagatgattgcatatggacgccgtggagcgatgcaaagtggggagcacatatcagactggtttatccagctgatagataagtatcccgacattgttaaccgcatcctgcacttttacattgagtgcgtggtgtccaatcccattaaagcgtggaaaagcaatgacgagaaggtggctataggctatgcagccaaatacgaccgggtactgttcaccaagtgcaacaaatcttgtgcagattacgtgctggaagccgtgaaagccgacgatgctgtgggcattcaaattcgtgctctcgatctgatcgagaagatacttttgcaggaaagcgaggtggagtggagcatctttcgccacgaggtgtccgacgtgcccagagaggtgccgctcctaagggaggtgttgcgttgcctcaacgatcgaacgttaactgtgcgccggaaggcgtgtcaagtgctcatcctggcgctgagacaaggatccccgatgacgaaaaaaattctgcaggaaagcattcgtttcgttcagttcgatgatactgatgtggaagctttggctgaaccctctgcccagcaaaacgagctgcgtttcgagaagcccggaattgtgcagtatgcctttagtttccagggacatgagcaactggagacggaggtgaagaacttgccccaaacggtgtaccagcgttttctggccgcggataatggtttggcgcgttccgctggcatagctctactcgaaagactggtcctagtcaatcccctgatcatctataacacgaattttgtgaaggaaacctccttgctggccgtggatcgcttgtcttcggtgaggaaatctgcactggagaccatagaaaccctgctggaggcctactccaattgtttcgccctgatttgtgtgtactgccggatttgggcttgcctaatgagcgatgaggatgtggcgctccagaaactggccatttcgagcttcgatagaatggtcttgaaaaacattcagcccctggagtattcaaacgaagcgaaacactttatgccctggcgaatcatcagcaccctgctgatgactcaaccaagagcttatcttcaagagagattcgctgttttactggaacgggaaaccatagtaacacccagactggtgaatgtgattatctcccacctatccacgtccatggctaccgatgcctggggattgctgctattcctgtccagtcgcatcaccaacaacatggacgcgctgattggcattttcaatggcctctcctcctacaacatgaagtccaatcaatttctggcgctgcagctgatcactggctgcctgaggaacttctccaagccggcactcaatcagctattccaaaaactactaaatgccctgcgcacgggcagcatttggttgggcatcatctcgagtgccgtcaatttgctcaaccagatccatcacctttctaccagccagtcacctacgattgcctccgagatgccatactggcagctcagtttgctggaagatctcgtcgagggcattctgagcagtgctcaaaattttcaggaggaatatgcccggctgcagtgcttgctgggcgcctataccgagctaattgtgatggtgccccaggatgtggacaataggatcgtgagcattgtgtttaaatatctgcaggagtgtaccaagctctgtgaatcggaattcgattcggataacgagcgcatgaccaactggatgattgtgatagccggtcgtttgtcattgcgagataatcatctggccaatagtgcatccaagctgtacataaccatactgacgaaaaacgacagacctcagatcatcaataccactttaatagcgctcaacgatctcggcaagaagcatccatcaattctagagagtaactttcaggcgatcttgtcgaaactacaatcgaaattcgccatgacccgggtgcgcacctttcgctgcgtcaaggatgtgattctgtccgggaatattaagctcaagggtccaattctcatatccatgctggctgccctggtggacgaaagtgccgaggtggccagggaggcggatgccttcttcactcgctacaaaaagttgtacaacaaaatgttattcgatcactgcctgaaggagtgccccttcgatctgaatgaccaggctattttgaggggcgtgagaacgaatggcaactacaagtcacctctgaagggttcacaaatggccaagaaacgtaggttgctctacaatcacataatgtcctcgatggacgagaacgtgctgttgctttacttcggccaactaaaactgctggcagaaaagaccagagaccaagcattcatcaacaatcccgacgccctgattgtggttcaggatatgctcttcatcatgcgccgcatttgctattgcaccaagggaatgggtaaagagaagaactctcgtggcgagggcgacaatatcgatgaaggtgaagatgcgtcatcggagccagcaactccaccaactagaccagaagcaggcgaggcaacaagcagaggaagagggcgaaaggcggacatgtccgaggagccactcaagcaactggaacgctgtcttcgctttgtggaagaaacccatcgcaacatagtgcccgtcatgagtcccgagcttagtcacaactttgaatccttttgccgagcgatggccatgagattccccaactacattgagttcgcccagcccgcgcaattttggcggcagtttcgatcatcggcgaaagctcccagagcgagcagaagcaagcgacgacgtatggaggagggcgaagtcgagtcccatgaggagcacgagtcggagagcgacagtgacagtgagctgccgctggacaggcacaagaccacgccgactgcctcccgtttgtcccaaaggaaaaccagctgcgatatgcttgtcaccgagctgattttccagccacccgattggtag

SEQ ID NO: 33462 - protein, 1051 aa, DROSOPHILA
MHLSNLCLLNAGNAAPKLSSAPGLHGKCFELFSEIANEHNGDVYETLHLIMRQTFPMHVYTDSPQMIAYGRRGAMQSGEHISDWFIQLIDKYPDIVNRILHFYIECVVSNPIKAWKSNDEKVAIGYAAKYDRVLFTKCNKSCADYVLEAVKADDAVGIQIRALDLIEKILLQESEVEWSIFRHEVSDVPREVPLLREVLRCLNDRTLTVRRKACQVLILALRQGSPMTKKILQESIRFVQFDDTDVEALAEPSAQQNELRFEKPGIVQYAFSFQGHEQLETEVKNLPQTVYQRFLAADNGLARSAGIALLERLVLVNPLIIYNTNFVKETSLLAVDRLSSVRKSALETIETLLEAYSNCFALICVYCRIWACLMSDEDVALQKLAISSFDRMVLKNIQPLEYSNEAKHFMPWRIISTLLMTQPRAYLQERFAVLLERETIVTPRLVNVIISHLSTSMATDAWGLLLFLSSRITNNMDALIGIFNGLSSYNMKSNQFLALQLITGCLRNFSKPALNQLFQKLLNALRTGSIWLGIISSAVNLLNQIHHLSTSQSPTIASEMPYWQLSLLEDLVEGILSSAQNFQEEYARLQCLLGAYTELIVMVPQDVDNRIVSIVFKYLQECTKLCESEFDSDNERMTNWMIVIAGRLSLRDNHLANSASKLYITILTKNDRPQIINTTLIALNDLGKKHPSILESNFQAILSKLQSKFAMTRVRTFRCVKDVILSGNIKLKGPILISMLAALVDESAEVAREADAFFTRYKKLYNKMLFDHCLKECPFDLNDQAILRGVRTNGNYKSPLKGSQMAKKRRLLYNHIMSSMDENVLLLYFGQLKLLAEKTRDQAFINNPDALIVVQDMLFIMRRICYCTKGMGKEKNSRGEGDNIDEGEDASSEPATPPTRPEAGEATSRGRGRKADMSEEPLKQLERCLRFVEETHRNIVPVMSPELSHNFESFCRAMAMRFPNYIEFAQPAQFWRQFRSSAKAPRASRSKRRRMEEGEVESHEEHESESDSDSELPLDRHKTTPTASRLSQRKTSCDMLVTELIFQPPDW

SEQ ID NO: 33463 - DNA, 2981 bp, DROSOPHILA
tttaagtatcccattatattccatcatttttctcaggcgagaggccttaccaattatgtacatatacatatagtatgattttcttctttttatgagcactccgctttcaacactctttaaaataagcgcattaaatgcaaagctgcaacttccgatttttacgcggtgcacacgaaagcattttgagcctcctgcagccaaactaaaaaccagttggccgtcttaattatgagcaaatgttggccaagttatgcgttccgttcttcagtttcgtactttccccccgacttgcccctcgctgcaggctcacttttcactttagtcggtgggttgtgcgagcttcaagagggcccgcatccaaatcctataattatgtgcaatcaatacttttttggtatcggcttaaagccggaacggatgtgcattggagcgggaatggagttggagtctactcgcaactggaagaagttcaagttgaggatgtgccagttgctaataaagcgatttaagaggtttcattcattcaaaaatggggtagcggaggtattttttaagaaacttacttatatttataaatgtattttggtcgtataactattaagcttgccttttaaatattatataatgttatcagattccctggtgttttaaggaatatttttgaatttcaaacagccataattatcgattgcaaggactttctgattatatcctggtcgatatcgatattcttcatcgacttatcaaaaacaatgccagcgttattgcgcaaaattcaagctagcaaactgattagatattttatttccttcaatacctaaatcactaaatagtaaaataaataaataactgtcttataaaatgggctttgaatggaatcagtggtggaaattctattttgttcgttgcctggcaacgaaaacctcgtttcatagcaaacccagtggcaagtgtcaagaaaacaggtgctcaaaaaaaaggttgatttacagaagacaagatgaaatttattccgctgcacacgacaaacacggcgatcgtgtacaagaactcgctgtgctcctttgcctcgcttttggtcctggccttcattgcgctttctgtgatgctgcccgtgctgctcgtgtccttgctgagtccctattctggaatatcagaatcgagggtgctgtacgagcagccgaatgtcgagttcaactacgagtacatattcgtgggcacaacggatcagggggagtacgaggaggaggaatccctggtcgcttgcagcagcttcagccagttcaatgagcaaatggagagttatacgaatagctgcaccaccactagatattggacagaggatgtggactacgatggcgtaacagatcgggcgcactttcagctggaactgcaggatgtgcccacgcgattggtgagcttcaatctgctggtcttctttgaagctgaactgcagcacaagtgcgatctatcgcctccgtccgtgctggcccatcagttacagcttcctctgcacgctcgcctcagaaatggacacgttcaactgaagggagagctgcagctgaagcaatacgtagagttcacctgtccatttccgggacgcaacatcaagactcagttccgacaggttcaattggatacgaactctaccaacggaaatatagatcagttcaagatggaatcgctgctagcgcaagtcaaggccaatccagcatatttccagctggccgtgcaggagacatactacagagaaacgtcagcgcgcttgcagcctggtctcatcattgacctggagctggacgtgctccaagttgccgctcgctatcatcttagcatttgggaacggcttggacagttctggctgtacttcgcctccttcttcggcatctcgttttacataatgaacaagctgaaggactttctcttcggacgccacatcgttcgctcctgggagatcataccgtggaaaaagctctactgacaccaatcgggcgccattttggagatggacaacttctcgattggcgaataacttaaaggtgactctgcttggttacccaatgcaatttcattgtcagtcaaataataaatataacaaatgtacagagaatttaagaggagagcagaagatcggaaggatccgcctacttatcccggctattggacatcagggctaggttgccaaaggaagatccagcggacgctggctcgggggtggggtcaaatgcacggttgtcctcaaggatgatggtggtgcggggatagtgatccaattgcacgaacagataacgatactccagtttaccagagtcactctgtaaaaagtgaggattagaaaaatgcggcctgggagatattcatcacacatacccttctggactccagctgcacggtggccttgttcctcaagccctgcacatagaactgcatccgcatgtggggctttccattgcgctcgtagctcgagtgcgccacatgctgtctgcgaccgcgcctggatgtctcgccgaatcccttgatgggcgcaccaattgcatcctgtacccgcggatcttcgaccacacgtcttaacgcgtccgcgtatatattgttcgggctttcgctggagaatagctctcggaatatggcaaagaacatcacgcaggtcacccctaatccggcgattataatcgccgtataactggccgtcttagtgttctccttgatcttctcgccaatggggcgcacatccgtcgacacctgggtgttatcctgcgatcgttgaagggatccgccaccatctgcatgaataatatagtaaatatttcagatgtaacctgatgagaagtttgaggcacaaaccgcgcgacgcttcctgtcgcaaatgtggactccagtgcatcgccgccgcacattttaacctggcaaagttggtgggcaacaaattttgccgctgagtgaccaaattgcgcaataaagctagccgtgacatcgttcacgac

SEQ ID NO: 33464 - DNA, 981 bp, DROSOPHILA
atgaaatttattccgctgcacacgacaaacacggcgatcgtgtacaagaactcgctgtgctcctttgcctcgcttttggtcctggccttcattgcgctttctgtgatgctgcccgtgctgctcgtgtccttgctgagtccctattctggaatatcagaatcgagggtgctgtacgagcagccgaatgtcgagttcaactacgagtacatattcgtgggcacaacggatcagggggagtacgaggaggaggaatccctggtcgcttgcagcagcttcagccagttcaatgagcaaatggagagttatacgaatagctgcaccaccactagatattggacagaggatgtggactacgatggcgtaacagatcgggcgcactttcagctggaactgcaggatgtgcccacgcgattggtgagcttcaatctgctggtcttctttgaagctgaactgcagcacaagtgcgatctatcgcctccgtccgtgctggcccatcagttacagcttcctctgcacgctcgcctcagaaatggacacgttcaactgaagggagagctgcagctgaagcaatacgtagagttcacctgtccatttccgggacgcaacatcaagactcagttccgacaggttcaattggatacgaactctaccaacggaaatatagatcagttcaagatggaatcgctgctagcgcaagtcaaggccaatccagcatatttccagctggccgtgcaggagacatactacagagaaacgtcagcgcgcttgcagcctggtctcatcattgacctggagctggacgtgctccaagttgccgctcgctatcatcttagcatttgggaacggcttggacagttctggctgtacttcgcctccttcttcggcatctcgttttacataatgaacaagctgaaggactttctcttcggacgccacatcgttcgctcctgggagatcataccgtggaaaaagctctactga

SEQ ID NO: 33465 - protein, 326 aa, DROSOPHILA
MKFIPLHTTNTAIVYKNSLCSFASLLVLAFIALSVMLPVLLVSLLSPYSGISESRVLYEQPNVEFNYEYIFVGTTDQGEYEEEESLVACSSFSQFNEQMESYTNSCTTTRYWTEDVDYDGVTDRAHFQLELQDVPTRLVSFNLLVFFEAELQHKCDLSPPSVLAHQLQLPLHARLRNGHVQLKGELQLKQYVEFTCPFPGRNIKTQFRQVQLDTNSTNGNIDQFKMESLLAQVKANPAYFQLAVQETYYRETSARLQPGLIIDLELDVLQVAARYHLSIWERLGQFWLYFASFFGISFYIMNKLKDFLFGRHIVRSWEIIPWKKLY

SEQ ID NO: 33466 - DNA, 3702 bp, DROSOPHILA
tcgcgaccagtcagcaaggatgacatactcccaattgcgtctgttgcccatttgggtttcccaccggcacttaacgacgttggaaatcccaacgaaacttaagagtagcgtccagattttggcgccaaaaaaggcggtattattcggattcaacaattgtaaacaaacgcttgcgcggatgccacttggctcttacctctgatttttcgcaggagcgtcttgggtccttcgagtttggagcttcgtcgtgttgccagagctaccaaaccgagtggagggccgagtttttccgctcgagcgccttgggaatagtcgactctgtgaaaatgggactggcaaatcagaaactcgcagacgctcgtggcaaacggttgatttttttctcgtcgctccgaaaaaaggcaaaatagtaggcaacctgaaatccagagttgtagttggggactcttttggccaaaatacaaggaggagaaaaatagaaaataataaagggggcaccgccgttaacgcacacgcaaccgaagccataaaggggctaaacatataaatttgtgtagtaaaagtgaagaaagcgaaagaatcaaagtggaataatagcgagtgtttttcggtttgctagtgtgtttctgagtcggagtttgtgtgtgtgtgtttgtgtgattcctagtgtgtctgttgctgttgccaatgaaaatgcaaattgttggtaacaaatattggtaaaatgcggaggccgtaggaatttgtgcaatgcgagtgcgaagtgaaggagcccgaaactatgcagctaaaaacccgccatcctaccccgcatcgaatcaataataatacaataacccaaacgtattacacggataatggcagcataaaccagttaacatccgacagtgtttccgcctaaccatcgagcacctagctcatcccccctgccaccaacccttcgaaaaatccccatgatcagcgccggattgtggagcagtaactagcgaggcataccaggatgtcgcagccgcgcggagggcgtgccggtgggcgtggcgccggagtgggtcgcaaaaccccctcctcgctgaccggcccaccggatgagtcggctacgcccagcgaacgggctacgcccgccagcaaagcagactccgatcccaaggacgatagctcgagcaatggcgacaagaaggatatggatctttttccagccccaaagccgccgagtgccggcgcctccattcgggacacggcgaacaaggtgctcggattggccatgaaaagcgagtggacgcccatcgaggcggagctcaagaagctggaaaagtatgtggccaatgtgggcgaggatggcaatcacataccgctggccggcgttcacgacatggtgagtactgtacagtgaagtgccgcgaggcgggctttccggctcatttgcctcgttttgtaaaatcaattgcgagccaaagcgggaataggaagcgaaataaatacaggaacaggtccaacactcagcgaaaaatatggtaaattaaatgtatacctagagaaggattatcaatagttttaataaggttattgaaatctttaaaactataatttctatggatcttttagttgtatttatttgaaaaatttccttaagtttttgtgtaatatttccctgagtgtatgcgatgtagaaacgtcgcccttatcaacgtcggcggcattttcccatttctggttgtttaccagccaaaataacgacacaggaactggaggccagaaaacagagcacaccatggtttggccaaaaaacagaggctagcaaggaaaagcgcccaaaaaaaaaaaaaacagagaacagcgaatgttatttgatagctcggcccaaatgttttggctgccaaggcgatggctttggtggcattcggttttgtagctccaagttcctgaagcgtcctgccacaagttgcgccgtatacgctttggggttagccccccgtccgaccgataaactcataaaacatcgaagaattgaagcgcttcgatttcaatttaccataaacgctatgaaacggagaagtcgttgacataaaattaacgttgcaccgctaatgaaatgcggggaggtgtgcggcgaaagggttgaaacttcctggcagggtttttcttttacttttttcctttcctttttttttttgtgtggtactatatatcccaactagatgtgcaggttgtctgctagactagacttacgacgagacggtatttgcataaatatagcttggagttgagctatttttgccttgattatttccgctttcccagaacgggggtctttattcggttcttgacttgatgggcttgctcttgatttcgttttaattacgagccaacgagcttataatatcacatccagcttattagccgaaggattctaatgcaataaagatgaatttaaatggccaagttgcttttcaatgaggtcagcgggttggaaggagagtaccatgtattggtactatgttattgtgtttaaaatgtgcatatattaatattgtattattcttaccttaagcttaagtaatccccatacatttccattgcagaataccggcatgacgccgctgatgtacgcaacgaaggacaataagacggccataatggatcgcatgattgagctgggcgccgatgtgggagcccgcaataatgtgagtcttgagcgggaatagggcaggaataatttaaagcaccttagccaactccccacggtgttggtgccaaatatagaagcggcccagctgtttaagccaacggcggcagcaaaagccgctaaaaatgtgtcaaatcaataaaaaccgcataattaaatcttgagcgggggcgttggtgggtaaactcgtgcacccacttctacgcacgattctcacacgccgcccaccacggtcaatacttcaattcggcaatacctccctgccgcaatgggtcaacttggcaggacttggccaatgggtagttcgcttcatttgactccagttgagtcaagttttccagcacgaatgggaatttcctcaagaaaaagaaatactaacacattgcttttattttcattttataactgctaacaaaaaattataaactcttatttatagaaaactaaattattattgggcacccctcgtttttaagtggcttaaagttcgaacttaactttggtttttaaagaaacagcaagtattactcataataatgtaactcaacaaaagagttttcccaaagagtagagatgtaaggtcatcgctgatgactatcctgatttccccagtaatttaccatcgtgattatggccaattcttttttttttttgatgtcagcaagtgaagtgagccaggttggcatcgcccattaggccaagttgctaacaattggtcgaattcgccgaccagcttgctttgcatgccgcaattacttagcacatttcatttgaagtcgctttcttggctgcccattcacatgtccttacgtatacgcaacgtactttatttcggtgctagcggcgataaaaatccttgacctaattacaaaataattgttgccaaaccagtgcagacatggcgaattgaattaccaaaacaaacacagaaagttcaattttcccttcctccttgaaaatgtttctcctaaaagattaaagagtgtgtagggaaaatgttaaaggtaaatttgcacatg

SEQ ID NO: 33467 - DNA, 495 bp, DROSOPHILA
atgtcgcagccgcgcggagggcgtgccggtgggcgtggcgccggagtgggtcgcaaaaccccctcctcgctgaccggcccaccggatgagtcggctacgcccagcgaacgggctacgcccgccagcaaagcagactccgatcccaaggacgatagctcgagcaatggcgacaagaaggatatggatctttttccagccccaaagccgccgagtgccggcgcctccattcgggacacggcgaacaaggtgctcggattggccatgaaaagcgagtggacgcccatcgaggcggagctcaagaagctggaaaagtatgtggccaatgtgggcgaggatggcaatcacataccgctggccggcgttcacgacatgaataccggcatgacgccgctgatgtacgcaacgaaggacaataagacggccataatggatcgcatgattgagctgggcgccgatgtgggagcccgcaataatgtgagtcttgagcgggaatag

SEQ ID NO: 33468 - protein, 164 aa, DROSOPHILA
MSQPRGGRAGGRGAGVGRKTPSSLTGPPDESATPSERATPASKADSDPKDDSSSNGDKKDMDLFPAPKPPSAGASIRDTANKVLGLAMKSEWTPIEAELKKLEKYVANVGEDGNHIPLAGVHDMNTGMTPLMYATKDNKTAIMDRMIELGADVGARNNVSLERE

SEQ ID NO: 33469 - DNA, 5125 bp, DROSOPHILA
cgttcgacggcgattagaatttaatgtaaatatcgtttcaactggatacgatggtgtatttttccatcataagagttgctggtaagtatgttgcgattcctgttctcggccataatgtcagatgactaaagctgctgttatcggagtgttgcgaacacacagacataatggcccaatcggttgccgggtcataaagatcgagcgcggctatcgcctgcgatttcgatgctgaaaaagccgaaggggttcgccgtttcgcgcggttttaatcgcgcgcaacacgagtgtgtttgtgcttagtatttggcggcacgttttttgatttttattggtttaaaaacagaatttatagtgttcaagtattacttgttcaagtattacttgtcctgtacctctttaattaggttagctggtctaactagtaaagaacattttgagtattcgttgaaataacgttaaaattgactgcctatataaatgataaggtttcattaaattcgaaaagactgattaaaggttattgtgctggctgaatctgttgttgctcaaaatttctacaaatatgcacttagcacacaattcttcgagtcaaacatttaatcatctgttaatacaaaatgtaaatatgattaccctcgaaatatgacgcacaaatttaataacttttccatcttaatctgaatgcatttctaaatggaattgggtgcattttgtatgcaagctgactagaattttaactagcaaatgtttaaagcaataattgaaaagtccaataataccacatagtttagttctaccgccgtatgctatatgtttctttatcttcatgcagccattttgtttccaaacctaaaagtatgcaacattatttgtaatgacactattcaaaagaggtaggttaaaacataatttggaaccaggtttattaaacctaaatattttaacgtctagtgacattaaatcttaatttttatgtatttgtttaaatttataaagttactcatagtctggcagcttttagctctgtttccttggccttgaaagcctccactagcttgaatttctggatcttgcccgaggtggttttagggaatgcatctatggggatcacatatctgggcaccttgaagtgggccagcttgcccttggcataggcctttaaggtctccgcggtgaaggaggcggggtccacgccctcctccaggcgaacataggcgcagacttcttcacccaatcgctcatcaggcactccaatcacctgaaaggaaaagggaatatattatcacaaaataattacttaataaattactaaaaactcacatgcgcctcaatgacctgtggatgggcgtttagaaagtcttcgatctctttggggaatatattttcgccgccacggatgagcatctcctttaggcgacccacaatccgtccatatccattggcctccaggacaaactgatcgcccgtgcgcaaccacctatcattaccgatggtttcctttgttttctcctcatcatcgtggtagcccagcattgtggtatatccgcggacgcacagctctccgggctgtccaaatggcacacacctgccctcggcatccaccaccttggcttcgatgtgatccgtcagatggccaactgagttgaggacaacatcactgctatcgccgggcaaggattggaagatcacagctgtggtttccgtcaggccatagacactatgcaccgcttccacgttgagaacctgtctcacatccttgatcagctgcggcgatacaatggcacctccggtgacggccttcttaatcctgcccagcggcacctgtagcttcttttgcgtgttgaccaaatccacatacatggttggtgtgccatggatcaccgaacacttttcattgacgatggcttgcagcgagtccttgggactgaaaccggcagcgggtaggaccatggtggcacctttggtcagagcagccatgatggagatgatcacaccgaaggcatggaacatgggcacctgaacacagatcctctcgccctccagttcgttgcgattgcccacatggatgccattgttgacgaaattgtgatgggtaagacaggcagccttgggattgccagtggttcccgatgtgaactgaatattgcacgcagactcgggcagaatgctcttctgcattttggccacctcttcgcgctccgatttgctggccaggtccaggaagtcatcgaagcgcagggcacccttcaggctatcgttgctatcaatgattacggatcgcaggtgcggaaacttctcactccggatcttgccagtatccgcatctgagatttccgggcagatatctctcaaaatctcatagtagttctgcgtcttgaaggtctccggcgcaatgatggccttcacattgaccttattcagacagtaggctatttcgggtccctggtaagctggattcaaacccaccgaggtgagacccgctcgagctgctcccatcatgcccaagtaccagtgcaagtagttcggtgcccacagaccaacggcatcacctggctgcaggcccaatttccggaaacccgccgccagcgcatccgcttcctgtagcaaacttttgaagctgtaccgcttgccctcgtgacaggagacaatcgcctccacatccccaaaattcgaagcagatagctccaactgctggccaatggtgcgatataccaagggatccttaccaatatgatgcttatggctgatcaagctgggcatcgaggtggaaatgctgcaaaagaagaaggtaatgccatttattaatataagtaagctaagctggtaggacgaataactaataagataatattctttatatcagaattcttataatcatttgttaaaaacgcatgcctgtgattatttttgaaagattctacgtgtcacaaagctatattttaccatgggcggtttgcgttttcgctcaaggggtttcagatttagttaatgtcgaagctttttcagatgaaaaagcttaacactaatatcgatgcaagtcataggagtttacatttgcaaacatatatgttttatcactcgatagttctgctgacagattatactttcgaattgtaagcgtaactttagccgctgccaagtggataagagggggtgcttcagaagtcgcacaataatattcatttagtagtggccaattgtaaactatgcaatttatatgcttatacatatttgtaaatgtaaacacttgtaatgtgaaaacactggctatctgttgcggcgctatgataatagatcttagacttgcgcttttggcttcggtgctggtcatatacatattatcatcaagcgagtggaaagttctgctcacgatttgcttatcttttgaaattcatctaaattgatacccgataattaaaacgacctgttgctggtctaaatttgagcaccactcacccagccacgccccctttaagtttggttctaaatttgaggacttttacttagccctaatgactaccaattactgtgggcaactgtaccttctatctggaatcagaaatattacgcaacgtggcgtagggggatgtggtatatgtgaggggcatagggggggttgtatataaaactgggcaccccaaacaaaactgcgcaataagatggtggaaacttcccaacccttcttcaccagcagacactgtgaccttggccccccacatctataaggatgggcatccttaaaggtcctgatcctgcctacctgcgcatcgagttgaaggcacatttctgcctgagcatgtatcgggagatggtctgcagcttgctgttcatcttggcacttatcacagttaattgttataaacagctgttttgttttattatattttcataatatgcacaggtacacttttcactaaaaacgactattagttttcaattcagttccgctcggtttctattgtatggcaatctaggaacgaccgcagtccgtcaagttctgaaacaaactgagtgtgggggggtcttctaatcgccgtatggttctgccagctttgctgcctctgtcgacgccttaagtttttttttatatttcattagttttttttttctttatagctagacaagatcgttgccggcgtttgttttgctttcgggttttaacgcttttattttgcttgctttggcagcacgtgtgtgactgtgagttagtattgtgtgtgtgttgtgcttttagttctattatgtttgcttaatctgtagcttttgcagaggcgtgaaaagggaaggggttgtccaacagtaaacaccttcaaataattaattaggaaataattggagagcaaataaagccaatatattgctttacaattatctgacatttataaacattttttaaaaatttgtttagaaactgttaataaaacattttgaaactttgctttattagcgatatttttcgattaaaacaaattgagtgttattcatcttttccctacaaatttgattgactacgcccccagttgtttggagctctcatgtttgaagctttttcgttgtggcgtgattcgcagctttttgatctcccagaaatgttcgctctctttttttttttttttttttttttttttttttaatttttattatttattgaatcttccctttgtgttaagagactaacaataagtgttcaaatcttaatctaacttaattaactttcacttagtgatagtttttttttttcattaatgccctaaaaagtttattgctgggctgggaggtcgttgcggtgcaaccggctttgactgcatactcggattagttttcttgcgaggggatttgtatggatgggcagcttttcgttatacttcgtttttttctcagctattacttcgattactaatttgatttttagggctctgggtatgttttcgtttcgaaggtaccacgggcgctccagtgataattctcagaattcttgcctgtgctcgctgaataatgtctatgttacttctggatgcgttgccccacagctcggagccataagtccagataggttttaagacggagttgtatagaagagctttgaactccagactaagtgaagagcgagcatttatgagccagt

SEQ ID NO: 33470 - DNA, 2076 bp, DROSOPHILA
cttgtctagctataaagaaaaaaaaaactaatgaaatataaaaaaaaacttaaggcgtcgacagaggcagcaaagctggcagaaccatacggcgattagaagacccccccacactcagtttgtttcagaacttgacggactgcggtcgttcctagattgccatacaatagaaaccgagcggaactgaattgaaaactaatagtcgtttttagtgaaaagtgtacctgtgcatattatgaaaatataataaaacaaaacagctgtttataacaattaactgtgataagtgccaagatgaacagcaagctgcagaccatctcccgatacatgctcaggcagaaatgtgccttcaactcgatgcgcagcatttccacctcgatgcccagcttgatcagccataagcatcatattggtaaggatcccttggtatatcgcaccattggccagcagttggagctatctgcttcgaattttggggatgtggaggcgattgtctcctgtcacgagggcaagcggtacagcttcaaaagtttgctacaggaagcggatgcgctggcggcgggtttccggaaattgggcctgcagccaggtgatgccgttggtctgtgggcaccgaactacttgcactggtacttgggcatgatgggagcagctcgagcgggtctcacctcggtgggtttgaatccagcttaccagggacccgaaatagcctactgtctgaataaggtcaatgtgaaggccatcattgcgccggagaccttcaagacgcagaactactatgagattttgagagatatctgcccggaaatctcagatgcggatactggcaagatccggagtgagaagtttccgcacctgcgatccgtaatcattgatagcaacgatagcctgaagggtgccctgcgcttcgatgacttcctggacctggccagcaaatcggagcgcgaagaggtggccaaaatgcagaagagcattctgcccgagtctgcgtgcaatattcagttcacatcgggaaccactggcaatcccaaggctgcctgtcttacccatcacaatttcgtcaacaatggcatccatgtgggcaatcgcaacgaactggagggcgagaggatctgtgttcaggtgcccatgttccatgccttcggtgtgatcatctccatcatggctgctctgaccaaaggtgccaccatggtcctacccgctgccggtttcagtcccaaggactcgctgcaagccatcgtcaatgaaaagtgttcggtgatccatggcacaccaaccatgtatgtggatttggtcaacacgcaaaagaagctacaggtgccgctgggcaggattaagaaggccgtcaccggaggtgccattgtatcgccgcagctgatcaaggatgtgagacaggttctcaacgtggaagcggtgcatagtgtctatggcctgacggaaaccacagctgtgatcttccaatccttgcccggcgatagcagtgatgttgtcctcaactcagttggccatctgacggatcacatcgaagccaaggtggtggatgccgagggcaggtgtgtgccatttggacagcccggagagctgtgcgtccgcggatataccacaatgctgggctaccacgatgatgaggagaaaacaaaggaaaccatcggtaatgataggtggttgcgcacgggcgatcagtttgtcctggaggccaatggatatggacggattgtgggtcgcctaaaggagatgctcatccgtggcggcgaaaatatattccccaaagagatcgaagactttctaaacgcccatccacaggtcattgaggcgcatgtgattggagtgcctgatgagcgattgggtgaagaagtctgcgcctatgttcgcctggaggagggcgtggaccccgcctccttcaccgcggagaccttaaaggcctatgccaagggcaagctggcccacttcaaggtgcccagatatgtgatccccatagatgcattccctaaaaccacctcgggcaagatccagaaattcaagctagtggaggctttcaaggccaaggaaacagagctaaaagctgccagactatga

SEQ ID NO: 33471 - protein, 593 aa, DROSOPHILA
MNSKLQTISRYMLRQKCAFNSMRSISTSMPSLISHKHHIGKDPLVYRTIGQQLELSASNFGDVEAIVSCHEGKRYSFKSLLQEADALAAGFRKLGLQPGDAVGLWAPNYLHWYLGMMGAARAGLTSVGLNPAYQGPEIAYCLNKVNVKAIIAPETFKTQNYYEILRDICPEISDADTGKIRSEKFPHLRSVIIDSNDSLKGALRFDDFLDLASKSEREEVAKMQKSILPESACNIQFTSGTTGNPKAACLTHHNFVNNGIHVGNRNELEGERICVQVPMFHAFGVIISIMAALTKGATMVLPAAGFSPKDSLQAIVNEKCSVIHGTPTMYVDLVNTQKKLQVPLGRIKKAVTGGAIVSPQLIKDVRQVLNVEAVHSVYGLTETTAVIFQSLPGDSSDVVLNSVGHLTDHIEAKVVDAEGRCVPFGQPGELCVRGYTTMLGYHDDEEKTKETIGNDRWLRTGDQFVLEANGYGRIVGRLKEMLIRGGENIFPKEIEDFLNAHPQVIEAHVIGVPDERLGEEVCAYVRLEEGVDPASFTAETLKAYAKGKLAHFKVPRYVIPIDAFPKTTSGKIQKFKLVEAFKAKETELKAARL

SEQ ID NO: 33472 - DNA, 9186 bp, DROSOPHILA
gtttgaaagccaagcctgcactatgaatcctacaatttatttgaggtaagtacacgtatttcactttaaataagtatcttagtattttctatttcttttagctgccttatggtcttctcagtgtttctgctgggaaaggtaaatgctgagaacgaagatgagttcgtcacagaaaaacagcgcctatttagtgtgtatggtgattcttcggttgatgaggccaccaaataccggaacatcgacagcctggtcactttctacgataagtacttcactcgacttcagttgaaaccggacttgaacacacgcgcccatgatctcttgaggcgttacaaggaggaaaatgctcgtgtggtcttggtggacggtactcccgcacaaggcggattctggttgccactggtgaagctactcattgtccagctgggcgtcgaaattgcctctgagggagtcaagcgtgctattgaatcctaatcccttccattaggaatcaaatcaaattggatgtttattcaatatcatatgtaaaaatttaaataaatctttttgagcaaagaaattatactttccaacccattccaataaatatatacttccaatttgtggtttggttatatattttatacgtagtatttacaaattaatttatttgctgcttgcgatatatgaaaataccaatgtacaatgtttatactcgtaattgaatcgttagctaaacacttagctaaaatgtgagtgggtgaggttgccttcgtcaccaggttaaaattcgaaaaacataaacctgctgtgaaaaatgcatatatacttaaactctagatacgtcgatccttaaatttctgtacagttttgggatttgcgatcgggatagagaccacatctatggttaatgctaaacaactgactcttaagtaagctcaatacgattaagcttaggcgattacaactaggttaccaactagacatagaaacgctagccatgcgcctggaatccgaattcctaaacgatctgcacggcggcatgtggtttctcgatgaggctactctgtgcctccttgtccttctccgcattccggccgattgagacgtgctccggttttagatagtaatgcggcggcggaggctgcgatgtggcttgaaggcccgccttcttccgacgctcgcggaggaagtgcagtcgcacatagttaatgggtatatcgacgctatcggcgcccacgccctcggcgtcgatgaacacgccgcgcaccaggatggaattggagcacttgagggcagcgaggagcaggaaaggaacgatatgtgtcagccagaagctcagcagcttgttatctgaaggatatagaaacatattaatatgattacattactacagccccgaataaaccatcttacctggatacagatacacatccagcagattccagatgccgcgccaggcgttcacagctccaaagaaagtcattagatagtagatgtcgcatatgatcagcttgaggattccgctgatccgacgacaaacgtacctcatcagtgggtgaataaggaaggtcacaaaaaccgtcagatatccaatgagctaaaacaagaaaaaggacttcaagtactgtttaagccgaaggactatcagagatccctaccagcgatccccaggccgatttggccttgtccgccgggaacagcagcaggtcaaagattccccagacgccgcgccaagcgatgaccaccaggctgccgatcacaaagaccgagaagagggtgtccaaaatgtaaaggccaggttgatgaaaaccctgaagaattccggtgttaggaaatccaatctactatacttcagtttggcaaacagcttacgggtattttgaacatggtgtccacctcaaagtagtcactcttgtgatccatggtaacggtgtagggagctgctccgaggttccgcagagtgcgtgtggctaccagaaagatgagcgcgatggccgtgaccacggacacaatgatcagagagtccacactggtcagccaatcgcagagcagccaggcaccacgccacatattcacgcaaacgatgccgaatacggccgtatagagacgcgatacggcgtagtatgtgagtcgcctccggtccggatggatgtgctccttgaagaagttctgtgtgactgtgaagaagaagtgccccagtccgccgatcagaaagctggccatcgcagacagcggcaagctgccgggaaacaggtagacgaacatcagttcccaggtgccacgccagtaggcgatcacacagggagccaccaccaggcaggacatcatcatgtccagcagctcgagcagcagctcgtggagatcccggcgcggcgtctccgcctccaagcgcttctcgcaggcgggtgagtgtgtggcatgtgcgggtggcaggtgcactggacgcggatgcgtgtgtggatggaggtgctgcaggagctgctgatccgacacggataccgatccatggcaatgagatttttgcggcctgccggccgtcaaactgcccttgtccgtgggcaacatctcgggtttattgggattttacaggcttttaaggtctcctcctcctcctcctcctcctccttctcctgcgcctcccttctcctctgttaatttccttcaattatgggcaattatcactccggatatttcggctgggagagctcctgttcgctgctcgtcggcggctcggttgtttttgaaatggtcaggtaactaaatgcattccgcaaccggtgtgctctgcaaccgtcaccgtcgctgcatcgccgctgcggtgataataatctggcactgataattaagtcgtctatctgcgaacccctctcgatctctccagcgtctggccgcagttgcataatccgcactagcattcgcatccactgtcacatccacatccacagccacatccacatccacgttcacgttcacgtcgaggttggcgttcgccgtctggaatctgggtgagttgtatgtattaaagaacaatcatcaagcccggctccttatcactatttccaccgactcaaatgccggttatcaagctctgctccgggcaagacattcaactagggtcctaataagtactttatattgtagtctcttttttctttcctagtttatagacctagcagctgacgtgattgtgggcttatcaaaatccaacgctttccagtattcaccgacatttgcaagtgaaccttatgcactatagtagtgctctaagttttggcattaaggcaggcttactataaaatctaacagataaccccattgtcttggaaagctgcgcacattaattgaatcttttattattaggtggttttattagtgagctagcagattatagcaaaatttttagtttgatttacagaacattaacattgacgcttagaaacgcaatgttagtttttaggtagtaactacgaacacctgaatgaaactttcccatgtgactcatcaacttcaccatcaaatgtcatgggaatcctttatgaggggtgctaaaataagatccatctcaacaaccagatatgaaaagccagcacacttgtttgtttgcccatgtcagatgtcccagattttatggagatcacctgagagagccgggctcttttactgatatctcaacgtcaacgtgacaattgtgcgttgagtggcctctccacgcggcacttaagtcgccccctcggacttatctcaagtgacttaatagatccaatttagtggctttgattaaacgcaaaatgccagcgaaacaaaaagcgaaagtgatgtccaacacacgacagggcatcgaaagtgtcgcgaggtgtcttgaacttgtgccacttgaacttgccacttgagatgggcaggtcaggggcttcagttactctcaaatggattataaatacattcgctgaactacagggttttttccctttaaaagtacttaaagagcaatcaaatgggaatttttaatgtcaagatccaacattttctaactttcagaatattttaagtaatataaataaataaatataaataagcagtttcgtgtgttgttattctttccctaaatatatatgctctctaatgaatgctacgctgattccatttatagtcttttgagttttcaacaattatgcactgacagtgactaattagcaaaagtccggctcgccagccccttgaaattaatgcaggatgtttgtgattttcgtgttttgcttgccgttcgtctgcggcggcaacgcggcgtatgcgcgataattaaacacacgacttgcatggggccgccgtcgaaggtccaaaagcggaattttcgtcggatccactgaggctactgctgccatcgctggctgtttgggtcaagctcattcgcatttaaagcggctggctaaatagacgacccactgggcggctcattgcgcccagcaagacttcctcgttttgggggattcagagattgatggagggatgcttgtaaattgagatcagggatctgtcgcaatccggggtattggggaaatggggaggggggggggggtggggtggactgggaattttcaagttcaaactccccaagtgggccaagtgacctgccgatgcgatgcgatgcaaatgcacattgtactccaattatgcgagataattgacaaagaacgggtgacaattcaaatgcaaaattggacactgcgactgattcttaattttcgcaaggctctcgacaagttccagcccccgacttacgacttggctgccagctaattagttttgccaacgcaaacaagctgcaaatataacgcgaactctatttgttactgggcaaagatatataagatatatagataactggaggggctccgccaaacagtcaaatcccacgaaatgccgcattttatttggatattgttaagtgtttatgatcttcaatgataatttgcctttgactaattcaaagcgttttcaggtgcgataatctctagagtagatctccttacagctcgccttttgttcagtatttgctttacccattatcagcttctaagtgctctttttatttttgcctgcttttctcaagttgaataatcgcagctgatcgagctaatttataagtttgacggccgcacaattacttcgagattgaacaaacatttatgtatgttctagaggcctttatttgtaacacttcaactttaaatatagctaagtaaaaattgtattctagagtcttaaatacataactatttttatttgaatagtaatgaatatttgctataaattcgtttacttatttcaagtaacaattcgtttggcaacactgcgcatgagtgattaaagcaaatgcttttggttttagttttaagatatgctaatcaaaatatgtaatctttttttatcggttattttctatcaattatcgttttataaagactgcaaacaagattaaaaagggatcttaatcggtttgttttcaatttcccttatttcaaagtgaaatcgatttgaagtgaaattttacaatattttcggtgtcaagagcaatattacgaaatttggcgattagattcgaactgacttacttcggaatcgttgtcccttatcagttatcgatttacaaatattacaaaattatatatttcgagcgagcggaaaatgcgtggacagcgataaacaaataacaaacgcgaccacacacagacacacacactggcaaaagcacactatcacactcacagctacgttggactacaataaatttgtgcaagaacaaaaacatgggattaccgtttaaaattagcagagcttgctgttgctgattttattattattattattactttttgctgctgggtgcgtaagtcgccagtgcgaaagagggagatgcagcctttattcagttgccatcacttttacaacacactcacaaacacacacaccggaagtgatcgggttttatcgaattgcttcgattactatttgcgttcggcttcgattcttcgttttcgatttcgttcgattgcgaccgtttcgaccgttagacgttggccgttgatgttgatgctcgaatgcgcgtacgcgacttctggcgctactatatatatgcctatacccgtagaaattggctaagctcgcccgctcactcacacacacacacagacactcgcaggcacccacaaatactgacgcagttgcaatctagtttatttgtacggtggtttgaactcggcggactgatcgctctgatcgttctgatcgctcgtcagtcgccggtggccgccgctactaaactggacaactgtggttccggggatttgaaactgcgtctgaattgggtctccgccgcgaactgagtgccccaaaagcccccagctcaaaaatcgccacagctttgcacccatttccccttttatcgagtcgaaatctgagcttgagcatttttaactttggcgaaaatgagattttcttcttttgcccgggaaaagcctactactttccgattttccagatgttgtgaaaccattacgaaaattttttcttctaatactttgaaatggtttgaatctgtccattaagagctttcttattagcggcaagctttattcacggaatgtggcatcactttcattttgcattaggatcacttttaaacagctacagtattctttagttacaaaatattgactataacacgtagaatatcagttaatttatgaattcataaatactaatttgaaattttcacctatgaatttcaatttctttagagagctgtgtaaacgctttgttgacaggtacctttttcgcttaattatgaatcaattatttaatgatacgtgtattaaaaaactattacgtagcgatatacaatgtttcaagtgccatttattataactggtggcactaatacgacacaaataagcatggaattgatttagttaataaagtgtgagaaatagtttatatagttggaaaacttggtgaaatgattttgcgcattaattttagcgaaatctcatgagaatgccctaaagcttcattagtaggtacatttttgatttgaattataattttaccagaatttccgtaataattcgcacctaataaactcataaaaacgttgcaagtgcaacgagtgcaaatctataaatatttaattacgcctgagaactggaaaactggctaacacagttatagccactttcccttcgaatcggattgttgtaattaatgcgtgaataattttagataacgaaattaagtacattatgcaaacaaataaattcaattagccactgtttgacaggttaagatttacagtgcgattgagaaaaaaatttccttcccttcaccacataaaatatgccactgccatgacttggatttttgattagatagccgttcttaaatcgcaatcttaatgtgctctaaaatcataaagttctaccgtgatttcctttgtctaattgttagcacccgccaaagaaattaaaagataatggttaatttaatggcacttgtgttcttcattagaccattggtgaaaatcataatgcttatttattgtttaaccttgaaatcggctgatttggattgttttgccaaaataaagtcgagtgcttgtctggatctataactccgagcccatatttttgcccttatcaagcacaaacttaaaggaaacccataaaactcttaacttttcaaaaagttttggggaatttcgaaacacttagggtaaaaataaaagtagttatatattagcctttaacttttcccgcattttttagactttttcttgacacttcactgcttatgctttttcatataaaaacaattgaactaaatgattgcttaattttagcttatcttaccagtttccagataggcactatcaaaattaaaaaaaaaataaagtcgagacactatgatacgtatttaaagccgatcacaacattactaacctacgacaaaacgaaactagattcaactgaagatccgattcgcagatctcaaagatattccaatgccatttcaagtgacccgtgtttttttcggtcagagctatgcaaatcagaccaaaaatcaccgagtcaccgatttgctggattatttattaaattcattaattagtccaagctatgtcaaatatttacatatgtctcctccgattcgagcgctcgatgatcacaaactgtgaaccgttgccaaatatttggacctctcaagcgcccaacatcgatggcgattcgttatcgccagcccaagtgataagaccaaatcgagaggaaggtatatataaatacgagtccattccacacccttaagttgtttgactggcctattcccgttcgacggcgattagaatttaatgtaaatatcgtttcaactggatacgatggtgtatttttccatcataagagttgctggtaagtatgttgcgattcctgttctcggccataatgtcagatgactaaagctgctgttatcggagtgttgcgaacacacagacataatggcccaatcggttgccgggtcataaagatcgagcgcggctatcgcctgcgatttcgatgctgaaaaagccgaaggggttcgccgtttcgcgcggttttaatcgcgcgcaacacgagtgtgtttgtgcttagtatttggcggcacgttttttgatttttattggtttaaaaacagaatttatagtgttcaagtattacttgttcaagtattacttgtcctgtacctctttaattaggttagctggtctaactagtaaagaacattttgagtattcgttgaaataacgttaaaattgactgcctatataaatgataaggtttcattaaattcgaaaagactgattaaaggttattgtgctggctgaatctgttgttgctcaaaatttctacaaatatgcacttagcacacaattcttcgagtcaaacatttaatcatctgttaatacaaaatgtaaatatgattaccctcgaaatatgacgcacaaatttaataacttttccatcttaatctgaatgcatttctaaatggaattgggtgcattttgtatgcaagctgactagaattttaactagcaaatgtttaaagcaataattgaaaagtccaataataccacatagtttagttctaccgccgtatgctatatgtttctttatcttcatg

SEQ ID NO: 33473 - DNA, 2011 bp, DROSOPHILA
ctcgaatcggaggagacatatgtaaatatttgacatagcttggactaattaatgaatttaataaataatccagcaaatcggtgactcggtgatttttggtctgatttgcatagctctgaccgaaaaaaacacgggtcacttgaaatggcattggaatatctttgagatctgcgaatcggatcttcagttgaatctagtttcgttttgtcgtagattccagacggcgaacgccaacctcgacgtgaacgtgaacgtggatgtggatgtggctgtggatgtggatgtgacagtggatgcgaatgctagtgcggattatgcaactgcggccagacgctggagagatcgagaggggttcgcagatagacgacttaattatcagtgccagattattatcaccgcagcggcgatgcagcgacggtgacggttgcagagcacaccggttgcggaatgcatttagttacctgaccatttcaaaaacaaccgagccgccgacgagcagcgaacaggagctctcccagccgaaatatccggagtgataattgcccataattgaaggaaattaacagaggagaagggaggcgcaggagaaggaggaggaggaggaggaggaggagaccttaaaagcctgtaaaatcccaataaacccgagatgttgcccacggacaagggcagtttgacggccggcaggccgcaaaaatctcattgccatggatcggtatccgtgtcggatcagcagctcctgcagcacctccatccacacacgcatccgcgtccagtgcacctgccacccgcacatgccacacactcacccgcctgcgagaagcgcttggaggcggagacgccgcgccgggatctccacgagctgctgctcgagctgctggacatgatgatgtcctgcctggtggtggctccctgtgtgatcgcctactggcgtggcacctgggaactgatgttcgtctacctgtttcccggcagcttgccgctgtctgcgatggccagctttctgatcggcggactggggcacttcttcttcacagtcacacagaacttcttcaaggagcacatccatccggaccggaggcgactcacatactacgccgtatcgcgtctctatacggccgtattcggcatcgtttgcgtgaatatgtggcgtggtgcctggctgctctgcgattggctgaccagtgtggactctctgatcattgtgtccgtggtcacggccatcgcgctcatctttctggtagccacacgcactctgcggaacctcggagcagctccctacaccgttaccatggatcacaagagtgactactttgaggtggacaccatgttcaaaatacccggttttcatcaacctggcctttacattttggacaccctcttctcggtctttgtgatcggcagcctggtggtcatcgcttggcgcggcgtctggggaatctttgacctgctgctgttcccggcggacaaggccaaatcggcctggggatcgctgctcattggatatctgacggtttttgtgaccttccttattcacccactgatgaggtacgtttgtcgtcggatcagcggaatcctcaagctgatcatatgcgacatctactatctaatgactttctttggagctgtgaacgcctggcgcggcatctggaatctgctggatgtgtatctgtatccagataacaagctgctgagcttctggctgacacatatcgttcctttcctgctcctcgctgccctcaagtgctccaattccatcctggtgcgcggcgtgttcatcgacgccgagggcgtgggcgccgatagcgtcgatatacccattaactatgtgcgactgcacttcctccgcgagcgtcggaagaaggcgggccttcaagccacatcgcagcctccgccgccgcattactatctaaaaccggagcacgtctcaatcggccggaatgcggagaaggacaaggaggcacagagtagcctcatcgagaaaccacatgccgccgtgcagatcgtttag

SEQ ID NO: 33474 - protein, 453 aa, DROSOPHILA; identical to SEQ ID NO: 26304

SEQ ID NO: 33475 - DNA, 2587 bp, DROSOPHILA
ttattacttaacacacttttctcttaattctgcgtatttagcctcaaaatcattttattattaaatgaaatgattctgtcaaattgtctaggagtgctttttaatatatatttttattatttattttccaaagatcaatcgataatttcgcgaatgctgccaccttcttcgaataaacgatagtattgaatagaatttgttttaggttccatctctatctcagattctgaatttgcaaatgtgagtacataacaaggtttttctttaaaaaacacggttcaaggggttttggaacttaaaaaaagtaattaaatatcataccagttggccatatcaactccataaatttctggggagaattcattagttgctatgcgtttaatggcagctgcctttgagcaccttacgtaactaccgagcaatataattgatttttgtgattttcattcttttcagcgacatggccaacactccagccacctcctctgccggacccgtgctccgtggcctccacaatgccaccatcaagcgcaacctggccgtttccctgggcctgaccgccgtggtgaccatcgcctacaaaattctggtcaacgatcccaagaaggccgcctacgccgacttctactcgtaaatatagcttaactatgccacatgaatgtcatcatctgatctgttttatccattatccctgcaggaagtacgatgccaacaagtccttcgagcgcatgaaggccgccggtcgtttccagtcctgctaggctatgttatcccaaaacacaagtagtctaagtcaaatgatgttgtagaacaagagttgcgcttctgtattgaaaactaaatagatttcagtctacgtacgtgcacgaaggcgttttaatttagagctatcttgtattgccagcaaaagtaaatgtgaaggcaaattatgattaaattctttattatttactcgtatttacaaacttagccaagtaatgcacaaaacaaacacacaaaactataaggccacacaaaccggaccacatctaaaacctaatggcaaagtccttgtagtccagtcggctgagattgccctggttccggacctcacagcgatcgatttggcagccgggtgagccctcagtggacagccaggtgatcctaagagtagatttaatcagaaaatattagcatggagagtgtaaactattccggtttactcacatcttgtccacctcctccttgggcccctgcatcttgcccacaatggtgccctgtttgctgttcttcacccagccagtgattcccgccttggtgcagcgatcgcgggtgtctttcgtgagattcaggcctgccggtcgaaaaaagcaatggtatatgttttatatagtctctagtgcatgtggaatggggcgtgaaacaaagccaaggacagtttggggccccaaagtaactagctactgagggtttatttttaggcaaccattcgagagagctatgctatgcttgattcccgattcctatttcccatgaaaccacaccttgtacatgtccatagacctcgaaatccagcgtcaccagcagtcggatatccggaatgcccatttcgatcgatttcgatttggttatgtaaatttggcagcaaactggtcgttattttagaatttcctgattttatcactttactcgcacttgaaaaagccctgcaacctggtttatattctatgcagacttgaatccccaattaagcatatatattttttgaaaattattttactcgaagcgattttttccgccgcgatcgctagcttgattttcaacaaaccgtcgcaaatttaaaactaaaatgccaagtagcatatcaattggtttctattttgcgttttcgattttgtatttgcgtatttattttagccgcacactgcaatctgcctcttgctatatgttcttgttgttattctagaaaagaaaatacaaatacgatgtgggaatctttcgggacggtcacagatagttgattctggtggtcagtatctgatttttggatacgctacaggggtttttcgagaaaaatattaactaattttaatttaattaactaatctatatataaatatatatactatactatactatactataaatttcttgaatatattactatttacaaattatttttaaaaatcctcgaaagttagcagggcttagttccagaaatgcccgacaggtggccattcggtactttattagatatatttaagactgaattttgctaaatttggctatatatttgtgcatttttgttgcacaaacttaaaacttattgacccaaaacaatctatagactgtgtttctgagaccccctcgatttcgctttctatataatgcacctataagaaatgtgaggaatgacaagttcatagcaggcgcataagatgggccctgagacttttataagatcagacgacaagtgcacttcattgtattcttcttcgcagaaagggaaatttatttatgcaatgagaattgcactatatacaataatattgcccttctataggaattcgtccgtgtagataagcaaagcggaaaacagaacatagat

SEQ ID NO: 33476 - DNA, 334 bp, DROSOPHILA
atgggcattccggatatccgactgctggtgacgctggatttcgaggtctatggacatgtacaaggcctgaatctcacgaaagacacccgcgatcgctgcaccaaggcgggaatcactggctgggtgaagaacagcaaacagggcaccattgtgggcaagatgcaggggcccaaggaggaggtggacaagatgatcacctggctgtccactgagggctcacccggctgccaaatcgatcgctgtgaggtccggaaccagggcaatctcagccgactggactacaaggactttgccattaggttttagatgtggtccggtttgtgtggccttatag

SEQ ID NO: 33477 - protein, 101 aa, DROSOPHILA
MGIPDIRLLVTLDFEVYGHVQGLNLTKDTRDRCTKAGITGWVKNSKQGTIVGKMQGPKEEVDKMITWLSTEGSPGCQIDRCEVRNQGNLSRLDYKDFAIRF

SEQ ID NO: 33478 - DNA, 9718 bp, DROSOPHILA
ggtgttttgtgttttcattttttctggtgcttggcctttttacatttttgactaacttattgcataggtttccatgtgcatatattgttggtaaagaattcgcgttaagattactgtccttagcctaaagcatttaaaactaaaaaacaaattttcgaaacaacgcaagcttacggaaactaatacgctatatatatatatatatttatatatatctgtatgtactgtactgtattgtattcgtatgttaaaggttacaaaaatataaaacctaatgttaacgtgtggtctgctctgatctgctcgatccaacggatcagcttcttatagactttcgactgggcgcagcgcttaaaagtaggacaacctaatgctagaaatgtgttcatgttgcatcgtgaagtagaagtatccaaatatttacagagcggtccatggaaataggatttttcattttcattttcaaatttcaaattaaactatgcatgcgtgagagtttggagatgtttgttttttcagtttcggccaactatattctatgttagtgtttatgggagcttctcaaatacgttactcaactaatttgttcaaatttcatcttctgagctatacattaaattgcctgtttcacatgactagcaaatcatttccaatgggtggatttttttggggagtaatagcagtgccagatgagaaggggtgattggcggataagctcggactggggggcagaaaacaaagtgttaacaaaggcgtaaatcggcgcttgcaaccgtctgtctgcagtatgtgtgtatgggtgggtgtttgtgtgtatgtgtgagagagtgtgtctgggtgtgatgttgctcgctatgagacgcaacattattgcaacttgtggctaccactaactatacaaaataatcctcaacggaaactagggctaagaactacaaacgaaagcgttcggtatcagtgcgtgtgatatatacaagtagccgtccgtaatccgactccactacgccagctgcggtgagctgctactggcggagcgctgctcatccgccgttgtcgcctcgctggcgaactcctgaaaactcaatcccaaatcgttgctgagctgtacaatgttgagtacgtcgccggcatcgcgccatgactgttggtgcttggtcgccatgctgctgacgcctcctcctcctccgcgtgcgctaccactgtcgtcctcctcgctgaggatgttgttcaggcacagattgaactcatcgtagtcgacaaagctggcgcagtccaaggccgtggcattgtccagctccggcatcagcacctcatccacctcaacatccgcggcactgctgctactgtggtaggacagcaaatgatcggcctcctccatgtaaccaccggctgctcgcgccagattctcatattcggccatctcatcaccgtcctcgtcctgcgcctgggctaaaggaaagctgctgctgctgatctccagctgttgctgctgctgctgatgcggctgctgttgctgctcaaagtctttgaatagctccagcagatcgtcttcgtgtgcatcgctcggatggttcaagcctttagccaaggcgcaaaactctggtcacttgtaatcacgcgacgttcttctccggcgtccctcggtcaacatggactcgccaatgactacaaagacgaatattattagctaagttcaaccaaagtttatacaatatattctaacctgcactgcgggtctttcgtctagcttccgcgacgctctccacattgccggcgttgttggcacccactgctgctcccgccttgccagttgttcctttcggctctgccgcggcggctgctgctgcagcagctgcggctgcattgctgcgactatagatgatcttgttggccgccgcactggcccgcacgcttctccgggtgccgatcttctcgtcagtgggcgagctggccgagttgttattagtggtactggcagccgcagcggtggctccacgtgttgcatgaaccacacttgtgccgctgttaacttggctggtggtcaccacagctccgcctggcattgttgtcgtcgtcactgaggagggcacaacactggcattgttggcagtgctgctgttgtgattgttgttcgcagcggaggtagcaccaactggcgcctgagcttttcccgatcgtggtgttccaagggcaggtgtggaagagggggcatggttgccggcagtttctgttggaagtaaaaaacatttattgattattcatataataatttgcaagataaacggatcaaagatcacttactgttctgcggtggttgtagctgctgagcatttcgtcgcgtcacatgcttctccactccaactgctgcggcatcggcagcttctacctgggcctgcttggagttgcgcaccttgccggccacctcgatcagcggctcatccgaatcggaggactcgatttcaaccttttttggcaatcccgcgccggcattgtgttcagcagctgtttctgttgcgttgttattggaggtggtgccactgcttatcctcggtcgctttatgctattctcgcccaggtcggcaccatcattactactgccacactcggattcctggcgtcttcgcttattgttattgttgttgtggttcggagtcggtgtgaccactcgaggactggcggtggaggaggctcgggatagactcttaacggtggtagacgcgttggctgcagttgccgctgttgttgaaacaccggtgacagttgtgggatcaggacttgctttctgcgcatccagcggactctccagacgactgctggctcgcgtccttattctcggcgtctcaccgtccacctgagcaggtatttctatcgaaatgggctgcagtgaggctgaagaagactcgctcggaggcttttcctgcaacttctcctccgacttgggctcgactttcggctcaagctttacctccactttggcttccactttaagcccgctggccatcggtttaatcaccggctctttcttaatggtgagcagcggtggcatctcctccagcttcaccttgatcgctggtggcttgctctctgtgagtttcttgatgagatcatcgtgttcgagtatatggtgttcgccattcaacttgatgctacctatgctacttgtgtttgtggatgctgtggacacaactgttgcaaccgtcgctgctggcagtgagctctccaggctatttagaaagccaccacccgccgcactagcacattcgcttgtctccttaatcatcgaggaaacaatatcctcgagatcatccggaaagtccccctccatcttcgccagcgccttctctatctcatcgtcagcctgctgtttttgctgctgttgcagggatggcgctacagtgggtgttgttcctgcctgcgttgaggtgggagcaatcactggtgctatcaccgccgcggatgtggtgattgtgacgattgcgttcgtctgctgctgctgctgctgcaccatcgtcaccgccgccttgctcacttgaattggactgctggacgagagttgatgaggactcttctcggatagggcatccatggactcaatgccgctgtcctcgccaccgccattgtttccatgaccgggtgtcccacttccattgctggcgggcgagttgcgcagcgtgctgggcaacgcagcaggcgatgaggttgaggtagaggtggtgattatggacgcggaggaggctgtggatacggaggacaaggtcgacagggcggcggaagaggagttcactgtggccaccaccacgttattgaccgtagtcatgggcggcatggccactggcaactttctatcacagatcagctgagttgtttgcgtagtgggcgtcgacgatgtcgttagtgttgctgtggctgctgctgctacgactactggggatgggttaatgctaggggcctgctctgccgtgacctgcggtgtgacctttgttatctccacacgcttcagggtcgtcgcactgggcaacatggttacggccgccgccagttgtcgctgctgttgctgctgctgttgttgctgctgctgttgctgctgttgttgctgctgctgttgttgcttctgcagctgcagctgttgcacggctgtgatgtatggcggcggcttatggttttttgtcatcggcttgccacccacgatgggtgttatggtggccgcagtcttaatcggattcttcatcgtcaacagccgattgttgttattcccgctgttcacattattgttgttattgttgctgttgatggcacttagggtaatgctgctgggcaacgaggtggctatcttgctcagctgctgctgctgcagggtggtggacgtgggcgttgttcctgtgttggtggaacccacaatcagttgaggatcattgagggattgggcctgcgcttgagcctgcgccttgtgcgcctccacaatggcactgatcgttagaccattcttgcccgccacaatagtggtagtcttcgtcgttgtggctacgccgccttgcaattgttgtggcaattgtggcgacgccactgtcgccgtcgtcttttggatcagtatgggcaatccgttgacatgtggcggtggcgttagtttggcttgcttgctttctgcaggatccatgagcagttgctgtggtggctgatcgctgtagctgcgcttcaattgtcgctcatcaatgctcgcctcctggttctgacccttctttcgatcctttcgcgtgttcttcaccaccacatggttctttccacgcaaacggatttgcagtggaggaacacgtggttcgttgggtcccgggacattttgctgttgctgttgttgctgttgttgctgctgctgaaagttactatagaccggatgatgttgctgttgctgttggatcggctgctgctgctgctgttgtggctgttgttgctgcagctgagcaggctgttgctgaagctgagaagtttgttgctgctgctgatgttgctgttggcttatctgcatctgaggttgctgcatctgttgctgctgctgctgttgttgttgctgctgttgttgttgttgttgcgtcggcagagccaatagttgagtctgcatgggcaactgttgcatgtgattattcacaacaatggtctgctgctgctgctgattgataataatctgtccctcgtagccggctcccgctgccggcgtagtctccaccttttccagttttaatcgcagctttatcttctcctcagccgccttcgtcttgacattgcccttcgcccgctcgcgcttctgttttggtgcagccgtgggatccttggccttgcgctccttgactccctgttgcagcttgccgcgcagcagatttggcttggccttcttgctgggcgctccacctgcattggcgttcaccgattggggcgagttcaagccaatcaaaggcgaactattgctagaacgtggcgaattgtcacccgcactgaaattgctatggttcgccttcgagaccggcgttttcctagccctgctcgtggctgatttgttcgatgccagggagtcgcgtgatctttcctgatcactacttatacccatgggatgctgctgcgcggaattggagtcctcctcggaaaacagattggtgggcagaagcatgtcgttggcgggattgaaattgaaactgcctaatccactgtggctgttacggaattgcggctgggcagtttcctcttcagcctcagtctcgctatcgtcgctggccattggttccatgtcgccggtatgtggattaatgataaattgcttctggggaggtctctgtggctgctgcggatgctggacttgcagttgtgactgctgttgctgctgctggcgctggacgatctgcaactgttgttgttgctgctgctgctgctgttgctgcagttgcagttgtcgttgcaaatgttgctgctggcgctgttgcatctgcggcaattgttgctgtctctgctgctgttgcatcatcaattgttgctgcatctgttgttgctgttgtggttgctgctggtacggcatttgcatcatttgcgccgtctgctgttgaggctgcatcgctgcttgttgctgttgttgttgctgctgctgttccagtggcgcttcttgcaacgtgttgagcgcatccctcatatcaaccgccgatagattgtcctcgatcagatccaagtccagatccttggcgtcttgcaggagagattcgagctcgttcttatcttccaaactaagcgtagagtccaaatcacagtttagtgtgggcagcagggcgtccaaatcgtttgtggtgagggtatccagaacggaaagcgagatcagagaatcgacctgaccttgagtctgacctgcaacctgtggctgctgaacatgactttgttgttgctgctgctgctgcgtcggcagcgcaggtggcggcaactgttgctgttgtggctgctgctgctgctgttgcggctgtcccggcagactgacttgctgctgctgttgctgaagattgtactgcatctggtaacgcgtgaattcctgaaaactgctcttggtggccgagtccatcggcttattgatcccggccagcggccagcgagagttgactgccgcctgattgtaatctggtggtggagctgcaggtacatgttgattggctggcatgagctgtccagccatttcgctgggagcagtgggtccaggtgttgccgcaggcgacaccatctgcggctgctgctgctgttgcgcctgatgattggacatcagcggactgtgcatcgaatggtggctggaggcgggcgagagggcaggtccaaggggcgaagcgccgctcatgaattgctgttggggtgacgcttgcggcatggacaggcccatgagacgctgctgctgctgctgttgcggatgaggcggcggaggagccaacggcagtccgccgggtctcagttgatgtcttatctgttgctgttgcatgggacccatgcccatgttgttgaagcaatctgttaggatgagaaaaaccgaattagaataaaaagtctattcgtgccttgacaactttgatgggcatcaaaatggttagtgacatcaggtcgtaaagacaataaagcaacgcttaccaggcgcaggctgaaactgttgctgtggttgctgctgtccttgtaattgctgctgcggttgcatgaatcgcatctgctgttggcgctgaagttgctgctgtcgcagggccacagcttgcggcgacatttgctgatgttgctgttgaaagcgatgtggtggtccttgctgctgctgttgtggttgctgctgctgcggaccctgctgctgttgctgagtatacaaatgattggcattgccgctgggactgagcatagcctgctgatgttgttgttgctgctgctgcaggttccgcatcaccacgggcggcgggcaaggaggagccgccgcctggggcgttgtgggtgaggaaggcaccaccggactcagtacgtcgcccataagaaaatcgcttggcgtcgccgggccggaggatcgcataggggagttcatcatctgcgctccactggggctcataccaatcagcggtgactgctgctgctgctgttggggcgacttgagctggttcggattcgacatgccattgccgtcgttctgcagcagattcacaagcagcggcgacgatatggcaatgttgttgctgcccgtcgaagtcgccgtaggcagcggcggatgcccaagcggatggttaagctggctgggtgccgtcacaatggctggcttggcactaacgcccgctatggcaatgggtgaactgacgctgctggccgttgcagctcccaaacccggatatggcggcggtggtggctggatgaactgagatttgctgcccggcggcgttggagcagctgacgttggcgttgtgggtgtcagttcgccattctgaggtgcctgctgctgttgcgtcttcagcacctttagagttacatttggcggaggaggtggcggtaggggcggacccagaccgcccgcctctcgaccttgcagtactctcgcctgccgcatgctctcgaagggaaagtcgcgcgtggcggacggtgatggcagcagcaacggcaccttgccctccatgggacatacagtattgggggatttaaagacggcgggtgtcacggccacctgctgctgctgctgttgttgctgctgctgctgcgtggtgtggaggggcatcttctgaagtcccaggcccgccgccgctgctcttctttgctggagtgagattgcatcgttttggggctgttgcaggattcgctgctgctgctgttgcataaaggcggatgccgccttgctcgtactggggccatcgaatcccgtggccagcagaccactcttgttgccggaaagcgagccagccgcctcaagtgtctcgtttacattatctgcgggtagggattactcaggttaattgctcgtttagtggacatttgttgccattactcacccttggttatcttaatatcttgtccaccaactttcaaatttatcacagaatcgccctcgaattgcactgactgaatgttgagggcgcgcagctccggatttccatcgttggccagctggcgcagccgttgtgctgcgtcccagggtagcgagaccaatatccgcaccagtgacggttcaagctgctgcaaagtggcacacatgtgagacattttgcaaatttacaacatttaattaacatttaaggagccgtataggaagagaaagaagaagagggatagtgaaattgctggcgatggccactattttgttatcgatatctatgcagcgagagtttgcagccctggtttacgacacgcaaacatagaaacgcctaatttatggccaaacacaattccaaaccttaattatttaacttataatttaccttcactagatctgccatacttgaatctaattatttttatatattgcatatgttatttgcatttctcgttttgtttttgaccctgcggtctctggcgctagagcaggatggccatagggcactcgttggaaattccaacaacaatttgtttcgacaacagtccccaaagataatgcgcttgaattgagtaacccaaaagacaattcagctgactgcattttccacgcgcggcatgccaaaagggggcggagcgggtcggggcagctggtgcccacaggttgcattttctcatgcgtgcgtgcgttttccttttctctctgcgggacgtgttatcgataccccgacgtcgtcgccatttttcttcttggcctcttggaaggcggtgcgccggtgtgcgtgcttgctcgtgtacgtgtgctggttgggcaagtgtgtgtgtgtggcagagggaaaaggtaaccaaaatacttgcttggcactaaggcggggggtaaaaagggggcgggctgattaataaaataaaaaagggggaaccgaaaaagagagatgaaaaaataaacacgggaaatgcgagattctatacactcgaagccaaccaattagttcacccttttcgccgcctattgtttttgtttttatacccgtctctgagtgcgtgggtgacgcaagtgtaaaatgagcaaaagcgatggcaaaaacagacaagaaaaggggggaaaaagaagcccacttgaagtgcaataatcgcaaatcagctgttccgttgcgctccacca

SEQ ID NO: 33479 - DNA, 7320 bp, DROSOPHILA
atgtgtgccactttgcagcagcttgaaccgtcactggtgcggatattggtctcgctaccctgggacgcagcacaacggctgcgccagctggccaacgatggaaatccggagctgcgcgccctcaacattcagtcagtgcaattcgagggcgattctgtgataaatttgaaagttggtggacaagatattaagataaccaaggataatgtaaacgagacacttgaggcggctggctcgctttccggcaacaagagtggtctgctggccacgggattcgatggccccagtacgagcaaggcggcatccgcctttatgcaacagcagcagcagcgaatcctgcaacagccccaaaacgatgcaatctcactccagcaaagaagagcagcggcggcgggcctgggacttcagaagatgcccctccacaccacgcagcagcagcagcaacaacagcagcagcagcaggtggccgtgacacccgccgtctttaaatcccccaatactgtatgtcccatggagggcaaggtgccgttgctgctgccatcaccgtccgccacgcgcgactttcccttcgagagcatgcggcaggcgagagtactgcaaggtcgagaggcgggcggtctgggtccgcccctaccgccacctcctccgccaaatgtaactctaaaggtgctgaagacgcaacagcagcaggcacctcagaatggcgaactgacacccacaacgccaacgtcagctgctccaacgccgccgggcagcaaatctcagttcatccagccaccaccgccgccatatccgggtttgggagctgcaacggccagcagcgtcagttcacccattgccatagcgggcgttagtgccaagccagccattgtgacggcacccagccagcttaaccatccgcttgggcatccgccgctgcctacggcgacttcgacgggcagcaacaacattgccatatcgtcgccgctgcttgtgaatctgctgcagaacgacggcaatggcatgtcgaatccgaaccagctcaagtcgccccaacagcagcagcagcagtcaccgctgattggtatgagccccagtggagcgcagatgatgaactcccctatgcgatcctccggcccggcgacgccaagcgattttcttatgggcgacgtactgagtccggtggtgccttcctcacccacaacgccccaggcggcggctcctccttgcccgccgcccgtggtgatgcggaacctgcagcagcagcaacaacaacatcagcaggctatgctcagtcccagcggcaatgccaatcatttgtatactcagcaacagcagcagggtccgcagcagcagcaaccacaacagcagcagcaaggaccaccacatcgctttcaacagcaacatcagcaaatgtcgccgcaagctgtggccctgcgacagcagcaacttcagcgccaacagcagatgcgattcatgcaaccgcagcagcaattacaaggacagcagcaaccacagcaacagtttcagcctgcgcctgattgcttcaacaacatgggcatgggtcccatgcaacagcaacagataagacatcaactgagacccggcggactgccgttggctcctccgccgcctcatccgcaacagcagcagcagcagcgtctcatgggcctgtccatgccgcaagcgtcaccccaacagcaattcatgagcggcgcttcgccccttggacctgccctctcgcccgcctccagccaccattcgatgcacagtccgctgatgtccaatcatcaggcgcaacagcagcagcagccgcagatggtgtcgcctgcggcaacacctggacccactgctcccagcgaaatggctggacagctcatgccagccaatcaacatgtacctgcagctccaccaccagattacaatcaggcggcagtcaactctcgctggccgctggccgggatcaataagccgatggactcggccaccaagagcagttttcaggaattcacgcgttaccagatgcagtacaatcttcagcaacagcagcagcaagtcagtctgccgggacagccgcaacagcagcagcagcagccacaacagcaacagttgccgccacctgcgctgccgacgcagcagcagcagcaacaacaaagtcatgttcagcagccacaggttgcaggtcagactcaaggtcaggtcgattctctgatctcgctttccgttctggataccctcaccacaaacgatttggacgccctgctgcccacactaaactgtgatttggactctacgcttagtttggaagataagaacgagctcgaatctctcctgcaagacgccaaggatctggacttggatctgatcgaggacaatctatcggcggttgatatgagggatgcgctcaacacgttgcaagaagcgccactggaacagcagcagcaacaacaacagcaacaagcagcgatgcagcctcaacagcagacggcgcaaatgatgcaaatgccgtaccagcagcaaccacaacagcaacaacagatgcagcaacaattgatgatgcaacagcagcagagacagcaacaattgccgcagatgcaacagcgccagcagcaacatttgcaacgacaactgcaactgcagcaacagcagcagcagcagcaacaacaacagttgcagatcgtccagcgccagcagcagcaacagcagtcacaactgcaagtccagcatccgcagcagccacagagacctccccagaagcaatttatcattaatccacataccggcgacatggaaccaatggccagcgacgatagcgagactgaggctgaagaggaaactgcccagccgcaattccgtaacagccacagtggattaggcagtttcaatttcaatcccgccaacgacatgcttctgcccaccaatctgttttccgaggaggactccaattccgcgcagcagcatcccatgggtataagtagtgatcaggaaagatcacgcgactccctggcatcgaacaaatcagccacgagcagggctaggaaaacgccggtctcgaaggcgaaccatagcaatttcagtgcgggtgacaattcgccacgttctagcaatagttcgcctttgattggcttgaactcgccccaatcggtgaacgccaatgcaggtggagcgcccagcaagaaggccaagccaaatctgctgcgcggcaagctgcaacagggagtcaaggagcgcaaggccaaggatcccacggctgcaccaaaacagaagcgcgagcgggcgaagggcaatgtcaagacgaaggcggctgaggagaagataaagctgcgattaaaactggaaaaggtggagactacgccggcagcgggagccggctacgagggacagattattatcaatcagcagcagcagcagaccattgttgtgaataatcacatgcaacagttgcccatgcagactcaactattggctctgccgacgcaacaacaacaacaacagcagcaacaacaacagcagcagcagcaacagatgcagcaacctcagatgcagataagccaacagcaacatcagcagcagcaacaaacttctcagcttcagcaacagcctgctcagctgcagcaacaacagccacaacagcagcagcagcagccgatccaacagcaacagcaacatcatccggtctatagtaactttcagcagcagcaacaacagcaacaacagcaacagcaaaatgtcccgggacccaacgaaccacgtgttcctccactgcaaatccgtttgcgtggaaagaaccatgtggtggtgaagaacacgcgaaaggatcgaaagaagggtcagaaccaggaggcgagcattgatgagcgacaattgaagcgcagctacagcgatcagccaccacagcaactgctcatggatcctgcagaaagcaagcaagccaaactaacgccaccgccacatgtcaacggattgcccatactgatccaaaagacgacggcgacagtggcgtcgccacaattgccacaacaattgcaaggcggcgtagccacaacgacgaagactaccactattgtggcgggcaagaatggtctaacgatcagtgccattgtggaggcgcacaaggcgcaggctcaagcgcaggcccaatccctcaatgatcctcaactgattgtgggttccaccaacacaggaacaacgcccacgtccaccaccctgcagcagcagcagctgagcaagatagccacctcgttgcccagcagcattaccctaagtgccatcaacagcaacaataacaacaataatgtgaacagcgggaataacaacaatcggctgttgacgatgaagaatccgattaagactgcggccaccataacacccatcgtgggtggcaagccgatgacaaaaaaccataagccgccgccatacatcacagccgtgcaacagctgcagctgcagaagcaacaacagcagcagcaacaacagcagcaacagcagcagcaacaacagcagcagcaacagcagcgacaactggcggcggccgtaaccatgttgcccagtgcgacgaccctgaagcgtgtggagataacaaaggtcacaccgcaggtcacggcagagcaggcccctagcattaacccatccccagtagtcgtagcagcagcagccacagcaacactaacgacatcgtcgacgcccactacgcaaacaactcagctgatctgtgatagaaagttgccagtggccatgccgcccatgactacggtcaataacgtggtggtggccacagtgaactcctcttccgccgccctgtcgaccttgtcctccgtatccacagcctcctccgcgtccataatcaccacctctacctcaacctcatcgcctgctgcgttgcccagcacgctgcgcaactcgcccgccagcaatggaagtgggacacccggtcatggaaacaatggcggtggcgaggacagcggcattgagtccatggatgccctatccgagaagagtcctcatcaactctcgtccagcagtccaattcaagtgagcaaggcggcggtgacgatggtgcagcagcagcagcagcagacgaacgcaatcgtcacaatcaccacatccgcggcggtgatagcaccagtgattgctcccacctcaacgcaggcaggaacaacacccactgtagcgccatccctgcaacagcagcaaaaacagcaggctgacgatgagatagagaaggcgctggcgaagatggagggggactttccggatgatctcgaggatattgtttcctcgatgattaaggagacaagcgaatgtgctagtgcggcgggtggtggctttctaaatagcctggagagctcactgccagcagcgacggttgcaacagttgtgtccacagcatccacaaacacaagtagcataggtagcatcaagttgaatggcgaacaccatatactcgaacacgatgatctcatcaagaaactcacagagagcaagccaccagcgatcaaggtgaagctggaggagatgccaccgctgctcaccattaagaaagagccggtgattaaaccgatggccagcgggcttaaagtggaagccaaagtggaggtaaagcttgagccgaaagtcgagcccaagtcggaggagaagttgcaggaaaagcctccgagcgagtcttcttcagcctcactgcagcccatttcgatagaaatacctgctcaggtggacggtgagacgccgagaataaggacgcgagccagcagtcgtctggagagtccgctggatgcgcagaaagcaagtcctgatcccacaactgtcaccggtgtttcaacaacagcggcaactgcagccaacgcgtctaccaccgttaagagtctatcccgagcctcctccaccgccagtcctcgagtggtcacaccgactccgaaccacaacaacaataacaataagcgaagacgccaggaatccgagtgtggcagtagtaatgatggtgccgacctgggcgagaatagcataaagcgaccgaggataagcagtggcaccacctccaataacaacgcaacagaaacagctgctgaacacaatgccggcgcgggattgccaaaaaaggttgaaatcgagtcctccgattcggatgagccgctgatcgaggtggccggcaaggtgcgcaactccaagcaggcccaggtagaagctgccgatgccgcagcagttggagtggagaagcatgtgacgcgacgaaatgctcagcagctacaaccaccgcagaacaaaactgccggcaaccatgccccctcttccacacctgcccttggaacaccacgatcgggaaaagctcaggcgccagttggtgctacctccgctgcgaacaacaatcacaacagcagcactgccaacaatgccagtgttgtgccctcctcagtgacgacgacaacaatgccaggcggagctgtggtgaccaccagccaagttaacagcggcacaagtgtggttcatgcaacacgtggagccaccgctgcggctgccagtaccactaataacaactcggccagctcgcccactgacgagaagatcggcacccggagaagcgtgcgggccagtgcggcggccaacaagatcatctatagtcgcagcaatgcagccgcagctgctgcagcagcagccgccgcggcagagccgaaaggaacaactggcaaggcgggagcagcagtgggtgccaacaacgccggcaatgtggagagcgtcgcggaagctagacgaaagacccgcagtgcaggcttgaaccatccgagcgatgcacacgaagacgatctgctggagctattcaaagactttgagcagcaacagcagccgcatcagcagcagcagcaacagctggagatcagcagcagcagctttcctttagcccaggcgcaggacgaggacggtgatgagatggccgaatatgagaatctggcgcgagcagccggtggttacatggaggaggccgatcatttgctgtcctaccacagtagcagcagtgccgcggatgttgaggtggatgaggtgctgatgccggagctggacaatgccacggccttggactgcgccagctttgtcgactacgatgagttcaatctgtgcctgaacaacatcctcagcgaggaggacgacagtggtagcgcacgcggaggaggaggaggcgtcagcagcatggcgaccaagcaccaacagtcatggcgcgatgccggcgacgtactcaacattgtacagctcagcaacgatttgggattgagttttcaggagttcgccagcgaggcgacaacggcggatgagcagcgctccgccagtagcagctcaccgcagctggcgtag

SEQ ID NO: 33480 - protein, 2439 aa, DROSOPHILA
MCATLQQLEPSLVRILVSLPWDAAQRLRQLANDGNPELRALNIQSVQFEGDSVINLKVGGQDIKITKDNVNETLEAAGSLSGNKSGLLATGFDGPSTSKAASAFMQQQQQRILQQPQNDAISLQQRRAAAAGLGLQKMPLHTTQQQQQQQQQQQVAVTPAVFKSPNTVCPMEGKVPLLLPSPSATRDFPFESMRQARVLQGREAGGLGPPLPPPPPPNVTLKVLKTQQQQAPQNGELTPTTPTSAAPTPPGSKSQFIQPPPPPYPGLGAATASSVSSPIAIAGVSAKPAIVTAPSQLNHPLGHPPLPTATSTGSNNIAISSPLLVNLLQNDGNGMSNPNQLKSPQQQQQQSPLIGMSPSGAQMMNSPMRSSGPATPSDFLMGDVLSPVVPSSPTTPQAAAPPCPPPVVMRNLQQQQQQHQQAMLSPSGNANHLYTQQQQQGPQQQQPQQQQQGPPHRFQQQHQQMSPQAVALRQQQLQRQQQMRFMQPQQQLQGQQQPQQQFQPAPDCFNNMGMGPMQQQQIRHQLRPGGLPLAPPPPHPQQQQQQRLMGLSMPQASPQQQFMSGASPLGPALSPASSHHSMHSPLMSNHQAQQQQQPQMVSPAATPGPTAPSEMAGQLMPANQHVPAAPPPDYNQAAVNSRWPLAGINKPMDSATKSSFQEFTRYQMQYNLQQQQQQVSLPGQPQQQQQQPQQQQLPPPALPTQQQQQQQSHVQQPQVAGQTQGQVDSLISLSVLDTLTTNDLDALLPTLNCDLDSTLSLEDKNELESLLQDAKDLDLDLIEDNLSAVDMRDALNTLQEAPLEQQQQQQQQQAAMQPQQQTAQMMQMPYQQQPQQQQQMQQQLMMQQQQRQQQLPQMQQRQQQHLQRQLQLQQQQQQQQQQQLQIVQRQQQQQQSQLQVQHPQQPQRPPQKQFIINPHTGDMEPMASDDSETEAEEETAQPQFRNSHSGLGSFNFNPANDMLLPTNLFSEEDSNSAQQHPMGISSDQERSRDSLASNKSATSRARKTPVSKANHSNFSAGDNSPRSSNSSPLIGLNSPQSVNANAGGAPSKKAKPNLLRGKLQQGVKERKAKDPTAAPKQKRERAKGNVKTKAAEEKIKLRLKLEKVETTPAAGAGYEGQIIINQQQQQTIVVNNHMQQLPMQTQLLALPTQQQQQQQQQQQQQQQQMQQPQMQISQQQHQQQQQTSQLQQQPAQLQQQQPQQQQQQPIQQQQQHHPVYSNFQQQQQQQQQQQQNVPGPNEPRVPPLQIRLRGKNHVVVKNTRKDRKKGQNQEASIDERQLKRSYSDQPPQQLLMDPAESKQAKLTPPPHVNGLPILIQKTTATVASPQLPQQLQGGVATTTKTTTIVAGKNGLTISAIVEAHKAQAQAQAQSLNDPQLIVGSTNTGTTPTSTTLQQQQLSKIATSLPSSITLSAINSNNNNNNVNSGNNNNRLLTMKNPIKTAATITPIVGGKPMTKNHKPPPYITAVQQLQLQKQQQQQQQQQQQQQQQQQQQQQRQLAAAVTMLPSATTLKRVEITKVTPQVTAEQAPSINPSPVVVAAAATATLTTSSTPTTQTTQLICDRKLPVAMPPMTTVNNVVVATVNSSSAALSTLSSVSTASSASIITTSTSTSSPAALPSTLRNSPASNGSGTPGHGNNGGGEDSGIESMDALSEKSPHQLSSSSPIQVSKAAVTMVQQQQQQTNAIVTITTSAAVIAPVIAPTSTQAGTTPTVAPSLQQQQKQQADDEIEKALAKMEGDFPDDLEDIVSSMIKETSECASAAGGGFLNSLESSLPAATVATVVSTASTNTSSIGSIKLNGEHHILEHDDLIKKLTESKPPAIKVKLEEMPPLLTIKKEPVIKPMASGLKVEAKVEVKLEPKVEPKSEEKLQEKPPSESSSASLQPISIEIPAQVDGETPRIRTRASSRLESPLDAQKASPDPTTVTGVSTTAATAANASTTVKSLSRASSTASPRVVTPTPNHNNNNNKRRRQESECGSSNDGADLGENSIKRPRISSGTTSNNNATETAAEHNAGAGLPKKVEIESSDSDEPLIEVAGKVRNSKQAQVEAADAAAVGVEKHVTRRNAQQLQPPQNKTAGNHAPSSTPALGTPRSGKAQAPVGATSAANNNHNSSTANNASVVPSSVTTTTMPGGAVVTTSQVNSGTSVVHATRGATAAAASTTNNNSASSPTDEKIGTRRSVRASAAANKIIYSRSNAAAAAAAAAAAAEPKGTTGKAGAAVGANNAGNVESVAEARRKTRSAGLNHPSDAHEDDLLELFKDFEQQQQPHQQQQQQLEISSSSFPLAQAQDEDGDEMAEYENLARAAGGYMEEADHLLSYHSSSSAADVEVDEVLMPELDNATALDCASFVDYDEFNLCLNNILSEEDDSGSARGGGGGVSSMATKHQQSWRDAGDVLNIVQLSNDLGLSFQEFASEATTADEQRSASSSSPQLA

SEQ ID NO: 33481 - DNA, 4731 bp, DROSOPHILA
atcatcgcacgagcttatcgcatattgcagaatgagttagttgaaaacctgaaaactttccaaaatgatttcaaacttcaggtacgtcgagtggtaaagagattatttattcttaataactttgttgccttgtattcatacaacgaaaaaaagttttgaaaatttaaatttatttagaataatatcgtgttacttttcgattctctgttatcattatcattcgaaatacagtataagtataataattaaatattctctgtctttataataaatccttaaacatcacatgaaaagtttttctgttgggtttttgcctttgtttttataagttctaaacactttcctttcgttctttggtatcattttcataattttttcatatcgggaaatcgaatattttccgcttgtttcgttagcctaggaaaaacgtatctagagtccacaaaagttatagacttagatcaagacctgtttataaatttcgttaatatataggtatatataataacttaacaatagtaagtaccatatgttgtggtttttgagggttttggtatctggggattcggttgtaaatacgtgtaaatacagaatttcatttggtgtaagacgatttctcactttctggttgtataaactctccagccttgccttgaagattagcattcgcgatataggtaaagaggtctgtatatatcgtttaactataatatctatatatatataatatatcgcttttcttgtgggtgtgtgttttcgtttggtttgagagtgcatctgtaaattgtaggtacttataaactagctacaacacaacacacatgccacgccatgtaaaattgtagggtatcctgtccgaatttttggtggctgaaaaaatccatcaaaatgctaaatcttctaactaagtttcctttcgaatcgttacatcgtttgctttctttttttggcattatctaagagaggtcaagagtgtttttttttttggtttttcgtttttggaaaacgttgatttggccataaactttttggtagatttgttagcttcggttgggttctgttttcatcgtgtgagagtgtttcctttgtctgtggtctgagttttcgtgtaaaaaggtacatgataagattgtttcacgactgatcgatcccaaactccttgacaccactgcacctacgtcgcctgaccctgggtggactggccagccaggccagaggatatcgatggtgtcgtactggtggatgcgactgccggccctccggatgcggcagtgctctgctccagactccacggatgcaccatatcgtagtacctgcgatagtcgtagtcaaagagctcgaaatcgatgcgatatatcttgagcaattggtccaacgttgagcggtcgagatcggcgaagtatcgctcgaccagggcctcggatttaacgccacttcgcgcctggttgccaattttgcgctgcttccgctgcggcagcttgcccagtcccaggagcagcgattccaggcccgcctgccgtatgatgaactccgagtccctctggaacgtctccgtcttgccgatgatggtgaagttaacgctgcagggcgtgcagaagctgtaaactggtgcccagtgctcgtcgaatctcttgcccgccgcatgctcggcgatcaggaagcggacgaactcctcgaaggtgggtccacatcgcggccagggtccgcccagattacgcttcctgtagcgatgcacgatcttgttgcccagcgccttgtagaaggtgttcttgttgccctccagtttgttgcgataggcgctcaggattcgctcgaagggatcgcgcacaaagagaaaggacagcgcactgggcagcagctccatcagttcgcccagttccgggcgtggaaaacgctttctggccagctccagtggctgcgtctccgtgcgctgcagatacttcacatcgtagccagctggaaagccatagtgaaattttaaagaatattcttaagacttaaataaatatcctaacttgaagaggaatattgaggaagatatttgtaataccaaatcaattaaaatctatctttatcgggtaataatataataaaatggaatatatatctctatatttttcaattcaagcttacctaatatattaaagtaatacatccacgtactgctggccgccttgaagacgttgcacctaaaagttaaccaaaaatgttaataaaatataaataaaatagagatgggatgacccactaaccagacgagattgttgtggccaggcgagacgaagaactcccagggattcggtgggtacttttcctgcagcttataccgatcgcagacggcggccagatgctcgctcctcctctgcagctcccgctccgtgcgactgtgcagctcctcggagtactcatacacgggattcagggtggtagccggcggcggcggcggaggagctgctgcttgggaggatgagctgcctgcactggcatttcccccagcgatgccctttccctgctcctgctgcttggccaatatccgctggcgctgcaactgctgccgctttagcttgagctgctgctttgatggctccgattccgcctccaattccgcggccgtagcccgctcccggtgctcgtatgcattgagggattcgcggaaaaggaaggcgaagtagcacaggccgaccaggacacaggcgcctatcttcagataggtctgcaggcgtcttccatagcgcaggcggatgagcatcttgcgaatctaccagggattcctgcagcgagctcgctgcatgatccacggatgggcggtggtttctatggtgagagtgaacagatttcatctcatattattataatgttttaaatctggatattttaccataagtttgagcttcaaaggattaagtttctgtaaattatgtataatatcttatagatagttatgtatatttatttataaactatcttgcagaaagtgcaatcccaaagataccctttcggattctgttttggccagaaagtgtgcattaatctttcagccacccctgctttttggctcttttggccaggcgacacttgttggtgtgtacacaccaaatgacaccctctgccacatacacacgcacatgccaacattcgggccaacacacacacacacatagcgacttggcaaactacgtcatcgtggccccaacacagacgcacttgagcgagtgaaagactcggaaagtaggacgtcatccttaagcgtcaacatgaccagtggtgctatttgctgttgctgcaagttgcgctcgcagttgcaacgccagttcctgcttaatgttggcatgggttcacttgtggccaggactgggaattggccgccaatagctgctgctggcacgaaggcccaacgtattcacggcacctcggagaccacttgagccaagttaaagctaaactagctggtagttagcacagctgtgcgtttatttctggatgtccgggcagtaaacccctcgcctaatccttggccaggatatttggcttaacttaacttactttgaagcgcggcgggcgttaaaatatttatcctttgcttttcgggcgagctccctgtgtatactgaaagcctacggctgcccgcctctccgccagccccctcctgctcctggggccgctctgttacgtgttgcttgtggctccggggaatcctgctgcctgctccgcttctgccgtcctgctcgtggcggccactcgctctcaactgccagtcggcggcggatggccgcagctgcgggtccctggtgtttcgagccagcgttgctctcctcgaaagccgacaatcctcgcctggcgccggcgcagggagagcacacccactgggtggcactctctggagttgcgaacgctgctcactggccaccgggaaaaatcacaggacctgctagaatcattaactaagtttaatgtttaaaatatttaatcttttcctatttaaatgaaaggtttttatcaactaaattcaaaaccctaaaatccttcattgctatacatttttcggattccgagttataaaagtagtttttaagaactcatcttccaaattcccaaaaattccaaaacacggcattcatttattttttgtgtatattaaatctttgtatttttttctttttctataaatattttactttaaagtacaaacaaattaataataaacttctaatactacgttttaagacactttcgttttttgttgttgttgttcatcttgtgtggtttgtttttaaatatttaaatatatcatttatttgtttatgtgtgttgtttgttttgttgcctgtttgtttacgaagcggtatataaattattcatacgttctatacaacatttcctcttccattaacgtgttttctgtgctttctgggcttattgcagattgcagattgcagttggttgtggttgtggctgtccgtccggtcggtccaaagtgtttaaacaaagtccaaaggatggtgtggtatgcaattatggtttcgggttctatatacgttagtttagcggatctatatgaatatatgcagagttatgctagagggttgggttttacatacgcttatgctttgttttgccttgctttaaagtaaacatgtacaaagtatcaaaagaattattttatgtagcaatcatacaatatatatatataaggtaataataatattgaacaatatataatgttgttttgtg

SEQ ID NO: 33482 - DNA, 1762 bp, DROSOPHILA
ccacgagcaggacggcagaagcggagcaggcagcaggattccccggagccacaagcaacacgtaacagagcggccccaggagcaggagggggctggcggagaggcgggcagccgtaggctttcagtatacacagggagctcgcccgaaaagcaaaggataaatattttaacgcccgccgcgcttcaaaaaaccaccgcccatccgtggatcatgcagcgagctcgctgcaggaatccctggtagattcgcaagatgctcatccgcctgcgctatggaagacgcctgcagacctatctgaagataggcgcctgtgtcctggtcggcctgtgctacttcgccttccttttccgcgaatccctcaatgcatacgagcaccgggagcgggctacggccgcggaattggaggcggaatcggagccatcaaagcagcagctcaagctaaagcggcagcagttgcagcgccagcggatattggccaagcagcaggagcagggaaagggcatcgctgggggaaatgccagtgcaggcagctcatcctcccaagcagcagctcctccgccgccgccgccggctaccaccctgaatcccgtgtatgagtactccgaggagctgcacagtcgcacggagcgggagctgcagaggaggagcgagcatctggccgccgtctgcgatcggtataagctgcaggaaaagtacccaccgaatccctgggagttcttcgtctcgcctggccacaacaatctcgtctggtgcaacgtcttcaaggcggccagcagtacgtggatgtattactttaatatattagctggctacgatgtgaagtatctgcagcgcacggagacgcagccactggagctggccagaaagcgttttccacgcccggaactgggcgaactgatggagctgctgcccagtgcgctgtcctttctctttgtgcgcgatcccttcgagcgaatcctgagcgcctatcgcaacaaactggagggcaacaagaacaccttctacaaggcgctgggcaacaagatcgtgcatcgctacaggaagcgtaatctgggcggaccctggccgcgatgtggacccaccttcgaggagttcgtccgcttcctgatcgccgagcatgcggcgggcaagagattcgacgagcactgggcaccagtttacagcttctgcacgccctgcagcgttaacttcaccatcatcggcaagacggagacgttccagagggactcggagttcatcatacggcaggcgggcctggaatcgctgctcctgggactgggcaagctgccgcagcggaagcagcgcaaaattggcaaccaggcgcgaagtggcgttaaatccgaggccctggtcgagcgatacttcgccgatctcgaccgctcaacgttggaccaattgctcaagatatatcgcatcgatttcgagctctttgactacgactatcgcaggtactacgatatggtgcatccgtggagtctggagcagagcactgccgcatccggagggccggcagtcgcatccaccagtacgacaccatcgatatcctctggcctggctggccagtccacccagggtcaggcgacgtaggtgcagtggtgtcaaggagtttgggatcgatcagtcgtgaaacaatcttatcatgtacctttttacacgaaaactcagaccacagacaaaggaaacactctcacacgatgaaaacagaacccaaccgaagctaacaaatctaccaaaaagtttatggccaaatcaacgttttcc

SEQ ID NO: 33483 - protein, 444 aa, DROSOPHILA
MLIRLRYGRRLQTYLKIGACVLVGLCYFAFLFRESLNAYEHRERATAAELEAESEPSKQQLKLKRQQLQRQRILAKQQEQGKGIAGGNASAGSSSSQAAAPPPPPPATTLNPVYEYSEELHSRTERELQRRSEHLAAVCDRYKLQEKYPPNPWEFFVSPGHNNLVWCNVFKAASSTWMYYFNILAGYDVKYLQRTETQPLELARKRFPRPELGELMELLPSALSFLFVRDPFERILSAYRNKLEGNKNTFYKALGNKIVHRYRKRNLGGPWPRCGPTFEEFVRFLIAEHAAGKRFDEHWAPVYSFCTPCSVNFTIIGKTETFQRDSEFIIRQAGLESLLLGLGKLPQRKQRKIGNQARSGVKSEALVERYFADLDRSTLDQLLKIYRIDFELFDYDYRRYYDMVHPWSLEQSTAASGGPAVASTSTTPSISSGLAGQSTQGQAT

SEQ ID NO: 33484 - DNA, 7850 bp, DROSOPHILA
cccgcaacattttaataactattgagaataaagaagagttatcacaatttggttttataaataattgtatatttggtttttttgttgtattattttttatacttttaaaaagtaaacttctattttgatcgaaagtattgatttaagcactgattacacgatatcgtgtgattgaggttgagtttttttttctttacatataaatcgagtgagttattgggacgaatgaagatataacaaaaagtcgcgttcgcaaaagcaatattgaagagtattggctaacttagatcgcaatttaaatacatagattcgtgtgtatggttacagctttacaggtcttttgtcgttaaatattacatcaatatcaatatcatagatcattttttacgctcatttccattttctctatcaataaaattaacaacaattccgatgcatttgattgggcacgtgataaacattgataaacgtgctcgcctactcagacgcataacaaatttaaaatactgtttcttctaatataattaatatacgataactgtttcagtagtcaattagtaaggtcaacattgcacgaacatatactacgtgggtacttcatcgtatatgtccaatcgagtatatatgcctgtagctcgtgtaaatagtttagtcgattcgattactagatgtgttacaaattggtacactagtgtggattgttcctcatttgcgcgtgggtgagtttaagtttagtttaaagtcactttagttattgctgctgtgctctcgtgtcgaacaacatggattcacattcattcacaaaaaaaacgcaacgtacgaatacgaatacgacgggtatgcaaacttaatctaccgagaattgtatatgtctaaacattcataaggatctatggttaggtgcatgttcgatgtctgccgatgctgagcaccactccctcctcaggtttgtctttttcataattatctataaactatatacgtttgccggtggggcaaactaaggcatgccaggcagtccaccgcccacaaggcgctgctgttgctgctgctggtgaatgaggttcaccctagctcgttgctgctccaaccgctgcaccgtagccgtcagatgggagttctccacatatagatccttcaccaggatgtcggcactctgcaatcgctgtgtctgatcggccagtaaaacaccctgggtctcgattcggctatgcaaatcgttgagctccacttgatgctgccgccaggattctaatgaataaatattacattatcattcttggtcagtaggtagtttcttcaacttacgctgcatcagggactccgtgtaatgctgctgctgcttgatgacattctgcagatggcgatttcgcagctccaattggttcagtcgctgctgaagcgttggatgcgttgttcgctaaagaagagtccacagatacgattagaatatgttccctgatcaacaaagtctatggctcaccgcataggccttctcgagcacgggtcgcgcctcctgcaactgctgcagttccatgaccagaccgtcccgctgcagactcagatccttgatttgctccttgagggagagctcgaagaacttaaggcgcttcagttcctccttcagtgccgacggactgctgcacttctcgtggctaaggcaagacgttttactgttggattcgaagcttttgccggacgccgtcgacgacgtctcgcaatcggctatctctccctccgatgcagccgcctgttggggactctgggaccgcttgggcttgctgatcggagctgggccgggattggcgccgtaggcgttgctgttgccactgttcgtgggcgaaggacccgactgagagctttcgaagggtgtagtgctaaagatggatgtttccgaagtggtgaggttattgctgtttaagggaccattaaattggcatgatttacaaaataaaaacgactttgaacgaattgttaaacataaagatgcaaaatgaaaacgtgtaatgatacaaatgtgaaaaataagcaaacaaaaccatttccagcagccaatttcataaccgaaaaagagtaatttttttgtaaaatattaaatgtatatttattgaaatcataaatcaatgaatttcgataatgtgatgaatttctatatgaatataaattatatttattaaacaagcacaaacatacaattaaaaggattaaattagcttatattagacatggttagatgtgagggacaaaactgaaacatatatacaggacatacagtgcaaattatgaggaagacacagggatgctcacaccaaggacacaccgagaggcttctcatactcaccggctggctgtcttgtgcgatggtgagcctccgagcaattcgatggcactggcggtggcttcatccttggaatcggcaagcgatttcgctggctcttggatggtgctctgcagccagaggtagctgatgggtgagctggctggactttttcccgcctcggcactcagttgggctaccgactccgaggtgagttcacaggcgcctgtgaggatctcaacgctctcacccaatctctgtcgcaaatcctcgatctctgattgcagtgaactgatttcctgagccttctcctcgagcatttgaatggaactcgagcgcagctgggctgcctctgcctccaattccgagtactgctgttccagcatatcgcgctcatcaatgggcgagaggcggccatccttgctgaactgctcctcgtactcgcgcaccttttccatcagctcggtgaacttcttgtcgctctcgtgctgctcatcttcgtagatctgtcgctccttctcaaacagctgccgctcctcgctaagtttcgtttgccagtagtcctcgcaatcctcataggcacgctgcatttgctctagactggtctccagttccttcgaacggctttccggggtgagagatctgccttcctttgcagccttgagttcctcctctagctcagcaacccgctgtctaaggcttgttagctcctcatcctggctttgacttctttgcagctcggagtttagagccaaccaatctccgctgttgctggcatcgctctgctctccttcggtgcacttgcgctgtttccccaagcgagggctctcctctgttagatgtgttttgctcggcgaatccccacgccttttggtagccgtggccgccgactcctggtcctcttgtttctcctgtttttcttgctttttagccttggttttcgagcgaattagttccacatttaagctctcgatttcgatggtcagttcgtcagtcttgtcacgcagctgggcgttctccatttgaagagcagccagcttctccattagctggagcatctcctcctccttgtcctcgctatgccttctcggtcgcaatggactgtgctccggggtgccaccaatgctgctcgacgtttgggccagttcctggttgagcttaatgttctgttcgagaagctctgtgatttggatgtgagccttttgctgctccgactcaagctccgtgttctcagtgcgcaccagttcaagttccgttctcagacggatctcctcctgctcaagcgatttaagctgtgcctccagctttcccgtcatgctggtccagtgatcgcggtcattagtcatccgcagcgttatttcacgcaccatgctggcgtgtctttgctccagctgctgcacctgcttcttggagttatcctccagcgacgcatgccgctcatccacttccacggcaagcaaagccaccctttggttggccgccttattatcggccctcagcttgaggttctcctcatgctgctgcctataggcaagtctgtagttgcccaactcggtggcctgcagagcagccagagcgcgcaacatattcgattgctcgtgatccccatcgatgccccgcagctcctcctccaatgccttagttagctgctgcaggttcacctcctcctcctcatcgaatcccaggacgtgaagtaggttgcgagtgttgggaatgctggccagctcccaggcttccataatgctatgcactgagatcgtctccaattgctgcggcgtcacggtgtctgtaaatcatggcaattaacaattagcgtgggacgaatgagattggcttcgctgttgtatatacacatttattatacatatagcccaagataccaggtgggtgtgggattggattgggattgggagtggggaagggtgtgtgtgtgtgtcgatggtgtaagcaaaagcgccgaaagtttgttatttctctatatcaaatggcttttcgaaatgagaaatttttggcgtgttattttaagaggtagaaactaataaatcaagaaaatagaacaaattataagtaaatatcctttctaactgaaattgatttatatgaaatccttaattaaattgattgtcaatgcattacagcattactaagggttgaaaatgtaggatatgtgattatacgagtaaatagaacgaatcaaatgtgcggctacatagggtgcgattagataccgaatgactgggttggggattcggtgggtgtgagggtgttgacaattgcttcagagcgcacaaacctttgcagcatgaccaacggccgccgtggtagcatctccagtgctcggacgacggtgcgggattggtggccaggcgatggcctacggtgtgtaccgacaaacaagtgttttgcttttaacattgcttcaaacgtaattttggcattttgggctaacaacaacagagggtggcagggacaagggggatcggctagccaaagctggtctggccagaggaaacttacccagtgattccacgctgctgctgtgctgcgcctggctctggatggaaagctgtttcaacttggccgctgccgtcggtgatgtagtggctcccgtggtgttgctgttcatcttccggcgtgctggcagtgaagcacaacgcttcagtttgctcccgctggtgtggacggaccgcagacgccggctgccaggaagatcgctctgggacgaggaacgttgcacctgtgtggtttggaaaaataagatgcttatgatgatcatgatgtatatttaagataatttgtttgctttggtagtgctacttaggcatgctctactgtatcagcaataataacgattaaacaaaatctgtttactatgcaattttgcatacataaccagaagttgtatcgccacttcgtacgtgacttgacaaacgacactcacctgaactcccagctcatcgcatccgttgaggcttcgctgattttgctgctgctgcaactggtcctcgtccgtattgtccgagtccgtgacggataactcgtagattccctgctgtggcctagaccggcgaccgtatttcttggtgcccacgacgagtttgggtgaaacctcgcgatcggaagactccggcggactctcgatgtatgtgttgtttagcggctcatccgtaatcaccagtgaacgctctggaagattcaatagatataagttagcagagaactggaagagttgtatggatcttaggtggctaccaaaacgagcggctagcttctcaattatcggatctgttaactgaccgccggatcggcggtaatacaatcgtgttcccattttgatttagactaaactgcccaggtgaatgtgtcgcgtatttatacaggacattgtaaccatctacctgataaggatcatgcaggatcaggtagtcgagaacagttgggagtcgtaaaaaagtgtcaattgcatctatgattttatgatcgccagctgccgccgtgctaatccgcgtgctgattatgatattcgtaccctaaggtgtcctaaatttgcccagaagtttccaaatcagataagcggaggtttgaagtaaatgtgcataatccttgcaaattagcacgtagatggtagcacttctttgagtattaagtaatggctttgttcatctatagactgctagaaatgtgttcattagatcagtgttttattaatagggaaacccacacggttccaaatccgtgtcaaaattgaattactatctctaataagtggctggcaaacattccgtaattatctgatgttgcttgatgggtaattaaagcgcaattacagataaaacgtatgttgttttatgcgaacctgtcgcgttagcttatagcaaatattatctttatactatataagttaatctatagcgtgatcgattctttgtgctatctcaccaatgaaacccgatgacgtattaccatcgaactcggagcccaggaagttgagtagcgcctccttgaactggccaaaggacacgcccagctgatggctgccgcccaggctggcgatcagtgcggatccctgatcccggagctccagcagtgagcagagcttcagcagggacttctcgtccagaagtccacactgcgtctcgcagctgcggaacatttggtagagcttctgctcgtacggatcggcggatacctccattatccgtaacccggggaattcagtttgctgccgttccaatcgatcggctgctcaattgcgttttcacttcgctttttttttcttggggggaaaatccacaaacgcagtcaggggtcgaaaacaagaaaagtgaaatatcggggtctatgtgcgtgggtggcgggggaatcacgcgtgttttttggacagcaggctgtttgaggggttactaatactactaatctatgatatgcacttcggaacgcaacataaacactcgcgggtttgcggtttttttgggaatagcgtaatttctagcgagttgataaaaaacaataatgcagtaatagcgagcacggtggcgcgctctggagggcattaagcaaacttgcatcggaggtggcactatcgtggaccattgttcctatcgttatacaactatcgtttaggatttgaatatttatattacaaaataaatagataacaagggagaacgtaatgccatataataaatcgctaactttacttggaaagcttcagctccaaccagaccccttattaaagtagaaaacttgacataaattgaaatcatccgattaacatgttgttttccaataatagattataattatacaaaaagtatatcaaataggaagtgcttcatagcacacacacatatattgtgcgtcattcaaactacaataatttaaaacaaagaaccctatagttttattaataaaattgaactttggcaacaaataaataaataaaaagtaaagttgtacaaaaaattgcttttgtttaaaaattcccaacaacacgtttctatcgcactatcgataaccttgtgcatagccatcgtcaacagtgacagccaatggttctatcgattgtttggcagcactaataaattccatttgcaagctgaaaagcaagaaaaaatacaaaatatctttgagcattgcaaactgttgaaaaatccaactgaaaatcatgtgtatgtgccaccagtgacagccgaagacgccgagggattaactgagttagtggaccctaaccagtccaatcggcaaggggcactacattccgcaatccgagactttttggtggtgacccgtagaaaccacagtctcgcattcatttgtttgcattacggcgcagcgggatcagaggattccgcgtccggccgagatggccatgcactcgtacatgcgccagggatcgggttccggaggaggagcaggagcagtcgcagctggagcaccgccgctggccagcccggacgagatgcacggcttcctgaacgacaagcaggcttgggagcacgccatatccctgtaccagggtcctgatccactc

SEQ ID NO: 33485 - DNA, 3614 bp, DROSOPHILA
ccgtgctcgctattactgcattattgttttttatcaactcgctagaaattacgctattcccaaaaaaaccgcaaacccgcgagtgtttatgttgcgttccgaagtgcatatcatagattagtagtattagtaacccctcaaacagcctgctgtccaaaaaacacgcgtgattcccccgccacccacgcacatagaccccgatatttcacttttcttgttttcgacccctgactgcgtttgtggattttccccccaagaaaaaaaaagcgaagtgaaaacgcaattgagcagccgatcgattggaacggcagcaaactgaattccccgggttacggataatggaggtatccgccgatccgtacgagcagaagctctaccaaatgttccgcagctgcgagacgcagtgtggacttctggacgagaagtccctgctgaagctctgctcactgctggagctccgggatcagggatccgcactgatcgccagcctgggcggcagccatcagctgggcgtgtcctttggccagttcaaggaggcgctactcaacttcctgggctccgagttcgatggtaatacgtcatcgggtttcattgagcgttcactggtgattacggatgagccgctaaacaacacatacatcgagagtccgccggagtcttccgatcgcgaggtttcacccaaactcgtcgtgggcaccaagaaatacggtcgccggtctaggccacagcagggaatctacgagttatccgtcacggactcggacaatacggacgaggaccagttgcagcagcagcaaaatcagcgaagcctcaacggatgcgatgagctgggagttcaggtgcaacgttcctcgtcccagagcgatcttcctggcagccggcgtctgcggtccgtccacaccagcgggagcaaactgaagcgttgtgcttcactgccagcacgccggaagatgaacagcaacaccacgggagccactacatcaccgacggcagcggccaagttgaaacagctttccatccagagccaggcgcagcacagcagcagcgtggaatcactggacaccgtgacgccgcagcaattggagacgatctcagtgcatagcattatggaagcctgggagctggccagcattcccaacactcgcaacctacttcacgtcctgggattcgatgaggaggaggaggtgaacctgcagcagctaactaaggcattggaggaggagctgcggggcatcgatggggatcacgagcaatcgaatatgttgcgcgctctggctgctctgcaggccaccgagttgggcaactacagacttgcctataggcagcagcatgaggagaacctcaagctgagggccgataataaggcggccaaccaaagggtggctttgcttgccgtggaagtggatgagcggcatgcgtcgctggaggataactccaagaagcaggtgcagcagctggagcaaagacacgccagcatggtgcgtgaaataacgctgcggatgactaatgaccgcgatcactggaccagcatgacgggaaagctggaggcacagcttaaatcgcttgagcaggaggagatccgtctgagaacggaacttgaactggtgcgcactgagaacacggagcttgagtcggagcagcaaaaggctcacatccaaatcacagagcttctcgaacagaacattaagctcaaccaggaactggcccaaacgtcgagcagcattggtggcaccccggagcacagtccattgcgaccgagaaggcatagcgaggacaaggaggaggagatgctccagctaatggagaagctggctgctcttcaaatggagaacgcccagctgcgtgacaagactgacgaactgaccatcgaaatcgagagcttaaatgtggaactaattcgctcgaaaaccaaggctaaaaagcaagaaaaacaggagaaacaagaggaccaggagtcggcggccacggctaccaaaaggcgtggggattcgccgagcaaaacacatctaacagaggagagccctcgcttggggaaacagcgcaagtgcaccgaaggagagcagagcgatgccagcaacagcggagattggttggctctaaactccgagctgcaaagaagtcaaagccaggatgaggagctaacaagccttagacagcgggttgctgagctagaggaggaactcaaggctgcaaaggaaggcagatctctcaccccggaaagccgttcgaaggaactggagaccagtctagagcaaatgcagcgtgcctatgaggattgcgaggactactggcaaacgaaacttagcgaggagcggcagctgtttgagaaggagcgacagatctacgaagatgagcagcacgagagcgacaagaagttcaccgagctgatggaaaaggtgcgcgagtacgaggagcagttcagcaaggatggccgcctctcgcccattgatgagcgcgatatgctggaacagcagtactcggaattggaggcagaggcagcccagctgcgctcgagttccattcaaatgctcgaggagaaggctcaggaaatcagttcactgcaatcagagatcgaggatttgcgacagagattgggtgagagcgttgagatcctcacaggcgcctgtgaactcacctcggagtcggtagcccaactgagtgccgaggcgggaaaaagtccagccagctcacccatcagctacctctggctgcagagcaccatccaagagccagcgaaatcgcttgccgattccaaggatgaagccaccgccagtgccatcgaattgctcggaggctcaccatcgcacaagacagccagccgcaataacctcaccacttcggaaacatccatctttagcactacacccttcgaaagctctcagtcgggtccttcgcccacgaacagtggcaacagcaacgcctacggcgccaatcccggcccagctccgatcagcaagcccaagcggtcccagagtccccaacaggcggctgcatcggagggagagatagccgattgcgagacgtcgtcgacggcgtccggcaaaagcttcgaatccaacagtaaaacgtcttgccttagccacgagaagtgcagcagtccgtcggcactgaaggaggaactgaagcgccttaagttcttcgagctctccctcaaggagcaaatcaaggatctgagtctgcagcgggacggtctggtcatggaactgcagcagttgcaggaggcgcgacccgtgctcgagaaggcctatgcgcgaacaacgcatccaacgcttcagcagcgactgaaccaattggagctgcgaaatcgccatctgcagaatgtcatcaagcagcagcagcattacacggagtccctgatgcagcaatcctggcggcagcatcaagtggagctcaacgatttgcatagccgaatcgagacccagggtgttttactggccgatcagacacagcgattgcagagtgccgacatcctggtgaaggatctatatgtggagaactcccatctgacggctacggtgcagcggttggagcagcaacgagctagggtgaacctcattcaccagcagcagcaacagcagcgccttgtgggcggtggactgcctggcatgccttag

SEQ ID NO: 33486 - protein, 1091 aa, DROSOPHILA
MEVSADPYEQKLYQMFRSCETQCGLLDEKSLLKLCSLLELRDQGSALIASLGGSHQLGVSFGQFKEALLNFLGSEFDGNTSSGFIERSLVITDEPLNNTYIESPPESSDREVSPKLVVGTKKYGRRSRPQQGIYELSVTDSDNTDEDQLQQQQNQRSLNGCDELGVQVQRSSSQSDLPGSRRLRSVHTSGSKLKRCASLPARRKMNSNTTGATTSPTAAAKLKQLSIQSQAQHSSSVESLDTVTPQQLETISVHSIMEAWELASIPNTRNLLHVLGFDEEEEVNLQQLTKALEEELRGIDGDHEQSNMLRALAALQATELGNYRLAYRQQHEENLKLRADNKAANQRVALLAVEVDERHASLEDNSKKQVQQLEQRHASMVREITLRMTNDRDHWTSMTGKLEAQLKSLEQEEIRLRTELELVRTENTELESEQQKAHIQITELLEQNIKLNQELAQTSSSIGGTPEHSPLRPRRHSEDKEEEMLQLMEKLAALQMENAQLRDKTDELTIEIESLNVELIRSKTKAKKQEKQEKQEDQESAATATKRRGDSPSKTHLTEESPRLGKQRKCTEGEQSDASNSGDWLALNSELQRSQSQDEELTSLRQRVAELEEELKAAKEGRSLTPESRSKELETSLEQMQRAYEDCEDYWQTKLSEERQLFEKERQIYEDEQHESDKKFTELMEKVREYEEQFSKDGRLSPIDERDMLEQQYSELEAEAAQLRSSSIQMLEEKAQEISSLQSEIEDLRQRLGESVEILTGACELTSESVAQLSAEAGKSPASSPISYLWLQSTIQEPAKSLADSKDEATASAIELLGGSPSHKTASRNNLTTSETSIFSTTPFESSQSGPSPTNSGNSNAYGANPGPAPISKPKRSQSPQQAAASEGEIADCETSSTASGKSFESNSKTSCLSHEKCSSPSALKEELKRLKFFELSLKEQIKDLSLQRDGLVMELQQLQEARPVLEKAYARTTHPTLQQRLNQLELRNRHLQNVIKQQQHYTESLMQQSWRQHQVELNDLHSRIETQGVLLADQTQRLQSADILVKDLYVENSHLTATVQRLEQQRARVNLIHQQQQQQRLVGGGLPGMP

SEQ ID NO: 33487 - DNA, 1779 bp, DROSOPHILA
tttttgttagcttttatgtagcacttctttcatatgttgaaacagatgtattgttttgtttaacaaactaaattcttccgtacccaggcaattattaaatttaactgttaaataatatataaatttcgaaaattaaaaagtaacaacataaattaaatatcgaaccaaaaaaaaaaaattatttacacatctccccgacggggaattgaaccccggtctcccgcgtgacaggcggggatactaaccactatactatcgaggatgttgaacttaggtcgccaaattcaaaatataaacttgctgttgatctatacatccgagtgttatgatcataagttatattaatccgaactaatattatatataagataaaataagataagatatgcaaaatattcgatgctgatttataacacgcttttttaaatcattttattaagatggtagactcaccattttccacggtcttgcttttctcgttgtcggcatcctcatatccctctgatcctggtccagatcccatttccatgccactcaaagcggcggcggccatagcttcgacgtctggctgaacattcgcactgaattcaccatgagaaaaccaccgttgtcttcgggaggcatgcatccatatgtacgctcctcctcgtacatcccggtcgtctcatcgtaaagctgttggactgcgctgaagcaactgccaccgggtctggtctcgcaggttccattgcttacattgtccggacaactgccatcgcagtagcaggttagggagcgggctaaaatggcaacagaatataattaatataccattcattgataatccatatgaaatgaagagtctggtaagaatcaaattatcttgttaacatcaccaattttacgactcttgcgtatttattcctgcctgaaaatgggattggtcatgacttttaagctaataaaagatcttagcttccttaacgtctttttctgactttacgcttcccaaagacccctataatatgtccttatgatatccggttataataactagtcgtctgttgcagtaatgcacttaaagttgacgagtgggttggtcttatccccacctttaaaccaatcatccacaatctttcattgggattaagtacagtagtaaactgctaacattgtttcctaaaaacactagttactgcttctcttccaaccttaattataatctccttaatcctgatcataaatccgaaaactacagattaagcaaacaagaagtcttcaggaggtttattaacgttttattgctatgcttcgaaagtttttaacttccgtactcggacctgtattacaatattagtggtcaagtagtactcccaaaatcaatctgatgagttggctattttgagtctgcaattataaacgccggcagaaaccaaaccgcaactgtagcacaaaaatgcgtttgagcatgaagagtgggccgtggctgcaagtagcaagtagcaagtagctggtaacggtaactcgagcaattgattcaggtcgctggcaaatctgcaactaattacaagctcgttgctgtttcttctcggtagcctagctgccttttccaccaccacttgaccaagccatcggcacacgaggaggagcgcagagctgcagctgaagctcaaccgttatggagtgggcgttgtggccattgggcgctagttttacggccatttgccgcctgcgacagccatcgaggaaaacattaagtgcgttttcctcgacggagatgaggggcagacagccgttaga

SEQ ID NO: 33488 - DNA, 3140 bp, DROSOPHILA
ccataatttacaccactcatgttacgctaaagttttattgagttccattaatttacgactttctatggtcgtaattaagattatcctttgctcgcgctccgcaattgccgccgattttccatgaatggcagctttttatcggacctgcactcgcataattcattttatcattttgacagattcggaatggaatagcgactttcctcgcccacccaacacgcgtacgagatttcaattgcccgtcgagtggcacacatatattataccagctctcgaaatgagacgcatcataaataataactaatgttttgataagaccccaatgagcgccaaccactttttctgtttatcaaattacgtatgaagtttgctcattaattttggcaaagtgagtgtaggggaaacatgggtagtgaattcagtgcgaatgttcagccagacgtcgaagctatggccgccgccgctttgagtggcatggaaatgggatctggaccaggatcagagggatatgaggatgccgacaacgagaaaagcaagaccgtggaaaatgcccgctccctaacctgctactgcgatggcagttgtccggacaatgtaagcaatggaacctgcgagaccagacccggtggcagttgcttcagcgcagtccaacagctttacgatgagacgaccgggatgtacgaggaggagcgtacatatggatgcatgcctcccgaagacaacggtggttttctcatgtgcaaggtagccgctgtaccccacctgcatggcaagaacattgtctgctgcgacaaggaggacttctgcaaccgtgacctgtaccccacctacacacccaagctgaccacaccagcgccggatttgcccgtgagcagcgagtccctacacacgctggccgtctttggctccatcatcatctccctgtccgtgtttatgctgatcgtggctagcttatgtttcacctacaagcgacgcgagaagctgcgcaagcagccacgtctcatcaactcaatgtgcaactcacagctgtcgcctttgtcacaactggtggaacagagttcgggctccggatcgggattaccattgctggtgcaaagaaccattgccaagcagattcagatggtgcgactggtgggcaaaggacgatatggcgaggtctggctggccaaatggcgcgatgagcgggtggccgtcaagaccttctttacgaccgaagaggcttcttggttccgcgagactgaaatctatcagacagtgctgatgcgacacgacaatatcttgggcttcattgccgccgatatcaagggtaatggtagctggacacagatgttgctgatcaccgactaccacgagatgggcagcctacacgattacctctcaatgtcggtgatcaatccgcagaagctgcaattgctggcgttttcgctggcctccggattggcccacctgcacgacgagattttcggaacccctggcaaaccagctatcgctcatcgcgatatcaagagcaagaacattttggtcaagcggaatgggcagtgcgctattgctgacttcgggctggcagtgaagtacaactcggaactggatgtcattcacattgcacagaatccacgtgtcggcactcgacgctacatggctccagaagtattgagtcagcagctggatcccaagcagtttgaagagttcaaacgggctgatatgtattcagtgggtctcgttctgtgggagatgacccgtcgctgctacacacccgtatcgggcaccaagacgaccacctgcgaggactacgccctgccctatcacgatgtggtgccctcggatcccacgttcgaggacatgcacgctgttgtgtgcgtaaagggtttccggccgccgataccatcacgctggcaggaggatgatgtactcgccaccgtatccaagatcatgcaggagtgctggcacccgaatcccaccgttcggctgactgccctgcgcgtaaagaagacgctggggcgactggaaacagactgtctaatcgatgtgcccattaagattgtctaagcagctgtttgtagtctcgttttaggtttaacctaagttgcatttagttttctgtttttgttcaacttctgttgaatacgcagttccgaccttttgtccggaaattcatagttaggttctaatcgtaagttgcttgtacgtgagcggagtaaagcagaggatccttcagaggtgcctatactacggttacttaaaccgtcgcactgattgtaagctagagtttagatataagttggcaggagctagttactaaggccccttgcaaaatctttggttagaaaaatgctttaactatttgagaaatatagggagtattttggatgacacctattcatgtcgatgtacataaatatgagatcaaaacaaaaaatcaatcgaaagaatcgaaatttatatgtaacatacattaatttttgtgccagcttttgtacgctttaactaaacgagttaagtcgcccattctttgacccccgaggctttagcctcaacatagaacatgtccttatatgttttgtttgtatctagtgtttaagtgtaaactttgcagactttgtgcaagtaaatgctgccttttgtaaaatccacggaattagttgccttaagacaaagtgtaaagacaggagccaacagacaggagcccgactcccttcctccccttttagtagcacatatttttgtatttataaccagagatatatagaactggcagttgcgtatctcgagaagtgcacttgtgtcggctcttttgttttgtgtaaatagcaaagatgtttataggccgctaaccatacatatatatagtatatatattatatattatcgttataagcgattctgtaaatactatatatgtatctttatctgtaaccgtttaacttatatcttatcgttcttatcatgtaaccttgtttaagctagagttagatgactagcctgtaagagcaacaagtaaactatatgaactagatggatatgtatctttcagttttttttctgtttcattattactgctcgcagaccacaagaactaaagttttgtattaaagcggttagttaatttatttaaaaataataaaaaattataattaaaccca

SEQ ID NO: 33489 - protein, 546 aa, DROSOPHILA
MGSEFSANVQPDVEAMAAAALSGMEMGSGPGSEGYEDADNEKSKTVENARSLTCYCDGSCPDNVSNGTCETRPGGSCFSAVQQLYDETTGMYEEERTYGCMPPEDNGGFLMCKVAAVPHLHGKNIVCCDKEDFCNRDLYPTYTPKLTTPAPDLPVSSESLHTLAVFGSIIISLSVFMLIVASLCFTYKRREKLRKQPRLINSMCNSQLSPLSQLVEQSSGSGSGLPLLVQRTIAKQIQMVRLVGKGRYGEVWLAKWRDERVAVKTFFTTEEASWFRETEIYQTVLMRHDNILGFIAADIKGNGSWTQMLLITDYHEMGSLHDYLSMSVINPQKLQLLAFSLASGLAHLHDEIFGTPGKPAIAHRDIKSKNILVKRNGQCAIADFGLAVKYNSELDVIHIAQNPRVGTRRYMAPEVLSQQLDPKQFEEFKRADMYSVGLVLWEMTRRCYTPVSGTKTTTCEDYALPYHDVVPSDPTFEDMHAVVCVKGFRPPIPSRWQEDDVLATVSKIMQECWHPNPTVRLTALRVKKTLGRLETDCLIDVPIKIV

SEQ ID NO: 33490 - DNA, 2366 bp, DROSOPHILA
cttgttgttattctagaaaagaaaatacaaatacgatgtgggaatctttcgggacggtcacagatagttgattctggtggtcagtatctgatttttggatacgctacaggggtttttcgagaaaaatattaactaattttaatttaattaactaatctatatataaatatatatactatactatactatactataaatttcttgaatatattactatttacaaattatttttaaaaatcctcgaaagttagcagggcttagttccagaaatgcccgacaggtggccattcggtactttattagatatatttaagactgaattttgctaaatttggctatatatttgtgcatttttgttgcacaaacttaaaacttattgacccaaaacaatctatagactgtgtttctgagaccccctcgatttcgctttctatataatgcacctataagaaatgtgaggaatgacaagttcatagcaggcgcataagatgggccctgagacttttataagatcagacgacaagtgcacttcattgtattcttcttcgcagaaagggaaatttatttatgcaatgagaattgcactatatacaataatattgcccttctataggaattcgtccgtgtagataagcaaagcggaaaacagaacatagattattaaaataagttagaaaaagtactatgggtagtttcttagaaatctacgtaaaaaagctcaagattaaaagggcttacatagcttagatgcaagcaatgcaaaatcagtgcaaaaaacagttcttagaatgcaatcaatacatttgttgactctacataatttaagcctttataattagttgaaaaacgagtataaatatggatcgagtgctgtgctaataatcagtttcgagtttgaaagccaagcctgcactatgaatcctacaatttatttgaggtaagtacacgtatttcactttaaataagtatcttagtattttctatttcttttagctgccttatggtcttctcagtgtttctgctgggaaaggtaaatgctgagaacgaagatgagttcgtcacagaaaaacagcgcctatttagtgtgtatggtgattcttcggttgatgaggccaccaaataccggaacatcgacagcctggtcactttctacgataagtacttcactcgacttcagttgaaaccggacttgaacacacgcgcccatgatctcttgaggcgttacaaggaggaaaatgctcgtgtggtcttggtggacggtactcccgcacaaggcggattctggttgccactggtgaagctactcattgtccagctgggcgtcgaaattgcctctgagggagtcaagcgtgctattgaatcctaatcccttccattaggaatcaaatcaaattggatgtttattcaatatcatatgtaaaaatttaaataaatctttttgagcaaagaaattatactttccaacccattccaataaatatatacttccaatttgtggtttggttatatattttatacgtagtatttacaaattaatttatttgctgcttgcgatatatgaaaataccaatgtacaatgtttatactcgtaattgaatcgttagctaaacacttagctaaaatgtgagtgggtgaggttgccttcgtcaccaggttaaaattcgaaaaacataaacctgctgtgaaaaatgcatatatacttaaactctagatacgtcgatccttaaatttctgtacagttttgggatttgcgatcgggatagagaccacatctatggttaatgctaaacaactgactcttaagtaagctcaatacgattaagcttaggcgattacaactaggttaccaactagacatagaaacgctagccatgcgcctggaatccgaattcctaaacgatctgcacggcggcatgtggtttctcgatgaggctactctgtgcctccttgtccttctccgcattccggccgattgagacgtgctccggttttagatagtaatgcggcggcggaggctgcgatgtggcttgaaggcccgccttcttccgacgctcgcggaggaagtgcagtcgcacatagttaatgggtatatcgacgctatcggcgcccacgccctcggcgtcgatgaacacgccgcgcaccaggatggaattggagcacttgagggcagcgaggagcaggaaaggaacgatatgtgtcagccagaagctcagcagcttgttatctgaaggatatagaaacatattaatatgattacattactacagccccgaataaaccatcttacctggatacagatacacatccagcagattccagatgccgcgccaggcgttcacagctccaaagaaagtcattagatagta

SEQ ID NO: 33491 - DNA, 366 bp, DROSOPHILA
atggtcttctcagtgtttctgctgggaaaggtaaatgctgagaacgaagatgagttcgtcacagaaaaacagcgcctatttagtgtgtatggtgattcttcggttgatgaggccaccaaataccggaacatcgacagcctggtcactttctacgataagtacttcactcgacttcagttgaaaccggacttgaacacacgcgcccatgatctcttgaggcgttacaaggaggaaaatgctcgtgtggtcttggtggacggtactcccgcacaaggcggattctggttgccactggtgaagctactcattgtccagctgggcgtcgaaattgcctctgagggagtcaagcgtgctattgaatcctaa

SEQ ID NO: 33492 - protein, 121 aa, DROSOPHILA
MVFSVFLLGKVNAENEDEFVTEKQRLFSVYGDSSVDEATKYRNIDSLVTFYDKYFTRLQLKPDLNTRAHDLLRRYKEENARVVLVDGTPAQGGFWLPLVKLLIVQLGVEIASEGVKRAIES

SEQ ID NO: 33493 - DNA, 2666 bp, DROSOPHILA
gcctcaccaacacacacactcacatgcactgcaacacacacactcacacacacacacgtgcggggcgcggatacggattttcctgcgtcacttttcaagcgcttttcctgctggaaatcttgcgtgcccgcttttcaattgttgtttagggcaaactgaatacgtttgggcccccactgttctccatttcacaatcgctggccaaatagtaatgcctgtttagcggaactcgaaaattttcacgcattcgggcagccgattttcgggggcttaatttcacacggttcgattgcgtgcgggcacttgataaacgcactgattgctgtcgaaagattcgcgcttgtttttcaaccatcaattggcgttgcaacgatgcgtttatcctgtttattttgtacaaaaaacttcgtaattattaaatttccacgaacaataacaagcacacagtggtagccatttttattttccagccggtgttgccagacgtccgcggcccgaaattccctaaatttcccgacatatttgtggttaccagggctgcgaagtagcctgtattggaaatttggctcgagcagagttgtcaattgtttggaaattgtaattttatttaattagtgctaataaatttataaataaattgtattgctatattgtcttttatttttaaacatgtttagcaatcataaatataatggtaacataatttgaacatgttcaatatataaatttcattcacaaatatttttcctgctttaaactattgattttagctggcctcatagcttccagatgaaaaatttgaaaagttattacttaacacacttttctcttaattctgcgtatttagcctcaaaatcattttattattaaatgaaatgattctgtcaaattgtctaggagtgctttttaatatatatttttattatttattttccaaagatcaatcgataatttcgcgaatgctgccaccttcttcgaataaacgatagtattgaatagaatttgttttaggttccatctctatctcagattctgaatttgcaaatgtgagtacataacaaggtttttctttaaaaaacacggttcaaggggttttggaacttaaaaaaagtaattaaatatcataccagttggccatatcaactccataaatttctggggagaattcattagttgctatgcgtttaatggcagctgcctttgagcaccttacgtaactaccgagcaatataattgatttttgtgattttcattcttttcagcgacatggccaacactccagccacctcctctgccggacccgtgctccgtggcctccacaatgccaccatcaagcgcaacctggccgtttccctgggcctgaccgccgtggtgaccatcgcctacaaaattctggtcaacgatcccaagaaggccgcctacgccgacttctactcgtaaatatagcttaactatgccacatgaatgtcatcatctgatctgttttatccattatccctgcaggaagtacgatgccaacaagtccttcgagcgcatgaaggccgccggtcgtttccagtcctgctaggctatgttatcccaaaacacaagtagtctaagtcaaatgatgttgtagaacaagagttgcgcttctgtattgaaaactaaatagatttcagtctacgtacgtgcacgaaggcgttttaatttagagctatcttgtattgccagcaaaagtaaatgtgaaggcaaattatgattaaattctttattatttactcgtatttacaaacttagccaagtaatgcacaaaacaaacacacaaaactataaggccacacaaaccggaccacatctaaaacctaatggcaaagtccttgtagtccagtcggctgagattgccctggttccggacctcacagcgatcgatttggcagccgggtgagccctcagtggacagccaggtgatcctaagagtagatttaatcagaaaatattagcatggagagtgtaaactattccggtttactcacatcttgtccacctcctccttgggcccctgcatcttgcccacaatggtgccctgtttgctgttcttcacccagccagtgattcccgccttggtgcagcgatcgcgggtgtctttcgtgagattcaggcctgccggtcgaaaaaagcaatggtatatgttttatatagtctctagtgcatgtggaatggggcgtgaaacaaagccaaggacagtttggggccccaaagtaactagctactgagggtttatttttaggcaaccattcgagagagctatgctatgcttgattcccgattcctatttcccatgaaaccacaccttgtacatgtccatagacctcgaaatccagcgtcaccagcagtcggatatccggaatgcccatttcgatcgatttcgatttggttatgtaaatttggcagcaaactggtcgttattttagaatttcctgattttatcactttactcgcacttgaaaaagccctgcaacctggtttatattctatgcagacttgaatccccaattaagcatatatattttttgaaaattattttactcgaagcgattttttccgccgcgatcgctagcttgattttcaacaaaccgtcgcaaatttaaaactaaaatgccaagtagcatatcaattggtttctattt

SEQ ID NO: 33494 - DNA, 383 bp, DROSOPHILA
atttgttttaggttccatctctatctcagattctgaatttgcaaatcgacatggccaacactccagccacctcctctgccggacccgtgctccgtggcctccacaatgccaccatcaagcgcaacctggccgtttccctgggcctgaccgccgtggtgaccatcgcctacaaaattctggtcaacgatcccaagaaggccgcctacgccgacttctactcgaagtacgatgccaacaagtccttcgagcgcatgaaggccgccggtcgtttccagtcctgctaggctatgttatcccaaaacacaagtagtctaagtcaaatgatgttgtagaacaagagttgcgcttctgtattgaaaactaaatagatttcagtctacgta

SEQ ID NO: 33495 - protein, 79 aa, DROSOPHILA
IDMANTPATSSAGPVLRGLHNATIKRNLAVSLGLTAVVTIAYKILVNDPKKAAYADFYSKYDANKSFERMKAAGRFQSC

SEQ ID NO: 33496 - DNA, 7295 bp, DROSOPHILA
aaataaattggtaattgtatgcagatttagacgagttcaatagttagctagcactgtttactgtttactctactcgaattagattttctgggaatttattctgaacgcaaatatgtttgtagagtggggaaacccaaaaattcactgattggaacttcaaatatacatatgtacgtatgtgtatgtactttaatgctatacattaaaatcaaatcaataagctacatcttaaggcaaatacttttgcttccttatcaatgttcttaaatttttaattacctttcataatgttaattaaatacgtaaggaaatttcctctagttatccactcttacatgcaacttaaaaaagtgtcttgcctaagcttttcattcaaatcagttttcccaactccccagccatttgcatgtgtgcatttgaatgcattctcgattattaataatgtgctgctggttctctgaatattttgtgtaagacgcttgcgtcaccaacccaactggcacacacacacaagcatactcacacgaacacatcgaacccaaaaagggtaaaaaaaaatgaatacaaccagtaccgagaatcggaatcagaatgggaataagaatcgcaatcgaaatcggactcacgcggccaaagcacctcagtcaccttacgtgtgtgtgcgttcttgtgtgtgtttgagcgtcaagagcgaacccgctggcaagagctaccccaccccccgcagcaggcaatcacgttctagtttcgaatatgcagctcgaaacgattttgttcttgccgagattgccgcgctgattactcaacaacaacggcaatgtgatcgcttgcaacgggcatgctggtacatgttcgaagcggcgattgagaaatttcacttttactgcatcgaaccgttcgcaacatgttgcgagcgaacacgctaggtcgcgtgtatcggatgcgtgttgccacaacgtgaccgccgagcagctcgtcggagaaatgcttttacaaattcaattgcgattcagccttctttcgaagcggttcaggcgctcgcgataagtctctagactatactaccaaaccatataatatacagccgatcgggttcacaaccgcgataagcaagtgagagccgtcggtcgagccgttaaaagcatttcggccaagtgcatcaagcgcagaaacgtcgcgttagccaactaaatcggtcaaattggttaaaccccgaactgcacaagtgtttgaaaaacaattttcaaaagatttggataatatctgcaagcgcacacaaaaacaatgccaatttgttcgttctaacaacaaaacattatgtcgattgtctgcacgctggaacagaaagtgaactttttcaaagcggctgcaacgaccaaaaatctgttgatactcaaaaacaatacggatacgaattacatcaataactacaagcaggataatcccagcaacaataaatgtaggtgttcaagtgctacgaaagttataacaaataaatcagtgttacgaaaagtttaaaactatgtgcttctttgagcagcattttcgaactttccacgtttgatcttgaaatctgttgagaatttgtgtgaaaactgatgacaatcacaatatttaaatatttctgctctttttgcgtagtacagtggcaactgttaatcagttctagaatatttactaaacttagtcggctgaaaacaataacacacgaaagattgagacgcaaaacaaaatagcccgaaaaagtgtgggtgaatggggggctgagtggggtgcggtggaatgactggcgaagcttagtcattttgtttttgtgaattttgtcaagatgccgactgcagcgctgctctctgtgttgccctctctgttgctctcccgtttaggggttgtcggcagagtctggccgccagagcgcttaagtgtacgtgcatgtgtgtgtgtgtgtgtgtttgtgtctgcgagcacattgaactgtaaatgccaattcgatggtcatggtgagggtgagtgagaaagaaagagagtgggagaaagatgtctaagggtacgggagcgggggcgcactcacacacagatgtgcaatgtgcgatttcttgtttacattctaacactttgtctgtgtgtgtgtgattgtgctggttcttcgtcgcctttgtcgtctaattctcgctccctctctttctcgctcccactcgccgattcttgcatcattcggcgtaatcattgtgtaaatgcctgtgctaaaaacgaaagcaaacggtaaagctatagacgagggcaagcagcaagggcaaggaccaacgaacaaagaaagttctgcatgtttgtgtgtgcgttgggccagacaagatcgcattagacattttggggacccaacgagttttgcgttgagtggcggacgccttgtcaatttgttagcttatcaaatgctcagcctgattagtattactaaatatgtatatattttctaaatgtcgcatatgtagctagataagaacatttgaaagaaatgccataaataggtgataagtgatattgttttggtagcaggaaagagatattcttcgcaatcttggcttttaattgggggcaaggtcttgtttgtttattattttcggggctgcaaaaagtgtagtctgcttccaggcgcaggaaatgagtgttgtacaaattggtagaacgctttaatttgaattcataacagagaatagttgaaatagtttaaaagatcttaaaagtgctatacaatactttttaaaggtataaataagtttagcaatataataaaataaaatacgtcccttcttaaggaactatgaatgtcaaagagactaacctctctatctttgcattgcagttccccgcatccaagctcaaagcaacaacagccatctgcaacaccagcagcaactgcagcagaaactagcgcagctgcatcactacagccagcagaagctgagcggcagcgactttccctacgggccacgcccccccaccggaggcaaagaggagaagctgctcctgctagcgccgccgggcaaactctatccggaggcgtctgtgtccacagcaatgcccgaggtcctcagcggcacgcccaccaacagccacaacaaagccaacatcgccatgatgaacaacgtccggctatccaatatatcgccgactctctcgatgaacggcagctccaacgaggcttctaactgtaagtgtccgagaatataatgatgcagtggctctgatcatatcaattatctatccatctatagttccaaagcttgagaactaatcctatgcccttctctccttacagtgcatccgttgtccatgtacggaggatccataagtccgcagtcaaatgacagcggcatgtccgacagtctgggcaaatatgtcccgggaagcggctatggagatggaatgatggcccagtcgccctcacagggtggcaatggaccgcagtcggcgttgaccgccgcccagaaagagctcttctcgcagcgaaagcaacgcgaattcaccccggacaacaagaaggacgagagctactgggatcgccggagaaggaacaacgaggcggccaagcggagtcgagagaagaggcgctacaatgacatggttctggagcagcgcgtcatcgagctgaccaaagagaaccatgtgctgaaggcccagctggacgccatacgcgacaagttcaacatctccggcgagaatctggtgagcgtggagaagatcctcgcctcgctgcccaccagcgaacaggtgctgagtaacacaaagcgcgccaagatgagcggcagtggtggctcctcctcgggctcctcgccctcgggcagtggatcgggcgagggatcgcctcaaggtggccacaatggctatccggtgggtccaccactatctccactgatctacggacccaatggcaatgcccggccagaggccacggttaagagtgtccaccacatacatcatgcgggtgttgcgccgccaccaacgcacctacaacagttggttgtgccccagtcccagacacagcatctctaccagccacagccgcagcagcatcagccgcatcagcagcagcagatttcccagccaccgcagcaacaacagcagcagcaggagccaagtcccagtgccggctccagttcgccagtcatctccgatccgcacaaccgcccgccaagcaccaccattgccaatctccaggtgcaactgcagcaggcactaaaccgcaatgtcaggcccgaggatctggacagcttgcgcaaggtggtggccgccggcgctctatacaatgcggcagccgtggtgggagcaccaccaccgccaccatctgctggtctctacgtgcccgctcccagcgcctataaggatcacctggaagcggctgcagcctggagccacaatgtcgaggctgctgtgagcagcagtgctgtggatgcggtcagtagctcatcggtgtccggcagtgcggccagtgtgctgaatctatcgcgtcgggcctgctcacccagctacgagcacatgctctcctccaccacctcctccactctttcctcggcctcctcatcgggagctgtttccggcgatgatgagcaggagcacgaaccagcgcacatggctccactgcagctgcagcgaagcagtccgcagcagggcagcgatgccaacaactgtctgcccctcaagctgcgccacaagtcccatctcggcgacaaggatgcggcggccacggcgctactctcactgcagcacatcaagcaggagcccaactgcagtcgggcatcgccgccggcttggaacgatggcggcgacaattccagcgacgaaagggactccggcatctccatcgccagtgcggagtggacggcgcagctgcagaggaagctactggcgcccaaggaggccaatgtggtaaccagtgccgagcgcgatcaaatgctcaagtcgcagctggagcgcctagagtccgaggtggccagcatcaagatgatcttggcggagtaagcaagcccctgtccaagctggacaggatcacgactaggcggatcaggagagagagcgaagagacagaggctctgaagggatcagagtcgggggagcagagcagtagatggcaaagcagagagttccatggcgccagtagttctcctggacaaagaagttggtttaagcatatgttagtagagatgtccaaaaccgagtgataactattagataccgatgcatgcatgtctccatctctatgtagaactctagggccaggtctggaccacaaggatttgacacaagaccctgtggcccgaaactggccaacacttatctgtgtgtatgtttatctatccactgtattgagtcttgtaatcgtgaatgtttaactatatagatctcgtcaactcggagctaaaaaaaaatccttagggtcagcccaaaagaatttctaatttaacctgtttgttgtatacacacaagctatttgtttgcatagctagctggtgacctgcgatgagcatcggggtcaccagccacgttattgttctcttatgcatcccaagtttccttatgcacagcgaaagtggagaagataaagaattattatgtttgtaagcaaacgttacaaagtatttgctgttgtacatattacacaattaattatatatactatataactatacagatatctatattcctatcatgtacataattttagttgcaagctaagcttattttattttattttattttactttgtattgagtactattattattattattattatgtagtgaaacaaacatatacattacacttaagaaacgcgtgaagcacattcaaaacgtgagagatgaaagaaatctgaaaagaattgatgaataaattctgcaataaataattttaaatatcctcctaccttaatgtttgtcgttcgccatttatttatgttttttgccgcttcggtcacccgtgtggctcacagcgcttcaactaaatgttatcgaagtttataaaactttagaaacaaaactaaaaaagaactctaagccacacaaaaaacacacattttatttgtagaccatctagctgagtagatcgatcgtttggtgtcgtaattcgagcattcacttttaaagctgtattacactttacaaataatcgcagtggagcacacaagaaaatacatatgactactactatatacatacagccctatctatatgcatattaaaataactcgtttgtgttgatcaatgaaaataaactatttataataatgaaacaaaccagcaaaggtcttttactgccaattgtttactgcacttcaatattcgccggtttgttgggtgtgaatcatacacaattattgtatatcagcaaagtgcaagttaatctattacacagctttttaaaaatattacatcaccatcatcgcacgagcttatcgcatattgcagaatgagttagttgaaaacctgaaaactttccaaaatgatttcaaacttcaggtacgtcgagtggtaaagagattatttattcttaataactttgttgccttgtattcatacaacgaaaaaaagttttgaaaatttaaatttatttagaataatatcgtgttacttttcgattctctgttatcattatcattcgaaatacagtataagtataataattaaatattctctgtctttataataaatccttaaacatcacatgaaaagtttttctgttgggtttttgcctttgtttttataagttctaaacactttcctttcgttctttggtatcattttcataattttttcatatcgggaaatcgaatattttccgcttgtttcgttagcctaggaaaaacgtatctagagtccacaaaagttatagacttagatcaagacctgtttataaatttcgttaatatataggtatatataataacttaacaatagtaagtaccatatgttgtggtttttgagggttttggtatctggggattcggttgtaaatacgtgtaaatacagaatttcatttggtgtaagacgatttctcactttctggttgtataaactctccagccttgccttgaagattagcattcgcgatataggtaaagaggtctgtatatatcgtttaactataatatctatatatatataatatatcgcttttcttgtgggtgtgtgttttcgtttggtttgagagtgcatctgtaaattgtaggtacttataaactagctacaacacaacacacatgccacgccatgtaaaattgtagggtatcctgtccgaatttttgg

SEQ ID NO: 33497 - DNA, 3789 bp, DROSOPHILA
aattgcgattcagccttctttcgaagcggttcaggcgctcgcgataagtctctagactatactaccaaaccatataatatacagccgatcgggttcacaaccgcgataagcaagtgagagccgtcggtcgagccgttaaaagcatttcggccaagtgcatcaagcgcagaaacgtcgcgttagccaactaaatcggtcaaattggttaaaccccgaactgcacaagtgtttgaaaaacaattttcaaaagatttggataatatctgcaagcgcacacaaaaacaatgccaatttgttcgttctaacaacaaaacattatgtcgattgtctgcacgctggaacagaaagtgaactttttcaaagcggctgcaacgaccaaaaatctgttgatactcaaaaacaatacggatacgaattacatcaataactacaagcaggataatcccagcaacaataaatttccccgcatccaagctcaaagcaacaacagccatctgcaacaccagcagcaactgcagcagaaactagcgcagctgcatcactacagccagcagaagctgagcggcagcgactttccctacgggccacgcccccccaccggaggcaaagaggagaagctgctcctgctagcgccgccgggcaaactctatccggaggcgtctgtgtccacagcaatgcccgaggtcctcagcggcacgcccaccaacagccacaacaaagccaacatcgccatgatgaacaacgtccggctatccaatatatcgccgactctctcgatgaacggcagctccaacgaggcttctaacttgcatccgttgtccatgtacggaggatccataagtccgcagtcaaatgacagcggcatgtccgacagtctgggcaaatatgtcccgggaagcggctatggagatggaatgatggcccagtcgccctcacagggtggcaatggaccgcagtcggcgttgaccgccgcccagaaagagctcttctcgcagcgaaagcaacgcgaattcaccccggacaacaagaaggacgagagctactgggatcgccggagaaggaacaacgaggcggccaagcggagtcgagagaagaggcgctacaatgacatggttctggagcagcgcgtcatcgagctgaccaaagagaaccatgtgctgaaggcccagctggacgccatacgcgacaagttcaacatctccggcgagaatctggtgagcgtggagaagatcctcgcctcgctgcccaccagcgaacaggtgctgagtaacacaaagcgcgccaagatgagcggcagtggtggctcctcctcgggctcctcgccctcgggcagtggatcgggcgagggatcgcctcaaggtggccacaatggctatccggtgggtccaccactatctccactgatctacggacccaatggcaatgcccggccagaggccacggttaagagtgtccaccacatacatcatgcgggtgttgcgccgccaccaacgcacctacaacagttggttgtgccccagtcccagacacagcatctctaccagccacagccgcagcagcatcagccgcatcagcagcagcagatttcccagccaccgcagcaacaacagcagcagcaggagccaagtcccagtgccggctccagttcgccagtcatctccgatccgcacaaccgcccgccaagcaccaccattgccaatctccaggtgcaactgcagcaggcactaaaccgcaatgtcaggcccgaggatctggacagcttgcgcaaggtggtggccgccggcgctctatacaatgcggcagccgtggtgggagcaccaccaccgccaccatctgctggtctctacgtgcccgctcccagcgcctataaggatcacctggaagcggctgcagcctggagccacaatgtcgaggctgctgtgagcagcagtgctgtggatgcggtcagtagctcatcggtgtccggcagtgcggccagtgtgctgaatctatcgcgtcgggcctgctcacccagctacgagcacatgctctcctccaccacctcctccactctttcctcggcctcctcatcgggagctgtttccggcgatgatgagcaggagcacgaaccagcgcacatggctccactgcagctgcagcgaagcagtccgcagcagggcagcgatgccaacaactgtctgcccctcaagctgcgccacaagtcccatctcggcgacaaggatgcggcggccacggcgctactctcactgcagcacatcaagcaggagcccaactgcagtcgggcatcgccgccggcttggaacgatggcggcgacaattccagcgacgaaagggactccggcatctccatcgccagtgcggagtggacggcgcagctgcagaggaagctactggcgcccaaggaggccaatgtggtaaccagtgccgagcgcgatcaaatgctcaagtcgcagctggagcgcctagagtccgaggtggccagcatcaagatgatcttggcggagtaagcaagcccctgtccaagctggacaggatcacgactaggcggatcaggagagagagcgaagagacagaggctctgaagggatcagagtcgggggagcagagcagtagatggcaaagcagagagttccatggcgccagtagttctcctggacaaagaagttggtttaagcatatgttagtagagatgtccaaaaccgagtgataactattagataccgatgcatgcatgtctccatctctatgtagaactctagggccaggtctggaccacaaggatttgacacaagaccctgtggcccgaaactggccaacacttatctgtgtgtatgtttatctatccactgtattgagtcttgtaatcgtgaatgtttaactatatagatctcgtcaactcggagctaaaaaaaaatccttagggtcagcccaaaagaatttctaatttaacctgtttgttgtatacacacaagctatttgtttgcatagctagctggtgacctgcgatgagcatcggggtcaccagccacgttattgttctcttatgcatcccaagtttccttatgcacagcgaaagtggagaagataaagaattattatgtttgtaagcaaacgttacaaagtatttgctgttgtacatattacacaattaattatatatactatataactatacagatatctatattcctatcatgtacataattttagttgcaagctaagcttattttattttattttattttactttgtattgagtactattattattattattattatgtagtgaaacaaacatatacattacacttaagaaacgcgtgaagcacattcaaaacgtgagagatgaaagaaatctgaaaagaattgatgaataaattctgcaataaataattttaaatatcctcctaccttaatgtttgtcgttcgccatttatttatgttttttgccgcttcggtcacccgtgtggctcacagcgcttcaactaaatgttatcgaagtttataaaactttagaaacaaaactaaaaaagaactctaagccacacaaaaaacacacattttatttgtagaccatctagctgagtagatcgatcgtttggtgtcgtaattcgagcattcacttttaaagctgtattacactttacaaataatcgcagtggagcacacaagaaaatacatatgactactactatatacatacagccctatctatatgcatattaaaataactcgtttgtgttgatcaatgaaaataaactatttataataatgaaacaaaccagcaaa

SEQ ID NO: 33498 - protein, 729 aa, DROSOPHILA
MSIVCTLEQKVNFFKAAATTKNLLILKNNTDTNYINNYKQDNPSNNKFPRIQAQSNNSHLQHQQQLQQKLAQLHHYSQQKLSGSDFPYGPRPPTGGKEEKLLLLAPPGKLYPEASVSTAMPEVLSGTPTNSHNKANIAMMNNVRLSNISPTLSMNGSSNEASNLHPLSMYGGSISPQSNDSGMSDSLGKYVPGSGYGDGMMAQSPSQGGNGPQSALTAAQKELFSQRKQREFTPDNKKDESYWDRRRRNNEAAKRSREKRRYNDMVLEQRVIELTKENHVLKAQLDAIRDKFNISGENLVSVEKILASLPTSEQVLSNTKRAKMSGSGGSSSGSSPSGSGSGEGSPQGGHNGYPVGPPLSPLIYGPNGNARPEATVKSVHHIHHAGVAPPPTHLQQLVVPQSQTQHLYQPQPQQHQPHQQQQISQPPQQQQQQQEPSPSAGSSSPVISDPHNRPPSTTIANLQVQLQQALNRNVRPEDLDSLRKVVAAGALYNAAAVVGAPPPPPSAGLYVPAPSAYKDHLEAAAAWSHNVEAAVSSSAVDAVSSSSVSGSAASVLNLSRRACSPSYEHMLSSTTSSTLSSASSSGAVSGDDEQEHEPAHMAPLQLQRSSPQQGSDANNCLPLKLRHKSHLGDKDAAATALLSLQHIKQEPNCSRASPPAWNDGGDNSSDERDSGISIASAEWTAQLQRKLLAPKEANVVTSAERDQMLKSQLERLESEVASIKMILAE

SEQ ID NO: 33499 - DNA, 5711 bp, DROSOPHILA
agcttcagcagggacttctcgtccagaagtccacactgcgtctcgcagctgcggaacatttggtagagcttctgctcgtacggatcggcggatacctccattatccgtaacccggggaattcagtttgctgccgttccaatcgatcggctgctcaattgcgttttcacttcgctttttttttcttggggggaaaatccacaaacgcagtcaggggtcgaaaacaagaaaagtgaaatatcggggtctatgtgcgtgggtggcgggggaatcacgcgtgttttttggacagcaggctgtttgaggggttactaatactactaatctatgatatgcacttcggaacgcaacataaacactcgcgggtttgcggtttttttgggaatagcgtaatttctagcgagttgataaaaaacaataatgcagtaatagcgagcacggtggcgcgctctggagggcattaagcaaacttgcatcggaggtggcactatcgtggaccattgttcctatcgttatacaactatcgtttaggatttgaatatttatattacaaaataaatagataacaagggagaacgtaatgccatataataaatcgctaactttacttggaaagcttcagctccaaccagaccccttattaaagtagaaaacttgacataaattgaaatcatccgattaacatgttgttttccaataatagattataattatacaaaaagtatatcaaataggaagtgcttcatagcacacacacatatattgtgcgtcattcaaactacaataatttaaaacaaagaaccctatagttttattaataaaattgaactttggcaacaaataaataaataaaaagtaaagttgtacaaaaaattgcttttgtttaaaaattcccaacaacacgtttctatcgcactatcgataaccttgtgcatagccatcgtcaacagtgacagccaatggttctatcgattgtttggcagcactaataaattccatttgcaagctgaaaagcaagaaaaaatacaaaatatctttgagcattgcaaactgttgaaaaatccaactgaaaatcatgtgtatgtgccaccagtgacagccgaagacgccgagggattaactgagttagtggaccctaaccagtccaatcggcaaggggcactacattccgcaatccgagactttttggtggtgacccgtagaaaccacagtctcgcattcatttgtttgcattacggcgcagcgggatcagaggattccgcgtccggccgagatggccatgcactcgtacatgcgccagggatcgggttccggaggaggagcaggagcagtcgcagctggagcaccgccgctggccagcccggacgagatgcacggcttcctgaacgacaagcaggcttgggagcacgccatatccctgtaccagggtcctgatccactcgatcattggtacaactacatctgctggtacgagaatcacgcgcaaagcgatccggagctaaagtaccgcgaaactctggagcgctgcctgacggtgtatgagcacaatgactactatcgccaggatgtccgtttggtgcggctgtggctgaagtacatagccatgcaaacggatccactccatttctaccaggtgctttttcagcgaggaactggtcgccaggtggccgccttctacattggatgggctgcctattacgagtctcgcgaggagtataaggatgcggaggcggtgtttaacttggccttccaggagaaggcgcagagcacttccgagctgcagcacgcccacaccaagttcgcctatgccaggtctcttttttaccagcggcaacagcagcaacaacagcaacaacagcagcaccagcaacatcccccgcaggatgcactgcagcaactcacgaactatgcacagcagcagatgccacagagctataatcaacaccgtccccagccatatcagcagaatgtctatcagcaatatcatccgcaggcgcaggcacatcaagccccacagcctcatcagccggcgccacaacagcaactgccgccagaacaacaggtcccctatcagacacactaccaggagcggccgcgctatgaaccacatcctgcaactcagtccccaacagcaataccaccatcccaagtccagcaacaatcgcattatgctcctgtggcagaggtgagcattaaatttaatatcaaagctacttgataaatactccttttttgttttagtcccattatgcaccagcccaacagtcacagttgccgccgcaacaaactacagtaccgcagttgcacgcacagcagccgcagcagcaacaaaacggcaacggcaatccacctcctcaacaaagtcctccggtgacaaatgaagtggctggcctacgcttgccgcgcaatttccacgcctacgggcgcaacaaccatgagacatggaagccggctctaacgcttgaagagcctgatgatccctcgcgcgtgtgccactatgccaagcagttggtatatccaccaggagcaggcgtcgagtacagtcccgaagagatactagcccgcaagtttaagcagttaatggatcaaaaagccaagccatcggagccgccagaacaagaacagcaaactctttatgattcctacgaaactgagaaatcttactatatgactgctgtggatggagctctttacgggcagaacaccagcagtggtcaggagaatacaggtgaggaagatgaggacaatgacgccgaggagggagaagaggaggaggatggtggtgaagagaacgaggaagatgactctgatgaagaggaggaagacgatgaagaggaagaggagcatagcggaccgtacacaaatggcgtgcagttcagtgcgcaaaccactttcgagcaagaaaatcgatcgattaagatcaagttcaggaaggagcccagcagcacctacagtgcctataccatagagaatgtttaccagcaacaacagcagcagcagcaggagcagcatcaaataatccatcagcctccgcaggcagtacatcatccttcgccggacccggcacctgcttctccgattcccatccagcgtcaacgcaacggaagccaccaccacttccatccctacatgctgggccagacctcgacgccgaagagcgaggcgaatggctatcgcagggcacgcaccaaagttaagcgcagcaagttccagccggatctctgcagcaacagcaactcggcatcctcggtggctgatgtggcctcgagtagtgtgctcgccggagcacctggcacatttaatgacaatgcaaacttttcgttctccagtgccacagctttggataactcaaatagctcgctggccttggctgttgatagacttaacttccgcgacacatcgcaacagcagatcctccatccggtcaataagaccttacaaattcacaacaacaacaataacaccagcaacaacaataatggcactagcaccatggccgatttctccacatttcaagagaactcgtacttcgccactcagcacgacacggaggcccaggagcgtcggctatcgaaggccgttgaaacgatagcccgccacatggacaaggaggccatcgatccgttcaacagcgaactgtgccgcgcttttctcgccaagctagattttccgggtaatcacgatgcccatgccagttacaagattgtccaaacgccactgccaaaaatatccaacactcgcacgctgaacgtcctggaaggcgttacctttagcatcgacaaggaggtgggtcgcggctcatatggctcggtttataaagccactgattctcggaccggcaatgtagtggcgctcaagtatcagaagcccccaaacacctgggagatatacatatgtgatcaggtaagaaaaattatatttaccacttatattaaagtttttttttgccaaaaagatttgggtgttaatacatattgcgtgttttaggtgctgaaacgcatcaaggagccagaggtgttgcctggcgttatggacatttccacggcgatcatcgccccaaacgctagtctaatagccaccgagttctcaccgttcggttcgctgctggacatcaacaacaagatccgccaggcaaccaccaaagtaatgcacgaatcgctggtgatgcacttctccgcacagatctgcaatatcgtggaccacctgcatcgccagcacatcatccatgcggacattaaaccggacaacttcctgctaatgcgtgtgcccaatgtggacagtccgttgccatcgctacgtttgattgacttcggctgtgctatcgatatgaccctgttcccggacggtgagaagaccaagttccggaaggtggtgcaaacggatggcttcacctgcatcgagatgcaggagggacgcagctggtcctacgaaacggatctcttctgcatcgcggcgaccgttcatgtgatgctcttcggtgactatatgcagccgcaaaagaagggctccagctgggaaatacgacaaaagctgccgcgttacctcaaaaagcatgtgtggaccaagttcttcggggatctgctcaacatgcaggcggacaaactgccagcgctgcatgagatgcgtctcatcttcgaggaggaggcgtaccgcatggactccgagctgcagaagcagatacgcaccctatccaacatcctgcatcgacgataaccaatctattcctattcctttctgttaaattgttttgcatataactctgttgaccaagtcacccatttatattgtttcagtttttattttaaaacaattttccctcttcaaagatgataaaaccaaaccgggaaaaactccgcgttctaattttaaactatttttctgcgaacaaactcccttttatttattgttttgatgccaaaaaaaaaaacgaaagcaaaaagtacgctacaaaattcaaaaacattgtaaatattaggcacagactcgatctaaagcaacgtttacgaaatgagtttgtggaaaaaaggccctggatttaaatgtaatttttttatgtacagcacaataaaacaatatattgaaggcaatgtaaaaaaaaaaagaatcgtacataaatatgtttaagattagtgcttgctgtactattgagtaatatataaagatctttaaataatagtgaataaattgacgaaatgttaaagcaaaaaccatatgaattgcagcgcgaaaaaggaaagcagtggtaacccagtttcataaatcaaatgccaaagtggcgaacccataatgtgtgtgttgcaggcaattgtcaatttagtgggggcatgcaacaagtaatagcagcaacagcagcgccagcatcaacaacaatgctgcgcttgacccacttttcctttttgccagtcaaccaaacggcgcacaatttccaccaagcgactggaaaaagttgcaacttttcatgcaacacacacacacatcgacggttggaaaagctgcaacaggcacacaaagtcaaagtcgacgcctgcgctgcggctttttgttgctagttgcttgaaactcgaagcttgcagcttgttgctggctgctcgttcgccaagtgaaagtaaagtgggacaaatgcaattattattgcatctagtaaccgacttagaagtcgtggcgcgaaactgcaacttgcagcctatgcagtatgcagtatgcagttggaaag

SEQ ID NO: 33500 - DNA, 3571 bp, DROSOPHILA
caagctgaaaagcaagaaaaaatacaaaatatctttgagcattgcaaactgttgaaaaatccaactgaaaatcatgtgtatgtgccaccagtgacagccgaagacgccgagggattaactgagttagtggaccctaaccagtccaatcggcaaggggcactacattccgcaatccgagactttttggtggtgacccgtagaaaccacagtctcgcattcatttgtttgcattacggcgcagcgggatcagaggattccgcgtccggccgagatggccatgcactcgtacatgcgccagggatcgggttccggaggaggagcaggagcagtcgcagctggagcaccgccgctggccagcccggacgagatgcacggcttcctgaacgacaagcaggcttgggagcacgccatatccctgtaccagggtcctgatccactcgatcattggtacaactacatctgctggtacgagaatcacgcgcaaagcgatccggagctaaagtaccgcgaaactctggagcgctgcctgacggtgtatgagcacaatgactactatcgccaggatgtccgtttggtgcggctgtggctgaagtacatagccatgcaaacggatccactccatttctaccaggtgctttttcagcgaggaactggtcgccaggtggccgccttctacattggatgggctgcctattacgagtctcgcgaggagtataaggatgcggaggcggtgtttaacttggccttccaggagaaggcgcagagcacttccgagctgcagcacgcccacaccaagttcgcctatgccaggtctcttttttaccagcggcaacagcagcaacaacagcaacaacagcagcaccagcaacatcccccgcaggatgcactgcagcaactcacgaactatgcacagcagcagatgccacagagctataatcaacaccgtccccagccatatcagcagaatgtctatcagcaatatcatccgcaggcgcaggcacatcaagccccacagcctcatcagccggcgccacaacagcaactgccgccagaacaacaggtcccctatcagacacactaccaggagcggccgcgctatgaaccacatcctgcaactcagtccccaacagcaataccaccatcccaagtccagcaacaatcgcattatgctcctgtggcagagtcccattatgcaccagcccaacagtcacagttgccgccgcaacaaactacagtaccgcagttgcacgcacagcagccgcagcagcaacaaaacggcaacggcaatccacctcctcaacaaagtcctccggtgacaaatgaagtggctggcctacgcttgccgcgcaatttccacgcctacgggcgcaacaaccatgagacatggaagccggctctaacgcttgaagagcctgatgatccctcgcgcgtgtgccactatgccaagcagttggtatatccaccaggagcaggcgtcgagtacagtcccgaagagatactagcccgcaagtttaagcagttaatggatcaaaaagccaagccatcggagccgccagaacaagaacagcaaactctttatgattcctacgaaactgagaaatcttactatatgactgctgtggatggagctctttacgggcagaacaccagcagtggtcaggagaatacaggtgaggaagatgaggacaatgacgccgaggagggagaagaggaggaggatggtggtgaagagaacgaggaagatgactctgatgaagaggaggaagacgatgaagaggaagaggagcatagcggaccgtacacaaatggcgtgcagttcagtgcgcaaaccactttcgagcaagaaaatcgatcgattaagatcaagttcaggaaggagcccagcagcacctacagtgcctataccatagagaatgtttaccagcaacaacagcagcagcagcaggagcagcatcaaataatccatcagcctccgcaggcagtacatcatccttcgccggacccggcacctgcttctccgattcccatccagcgtcaacgcaacggaagccaccaccacttccatccctacatgctgggccagacctcgacgccgaagagcgaggcgaatggctatcgcagggcacgcaccaaagttaagcgcagcaagttccagccggatctctgcagcaacagcaactcggcatcctcggtggctgatgtggcctcgagtagtgtgctcgccggagcacctggcacatttaatgacaatgcaaacttttcgttctccagtgccacagctttggataactcaaatagctcgctggccttggctgttgatagacttaacttccgcgacacatcgcaacagcagatcctccatccggtcaataagaccttacaaattcacaacaacaacaataacaccagcaacaacaataatggcactagcaccatggccgatttctccacatttcaagagaactcgtacttcgccactcagcacgacacggaggcccaggagcgtcggctatcgaaggccgttgaaacgatagcccgccacatggacaaggaggccatcgatccgttcaacagcgaactgtgccgcgcttttctcgccaagctagattttccgggtaatcacgatgcccatgccagttacaagattgtccaaacgccactgccaaaaatatccaacactcgcacgctgaacgtcctggaaggcgttacctttagcatcgacaaggaggtgggtcgcggctcatatggctcggtttataaagccactgattctcggaccggcaatgtagtggcgctcaagtatcagaagcccccaaacacctgggagatatacatatgtgatcaggtgctgaaacgcatcaaggagccagaggtgttgcctggcgttatggacatttccacggcgatcatcgccccaaacgctagtctaatagccaccgagttctcaccgttcggttcgctgctggacatcaacaacaagatccgccaggcaaccaccaaagtaatgcacgaatcgctggtgatgcacttctccgcacagatctgcaatatcgtggaccacctgcatcgccagcacatcatccatgcggacattaaaccggacaacttcctgctaatgcgtgtgcccaatgtggacagtccgttgccatcgctacgtttgattgacttcggctgtgctatcgatatgaccctgttcccggacggtgagaagaccaagttccggaaggtggtgcaaacggatggcttcacctgcatcgagatgcaggagggacgcagctggtcctacgaaacggatctcttctgcatcgcggcgaccgttcatgtgatgctcttcggtgactatatgcagccgcaaaagaagggctccagctgggaaatacgacaaaagctgccgcgttacctcaaaaagcatgtgtggaccaagttcttcggggatctgctcaacatgcaggcggacaaactgccagcgctgcatgagatgcgtctcatcttcgaggaggaggcgtaccgcatggactccgagctgcagaagcagatacgcaccctatccaacatcctgcatcgacgataa

SEQ ID NO: 33501 - protein, 1099 aa, DROSOPHILA
MAMHSYMRQGSGSGGGAGAVAAGAPPLASPDEMHGFLNDKQAWEHAISLYQGPDPLDHWYNYICWYENHAQSDPELKYRETLERCLTVYEHNDYYRQDVRLVRLWLKYIAMQTDPLHFYQVLFQRGTGRQVAAFYIGWAAYYESREEYKDAEAVFNLAFQEKAQSTSELQHAHTKFAYARSLFYQRQQQQQQQQQQHQQHPPQDALQQLTNYAQQQMPQSYNQHRPQPYQQNVYQQYHPQAQAHQAPQPHQPAPQQQLPPEQQVPYQTHYQERPRYEPHPATQSPTAIPPSQVQQQSHYAPVAESHYAPAQQSQLPPQQTTVPQLHAQQPQQQQNGNGNPPPQQSPPVTNEVAGLRLPRNFHAYGRNNHETWKPALTLEEPDDPSRVCHYAKQLVYPPGAGVEYSPEEILARKFKQLMDQKAKPSEPPEQEQQTLYDSYETEKSYYMTAVDGALYGQNTSSGQENTGEEDEDNDAEEGEEEEDGGEENEEDDSDEEEEDDEEEEEHSGPYTNGVQFSAQTTFEQENRSIKIKFRKEPSSTYSAYTIENVYQQQQQQQQEQHQIIHQPPQAVHHPSPDPAPASPIPIQRQRNGSHHHFHPYMLGQTSTPKSEANGYRRARTKVKRSKFQPDLCSNSNSASSVADVASSSVLAGAPGTFNDNANFSFSSATALDNSNSSLALAVDRLNFRDTSQQQILHPVNKTLQIHNNNNNTSNNNNGTSTMADFSTFQENSYFATQHDTEAQERRLSKAVETIARHMDKEAIDPFNSELCRAFLAKLDFPGNHDAHASYKIVQTPLPKISNTRTLNVLEGVTFSIDKEVGRGSYGSVYKATDSRTGNVVALKYQKPPNTWEIYICDQVLKRIKEPEVLPGVMDISTAIIAPNASLIATEFSPFGSLLDINNKIRQATTKVMHESLVMHFSAQICNIVDHLHRQHIIHADIKPDNFLLMRVPNVDSPLPSLRLIDFGCAIDMTLFPDGEKTKFRKVVQTDGFTCIEMQEGRSWSYETDLFCIAATVHVMLFGDYMQPQKKGSSWEIRQKLPRYLKKHVWTKFFGDLLNMQADKLPALHEMRLIFEEEAYRMDSELQKQIRTLSNILHRR

SEQ ID NO: 33502 - DNA, 3785 bp, DROSOPHILA
gcgactatcgaaagcaggtgaataatttgaagatagcccacgagttttccagtaacatcatagagaaaaggaggagcctcttcaaaagcaaccagcttggtcaagaggatgaatttggcaagaagcagcgatacgccatgcttgataccctgttagcagccgaagcagatggtcagatcgatcatcagggtatctgcgatgaggtcaatacctttatgttcgagggatacgatactacgtccacctgtctaatatttaccctattgatgctggcactccacgaggatgtccagaagaagtgctatgaggagatcaaataccttcccgatgatagcgacgatatcagtgtgtttcagtttaatgaactggtctatatggaatgtgtgatcaaggaatctcttcgcttgtttccctcggtgcctttcattggacgtcggtgcgtggaggagggtgtggtcaacggtttaatcatgcccaagaacacccaaatcaacattcacctttacgaaatcatgagggatgcccgacacttttcaaacccaaaaatgtttcaaccggatcgattctttccggagaacacagtgaatcgtcatcccttcgcttttgtgccatttagtgcgggacaaaggaattgcattggtcaaaagtttgctatcctagagattaaagttcttctggctgcggtcatcaggaattttaaaatattacctgttactcttctcgatgatcttacttttgaaaatggaattgtgctgcgaacgaagcaaaatattaaagttaaactggtgcatagggaaaataaataagccaataagcttgtttatagagcatgtctacttttataaattcaatggcgtcgtagtatccaaaccaaacagattttattataacagaacgtcaaaacacaatttctagaaataaacaaccattagaaattccgataacaaagagctttttcattggacttttcttttcgttcctcagtgcgttttcaagatcgcagtagttcggttccccaaagcctacaaaatgtggatcgctctgcttgggtcttcacttttgattggggctctttggctcctgctgagacaacttaataaaacgtattttattctttcattatgcaaacgagtgcgaacagcggatggaagtccattggaaagcaaagtgttcgttgttcccggaaaaacgcgatttggcaacaatttggatctactcaatttaacgccaggtataggaaagattggtttatctgtacaaataattattaatatttattacagctaatatttttagctacatacgagagtccactgccaaagccaatggacaaaattatatatggaatttcctatttgcaccagaatataatattgttcgtgccgaagacgctgaagaaatatttcagagcaccaaaatcactacaaagaatatgtcttatgaattgataagaccatttcttggagacgggctgctgataagcataggtgaataatcgtatataatcgtaaatatataataatcccattcgttttagaccagaaatggcacacaagaagaaaaactttgaccccagcttttcattttaatattctgcagtcttttctctctatttttaagtaagtgagagtgacgctttttaacatattacctatttaaataatcgataatattaatttttagagaagagagcaaaaagtttatcaaaatactggacaagaacgttggcttcgagcttgaacttaaccagataattccacaatttactctaaacaatatttgcggcaagcataatcatctatttatatacgaaattgtattattaactatattttcttctatagaaactgccctaggcgtaaaactagatgacatgtcggaaggaaacgagtacagaaaggccatccatgactttgaaatagttttcaatcagcgcatgtgcaatccgctcatgttcttcaactggtacttcttccttttcggagattataaaaagtattccaggatactgcgtacaattcacggcttctcgagcggtatcattcaacgcaaaaggcagcaattcaagcagaaacaacttggccaagttgatgaatttggcaagaagcagcgttacgccatgctggacactcttttggcagctgaggcggagggcaagatcgatcatcagggaatctgcgatgaagtcaatacctttatgttcgggggatacgataccacatcaaccagtctaatctttacactgttattgttggctctgcatgcggatgtccaagagcggtgctacgaagagctacaagaccttcccgaggatattgatgaagtcagtatgttccagtttaacgaactgatccacttggagtgcgtcatcaaggaatcactgaggttgtttccctcagctccgatcattggccgaacgtgcatagaggaaagtgtaatgaatggcttagtcctacccaagaatgcccagattagcatccacatatacgacatcatgagagacgcacggcatttcccgaaaccaaatcaattcctgcccgaacgttttctgcccgagaactctgtgaatcgtcatccctttgcctttgtgcccttcagtgcaggcccaaggaattgcataggtcagaaattcggcgtcctggaaattaaggtgctcctagccgctgtgattaggaacttcaaactcctgcccgccactcagttggaggatctcacctttgagaacggaatcgtactgcgcactcagcaaaacattaaagtgaaattcgaagcaagagtgaagtagtgcataataaatacaaaaatgttttcctgtaaaaatgcctttgtattgaatttgcttgatcgtaacagccaaaaagtaggctatgatatgtgaaatattcaaaatactggttaaagtaaaaaaaaacgtagaaagggtagaaatatgtaaaataagtgtagcaacactcgcatgtgcttgatatgaaaatagaatttacttgtatcccaaaagtaccaacttaaataaaacctgtttttgcgctgagataaaacaaatgaaacataagtagaaaatatgaagaaatatatacaaaataatataaactattttcatagaacccgtctcttaacagcaatgttccatcgatgttatcaaacatgatcctaccgtaaacaatgtaattgtctataattatttatagaaccgatacgaaatcaaatgcacttgcagaaattcctttctacattcttttccaactggcaacgatatgaatgtccaattagaattacactacaatgcctgttgctgagagaatgtagcacttgacataaacaaaagtacacatatgtatataaacaaaactaccacacatagattccaattttttacacaaacaatattctccataatatatggtttaaacaattcagcggaaggtgtccttaacattttgcaccacatactgcatggccttgaacacctaattaatgatttttcctgcttcgatttgagggtggacttcagagaccttgattacaatatggtttcgccaagaaaatgcctaatttaattatatatttctattctgcgcatcgaataacaaaacaaaccgcacgcacacacgcacacaaaatcacatgcactggcagtgcaccaaacacacacacaacagcgcgcatcatggaaaacccttgtgttctgcagctttttcgggaattcggttaaattgcatttaagttcatttactataacgcacactcaccagttgttaagtgcactaaaaccacatttacaccga

SEQ ID NO: 33503 - DNA, 1559 bp, DROSOPHILA
cagtagttcggttccccaaagcctacaaaatgtggatcgctctgcttgggtcttcacttttgattggggctctttggctcctgctgagacaacttaataaaacgtattttattctttcattatgcaaacgagtgcgaacagcggatggaagtccattggaaagcaaagtgttcgttgttcccggaaaaacgcgatttggcaacaatttggatctactcaatttaacgccagctaatatttttagctacatacgagagtccactgccaaagccaatggacaaaattatatatggaatttcctatttgcaccagaatataatattgttcgtgccgaagacgctgaagaaatatttcagagcaccaaaatcactacaaagaatatgtcttatgaattgataagaccatttcttggagacgggctgctgataagcatagaccagaaatggcacacaagaagaaaaactttgaccccagcttttcattttaatattctgcagtcttttctctctatttttaaagaagagagcaaaaagtttatcaaaatactggacaagaacgttggcttcgagcttgaacttaaccagataattccacaatttactctaaacaatatttgcgaaactgccctaggcgtaaaactagatgacatgtcggaaggaaacgagtacagaaaggccatccatgactttgaaatagttttcaatcagcgcatgtgcaatccgctcatgttcttcaactggtacttcttccttttcggagattataaaaagtattccaggatactgcgtacaattcacggcttctcgagcggtatcattcaacgcaaaaggcagcaattcaagcagaaacaacttggccaagttgatgaatttggcaagaagcagcgttacgccatgctggacactcttttggcagctgaggcggagggcaagatcgatcatcagggaatctgcgatgaagtcaatacctttatgttcgggggatacgataccacatcaaccagtctaatctttacactgttattgttggctctgcatgcggatgtccaagagcggtgctacgaagagctacaagaccttcccgaggatattgatgaagtcagtatgttccagtttaacgaactgatccacttggagtgcgtcatcaaggaatcactgaggttgtttccctcagctccgatcattggccgaacgtgcatagaggaaagtgtaatgaatggcttagtcctacccaagaatgcccagattagcatccacatatacgacatcatgagagacgcacggcatttcccgaaaccaaatcaattcctgcccgaacgttttctgcccgagaactctgtgaatcgtcatccctttgcctttgtgcccttcagtgcaggcccaaggaattgcataggtcagaaattcggcgtcctggaaattaaggtgctcctagccgctgtgattaggaacttcaaactcctgcccgccactcagttggaggatctcacctttgagaacggaatcgtactgcgcactcagcaaaacattaaagtgaaattcgaagcaagagtgaagtag

SEQ ID NO: 33504 - protein, 303 aa, DROSOPHILA
MSEGNEYRKAIHDFEIVFNQRMCNPLMFFNWYFFLFGDYKKYSRILRTIHGFSSGIIQRKRQQFKQKQLGQVDEFGKKQRYAMLDTLLAAEAEGKIDHQGICDEVNTFMFGGYDTTSTSLIFTLLLLALHADVQERCYEELQDLPEDIDEVSMFQFNELIHLECVIKESLRLFPSAPIIGRTCIEESVMNGLVLPKNAQISIHIYDIMRDARHFPKPNQFLPERFLPENSVNRHPFAFVPFSAGPRNCIGQKFGVLEIKVLLAAVIRNFKLLPATQLEDLTFENGIVLRTQQNIKVKFEARVK

SEQ ID NO: 33505 - DNA, 3796 bp, DROSOPHILA
ccatttctgcgcgcgcattacaaacttggctcaaattaattcctcaagcccaaatgcgatctggccaagctgcagctaatcaaactttaatcaatgcggcattttgatgcgacattgctagtttttctctttttttctgcagccagttccatagttggaacgatgggaaaatatgccgcttggcctgggaggaaatttgccaagaaattgttattaatctggaatggtcatatgggcaaacaaaaaaaaaaaacgatcgtaagccagtttgaactatttcaaatgcttcgctaacaatttcaatatctgtcaagtgcttcaattaattattatgccttttgatagtaggcagctgttgaatggagaataccataatttttttattttaatctcattaccttaacatttcctatgtatacttataggcactaataattagccagctctactgccaacaaaaataaaaccatatcgctttgaaatcaatagcatgacattatagcttatatgcattaaaaagcaattagttcaatttctgacagtctaaaagctttgcgtgctggaataaataatttttacttttaaatgagttaaccaattatttggttttagactgtttttgttgacacaaccgaacgctttagtattcaccattaagcgattaaattaagcttcaagataatcataaaaatatgactgaccatttaaagccggccatagcatcagtgatataatacttaaaatgttggaatgcttcaaaatggagtcatcattatagacaatccaaaattaaaaaattgcaaagtcgagtataaaaaagaatagaactcaacagcactcaaccacaataattgatataatccaaccatataattggcttcctgataacagaaagctgttttgagattgttattgttttaaacagtatagtacatacaattgattatgattacagaggcttgatgatatgccaaagcttagtgtgtagtgaaattgcctgcagaacggaccgatcggagaattttgcgacaaaatgtggatcgctctgctggggatcccgattttgttggcggtcctaacgcttcttctaaaacacattaacaaaacctactttatactttcattaacgaagcgtgtgcgaaccgaggatggcagtccattggaaagcaaagtggccataatgccgggaaaaacgcgatttggcaacaacttggatatcttgaactttacgccgggttcgttttgttactcaatgcgattataggtttataactacttttcaagttttattacagctagtgtttttaattttgtgcgcgagtccacggccaaggccaagggtcagaattatctgtggtattttctatatgcacccatgtataatgtggttcgacccgaggaagctgaggaggtattccagagcaccaagctgataacgaagaacgtggtttacgaactgattagaccatttctgggagacggactcctgataagcacgggtgattcaatcaatttgtactgcattattataattactaattaatcaatgatttcaagatcacaaatggcattccagacgaaaggctttaacgcccgcctttcacttcaatgtcctgcagtcattcctgggtattttcaagtaagtttgaactattaattaactattgaattcgctcaaatataagtttattttagggaagagtgcaagaagttccttaacgttttagagaaaaatttagatgcagaactggagcttaaccaggttattccgccatttactttgaataatatatgcggtgagctgaatgaagtgataatatttaagaacatttaaactaaaccataccctttatagaaactgctctgggtgtgaagctggatgacatgtcggagggcaacgaatatagaaaggccatccatgccatcgaggaagttctaattcaacgcgtgtgcaatccgctgatgtactacaactggtatttcttcgtttacggagactatagaaagcatttgcagaatcttcgaatagttcacgacttctccagtcgcattatcgaacgaaaaaggcagcaattccagcagaaacaacttggagaagtcgatgaatttggcaggaagcagcgatacgccatgttggataccctgttagcagccgaagcagatggtcagatcgatcatcagggtatctgcgatgaggtcaatacctttatgttcgagggttacgatactacgtccacctgtctaatatttaccctattgatgctggctctccacgaggatgtccagaagaagtgctatgaggaggtggaaaatcttcccgaggacagcgatgacatcagtatgtttcagttcaacaaactagtctacttggaatgtgtgataaaggaatcgctgagaatgtttccatcagtgccatttattgggcgccaatgcgtggaggagactgtggtgaatggaatggtgatgccaaaggacacccagatcagcatccacatatacgacataatgagagatccgcgacatttcccgaaaccagatctgttccagccagacagatttctaccggagaacacagtgaatcgtcatccttttgcatatgtgccttttagtgcaggccagaggaattgcattggtcagaagtttgccattctggagatgaaggtgctcctggccgctgtgattaggaactttaaactcctgcccgccacccagttggaggatctcacttttgagaacggaatcgtgctgcgcacacaagagaatatcaaagtgaagctatcgaaaagggtaaaatgaggaatatttcctagtgtaagtttatggaaaacggtttgccaaagagcttttatttgtaatttgtttagagaaacaaataaaccagtaaaacgattgaaactctaaaacgattgatcgcttgtcttattatctgtcatgtaaaatataacgatttatgattaaacgatgaaatgattgaactaaagatatcctaacatgtaattaatttaattaacacgttcatcacaatcggtaacgtttaaataaattgctggttgcttttttatggagaggatacattgtgatcaatttgcatgtttgtaatagtgaaactaccgactactttatacagctttatagctttatatacaaattaaagcttacgtaaaaaaaatcaaaagccaatatacataaatatcgtaaatttcaaaaaattttgttacacaagactttctaaaaacagtgcagtatttgcaatttaatatacccatcaattgcatgccgcaagggaacatgttttatactaagtacctattgattttacagaactcaattgttccgatcactgagttctaatcagtattcgtcatttatagatcggagcttaatctgagaggtattggaacctctgaccggaatataatataaacgtagaaatgtttttggaagtcctgttcgctgctccacttgtgattttcatttttcgcaagttatgggctcatttgaataggacctatttcatcctgagtctttgcaaacgaattcgaacagaagacggtagtttgttggaaagtaaaatttacgtagcgccgagcaaaacccgatttggaaacaactttgacctcgtaaactttacatctggtaagtgaaaccaaattaacactaaaactatattcaaatcgtttggaatatttgacagaaagcatatttaacttcatgagagatgcatctgcaaaagcgaaaggtcgaaactatctatggtattttttccatgcacccatgtataatattgttcgggccg

SEQ ID NO: 33506 - DNA, 1563 bp, DROSOPHILA
cagaacggaccgatcggagaattttgcgacaaaatgtggatcgctctgctggggatcccgattttgttggcggtcctaacgcttcttctaaaacacattaacaaaacctactttatactttcattaacgaagcgtgtgcgaaccgaggatggcagtccattggaaagcaaagtggccataatgccgggaaaaacgcgatttggcaacaacttggatatcttgaactttacgccggctagtgtttttaattttgtgcgcgagtccacggccaaggccaagggtcagaattatctgtggtattttctatatgcacccatgtataatgtggttcgacccgaggaagctgaggaggtattccagagcaccaagctgataacgaagaacgtggtttacgaactgattagaccatttctgggagacggactcctgataagcacggatcacaaatggcattccagacgaaaggctttaacgcccgcctttcacttcaatgtcctgcagtcattcctgggtattttcaaggaagagtgcaagaagttccttaacgttttagagaaaaatttagatgcagaactggagcttaaccaggttattccgccatttactttgaataatatatgcgaaactgctctgggtgtgaagctggatgacatgtcggagggcaacgaatatagaaaggccatccatgccatcgaggaagttctaattcaacgcgtgtgcaatccgctgatgtactacaactggtatttcttcgtttacggagactatagaaagcatttgcagaatcttcgaatagttcacgacttctccagtcgcattatcgaacgaaaaaggcagcaattccagcagaaacaacttggagaagtcgatgaatttggcaggaagcagcgatacgccatgttggataccctgttagcagccgaagcagatggtcagatcgatcatcagggtatctgcgatgaggtcaatacctttatgttcgagggttacgatactacgtccacctgtctaatatttaccctattgatgctggctctccacgaggatgtccagaagaagtgctatgaggaggtggaaaatcttcccgaggacagcgatgacatcagtatgtttcagttcaacaaactagtctacttggaatgtgtgataaaggaatcgctgagaatgtttccatcagtgccatttattgggcgccaatgcgtggaggagactgtggtgaatggaatggtgatgccaaaggacacccagatcagcatccacatatacgacataatgagagatccgcgacatttcccgaaaccagatctgttccagccagacagatttctaccggagaacacagtgaatcgtcatccttttgcatatgtgccttttagtgcaggccagaggaattgcattggtcagaagtttgccattctggagatgaaggtgctcctggccgctgtgattaggaactttaaactcctgcccgccacccagttggaggatctcacttttgagaacggaatcgtgctgcgcacacaagagaatatcaaagtgaagctatcgaaaagggtaaaatga

SEQ ID NO: 33507 - protein, 509 aa, DROSOPHILA
MWIALLGIPILLAVLTLLLKHINKTYFILSLTKRVRTEDGSPLESKVAIMPGKTRFGNNLDILNFTPASVFNFVRESTAKAKGQNYLWYFLYAPMYNVVRPEEAEEVFQSTKLITKNVVYELIRPFLGDGLLISTDHKWHSRRKALTPAFHFNVLQSFLGIFKEECKKFLNVLEKNLDAELELNQVIPPFTLNNICETALGVKLDDMSEGNEYRKAIHAIEEVLIQRVCNPLMYYNWYFFVYGDYRKHLQNLRIVHDFSSRIIERKRQQFQQKQLGEVDEFGRKQRYAMLDTLLAAEADGQIDHQGICDEVNTFMFEGYDTTSTCLIFTLLMLALHEDVQKKCYEEVENLPEDSDDISMFQFNKLVYLECVIKESLRMFPSVPFIGRQCVEETVVNGMVMPKDTQISIHIYDIMRDPRHFPKPDLFQPDRFLPENTVNRHPFAYVPFSAGQRNCIGQKFAILEMKVLLAAVIRNFKLLPATQLEDLTFENGIVLRTQENIKVKLSKRVK

SEQ ID NO: 33508 - DNA, 2225 bp, DROSOPHILA
aatattttccagtgcaaccacgaagttaaccgaagcattgataaagcccatgtctatggctatcgactatcgctaattgattgagtgccttgcacttgtcgactcgaaacccgcagaccaaacgacgtaattcccccgacgcgtctaatattttcgccactttggtgttgtgttgtgttgtgccttacactctctggcagttacataagccatctatcaaagattgcaaattgctgggtggaaaactcgcggctcttgtgttcgacacatttccaagaactcaaaagcaaaacaaaacacaaacgtgacaatccatgtgggtgcagccaaagaactgcgaccaggggaactgatttcgtatgggcagaacatggcgacaataagcaaaacccaggcacaaagtggagcacgtgcaaattggctatcaatcaatatgcatacgggtaggaaaatgtactgcgatgatatagttcgcatcgcttcaaaagattcgcaattacgtagaaataaaagcaaatgccgactgcatggcaaacgaattgaatggctcccagccaaatggcaaaaatgttaggcctctatgacactaggtcgaaaacatagtaggctattctaatgtaaattcaaacacttccatatagtaacatattttttaataacataaaatgaagaaaattgatgaacagaagcagcgcagtcaaaggatgagctaaagatgccagcttgcaggaacaccatgagcagtcaggagcgcacgcagaacatcaagcgctagataatggaggatgaattgaccttgtgcgaggtcaataccctttcaatcgattatgaggcggccggcaaatgacagtttaacagccgccacggaactagctgatcaatccattattgacgatgtttttggagaagacatcctgatgaaagacttgcagcgtaagaacaccgtgcagcccacttgctcaacaacgacatcgtatcttgtcccatttgctttgagaaaatgaagcgcggtaccattatggtgtgcttggaaccgccatcgtttacttcaaaggacttggacacccgtttctcctcctcgggatcttccacatcacgctgcaccaaatcgaaatcaaattcatcaaagcgaattcttcgcagctccggttacacagagctgaacagcaactcgactactctgctgtccagcgaggacgaacttactccgcgtcagcgcctctagtgcaatctcttcaaacagaccgtcggctgtcccagatgtggcctggagttcaagggccaccagctgaaggcgcatcaatctctctgccagggtcgcaagaagcactaggacggcaccttatacgaaccatacattaaataagtttttcacaatttttcacacagtaaattttcttcatgttatcaaaagtgtgttacaagcaaaatatataaaacaactgattgtaaagtcaaggcatgcttatgtatctaaaatattgcttgtttaaatttcaagtcgattggtgtcataaacgcatctctcagatggtcagtgagtgaaaatcaattgggtgtggtctgggtaactgggcttttcagcggtttgcctgctcattgaaccttgtccaactacaaaatgcttcaagtactgctacatttactgcaaaaatggcctaaaaatcgcctttcaagttgcacttacagtggcccaaagaaaaacgcggccaacattgttgcctgagataagaaaacttggctggcgagaggaaaaacacacaatgaataatgaatggcgaatgtacgccagataaacccacattgcatttgttgtgggttcgggttcatattttcatattcatattaagtgactgattgattgatggcccaggcaacttggaggtttactttcagtttatcgttcggtaagtcacacgtttctttccaaatcgctcgtggttgggatgtcaacttggagattgatggcagaatggggaagaaaaccccaaggcaatcaaaagtgaagtaaaataggagttacgatagccaaaatgggcaattagcaaagtgggggtgcgtttaaagttgtgtttagcgaaagtgaatcacatttcctacatgtaataccatgtttttgctgttttataagatgcttatgcatgaagatggctaaaaatagtatgtgtcacacacattaattagagtaaaactgtatatttcgtaacataaaaatgctatctaga

SEQ ID NO: 33509 - DNA, 225 bp, DROSOPHILA
atgaagcgcggtaccattatggtgtgcttggaaccgccatcgtttacttcaaaggacttggacacccgtttctcctcctcgggatcttccacatcacgctgcaccaaatcgaaatcaaattcatcaaagcgaattcttcgcagctccggttacacagagctgaacagcaactcgactactctgctgtccagcgaggacgaacttactccgcgtcagcgcctctag

SEQ ID NO: 33510 - protein, 74 aa, DROSOPHILA
MKRGTIMVCLEPPSFTSKDLDTRFSSSGSSTSRCTKSKSNSSKRILRSSGYTELNSNSTTLLSSEDELTPRQRL

SEQ ID NO: 33511 - DNA, 2724 bp, DROSOPHILA
aactccgtcgtttgacttttatcgatcaaactccgtcgcctgctttgatttggagtcgattcgattccgagtcacatcctcggttgtcgtcgcttcttggcgacggaatgcaaacacttgtttggctgctagtttcgcgttagttgtgatttgattcgttcgttttgccgcccctcgcaaccaagaaattccattatgtttcgtttcgaatgaaaagccagaggcgcgtgaaattgctttccatatacatttattttcacgcacaccgaaacacgctgaaactgaaactgagtggcggcaacttttcctttttcttggcatctgtcacctggcccaacgagttgttgacgtggtcgtcgggttggctcctcctgttgattgcgaaggtgggccaaactcacctgaacatgtcagagtgtcgaaagtatttcacctgaatatttagaccaggccgaaatatgattttgaaatggcaaaaatttttacacgaaaatagagatatataatcctctatgtggtacattattcaatgtttatttatgaattaaaaatattcgttttaagatttggatagcatcccttactacgttccaatcaatttatctataatatcatcgttcacgaaagttcgaccttttagttggcggcttattgaggtaaagttctctcccttggcataaggaggaccattattggtatccagaaaatacctgcctctggctctgcaattaaatagataaaaagagatctggaaaaataggtgctggcacttacttcggatccacgtgaaaacccatcagctctatatttttatcaggaatgcaaattccctttgcgaagcttttaaaattgggacagtagaagccatagaatccagaaggtgacgaaatagactcggcataatagtctgctgctcggttatggtagcagaaatgagtctccactaaagtcagaacaacgaaaatgaaaaatataggtaaagcagatggccttaatattactaactcttattaatgggtccgcagttgggctgtgatacacccatgttcaagtagaagtccacgtgacccactgcatccagtaagccaagcatcgtgacatccgtgtgcacgacgtccacgaacttggcatcagtgggatcgagctttagagccggatccttgaccatgtaaaatggttttgccggatcgagggctgtaatatgctccagcttgtgttccggaagaaactgcccaatgaagcctgcgacatgggcacctaagcccaagccaattaggtgcagatcctcaattttgaccaatccgctctcgaggagtactcgtagcaactgagcagtacagcgagctacgtatttggcattgtgcaccgcttccgtatagcagggttcataggctagttttggataatccaaggatatcaaattgtaatcctgtgtcaggaacagcggacgtagctgggtattgggactgaaatcgcggtgcccgttgaatccatggatcagaaccttgagcggtttgtggtgataaaattcaaaacgattaagttcaaaaactgaaagcttagttccctcctgattttcttttctgcagatacggatagataatgaaaatcatagtataaaaccattaatcttacgtgtatagccaaaaggaaatgttggcattgggacaaatttcgttttgcagggaaaaacagttcatatcatctaagccagcaacgagcataacactcgagaagcctaaaacacgattactttatgactttattattaactcagcctgaattacctattaagaccaagatgttattcatcattctcttcgattccgttgaggcctttactgatttttttattttccgactttatatgctctaggttccataaaatctttttaattaagtttgtctcgttcaaccgaataagtaaccggaaagcttttctaattgcaaaatatgtgcatctgtagcgcccagggaggagcagtaaaatattatagcagtggaattctgcataaaagttaaatatgattaaattataaaaagaacagaaatagaattttaaaaatcaatttaaaaataaataggaagtcagtaattaattaattcgcggttgacttcgctcctgggcagaacaatttgcagtggtaattacatcgtaaatctagccttaaatttcatgccaccaaaatgtcagcgttcgaattagaacttatgccacaagtgtggccaacactcaactcaagctatttatacagatacacattttgggcattgaaaattatgcaaaaacaatcgaagtgccactgtgtgagtgcactgtggtcgccagagcaacccaacccaacccaacccaacccctcttcccattgtgccattccgtcacctcactgggacattccaaatgtgtttcacgttttgtcataaataataaaactcaaatgaccatcaaagccactactgtgcgcctttgccaaaaaaaaaaatgccgctgccggaaggttacccactcatacagaactatccaaattcgaattcgcatccaaatccgaacccatgcccaaagaaccatagcatcccccacaattggcctgtccatctagcgtgatgtccatttgccagcctgaatgcctgtttgtttgttttaaagcaaaaatctaaaaccaaatcaacatttttcgagaccaaagtggagaggatggaggttgaggatcggatgggtgtgtg

SEQ ID NO: 33512 - DNA, 672 bp, DROSOPHILA
atgctcgttgctggcttagatgatatgaactgtttttccctgcaaaacgaaatttgtcccaatgccaacatttccttttggctatacacaaaagaaaatcaggagggaactaagctttcagtttttgaacttaatcgttttgaattttatcaccacaaaccgctcaaggttctgatccatggattcaacgggcaccgcgatttcagtcccaatacccagctacgtccgctgttcctgacacaggattacaatttgatatccttggattatccaaaactagcctatgaaccctgctatacggaagcggtgcacaatgccaaatacgtagctcgctgtactgctcagttgctacgagtactcctcgagagcggattggtcaaaattgaggatctgcacctaattggcttgggcttaggtgcccatgtcgcaggcttcattgggcagtttcttccggaacacaagctggagcatattacagccctcgatccggcaaaaccattttacatggtcaaggatccggctctaaagctcgatcccactgatgccaagttcgtggacgtcgtgcacacggatgtcacgatgcttggcttactggatgcagtgggtcacgtggacttctacttgaacatgggtgtatcacagcccaactgcggacccattaataagagttag

SEQ ID NO: 33513 - protein, 223 aa, DROSOPHILA
MLVAGLDDMNCFSLQNEICPNANISFWLYTKENQEGTKLSVFELNRFEFYHHKPLKVLIHGFNGHRDFSPNTQLRPLFLTQDYNLISLDYPKLAYEPCYTEAVHNAKYVARCTAQLLRVLLESGLVKIEDLHLIGLGLGAHVAGFIGQFLPEHKLEHITALDPAKPFYMVKDPALKLDPTDAKFVDVVHTDVTMLGLLDAVGHVDFYLNMGVSQPNCGPINKS

SEQ ID NO: 33514 - DNA, 3277 bp, DROSOPHILA
tgcagaatagaacagaagttaaatctactaatttgacacaattgacttgtcagacaattatttcaattttccgctctgtacagaatgtatttcaaacttagctaatttcactttccaatgcgaaatcaatgttttgagacatttttccaaggttttcacacactctgccaggcatatatcatagacttatgaggccttcaaacaattttgacagcagctaatcccccaaaaatgcccacttttctgctctccttgctcactttcgatctttagcataatgtaaatatgtattgctgagttttgaactatatatgttttcactaatatatgtgacaactaaataaaataaatgattgcgcgcgtaaaaaacactccttggcgacttgaaagccgcatatactcacgtcagttccatttttaaagattgtataaatgtttggaccacttccgttaggattcatatctatatctatgtatctatatcctatatctgcgtagtctggcgaaattagctgactacccgttttcgtgaataggtcatgatttatttgtgtttctttagcttatttcagtgacataattgggttggatgttcaggtgattgttttggctaatgaacaaatgatgatttatgattttggacagctacgttgggtagtaaaaaataggtcagcagattctttgttaactgttacgtggtttgcagttctttattacaaaatgcttctctaagaaaaccaaactctgcaagtgtaggacatttaaagctttaaacaaacttaatgtgcaaaagacaaatttcccataatttaataaatttattttaatattaaattctatagtaatatgtgttaaattcttcctttgccagtgtaatatgttaaattaaatcccatagtcccgtccaaaagtctttgtgaaaccatagccacaccgcttgtaaaatcgaaataagcccaaaccgaaagatctcgatcgtctgacccgttttgctgcgaaaatgtccgggcagcaaccgccgccgtacgggaatggaccacgtggctggaatccgcgtgcccacaatcccgcctcgccatcgccctcgtcctttctgtaccgtccaccatcgccgtggacaacggcgcccagtccgccgccgataatctcgggaccccgtccctacggacacgccatgtcgccggcgcccatcaaccaggtgaggggtcagcgcggcagcaccaatataccccatccgcgtccccagtggccaggtggtaaccaatcaccggcgccataccagcagccagcaccaggtgctggtggtgcatactacggcggaatggcgtccagtggtggcgcatcgccggcaccgcgtccctatcggccggctcccctgcagcaccagaactcgtatggcgcccagccgactagctccttccagctgtcgccgacgccatcgcccatcgtttgccaaactccaagttcggacttcaactacagcaatcgacagacgccactgtcgcaccaccagtaccaacagcaaccaccgcaattctatcagcagcagggagcgccagtgatcccgccgcaaccgagacaacacggaggacaaggaggacatggcgggcacggactggcccaggatcagatcgatttcgtgggcgtgccgctggaacctccgcaacctaaatcctatgtgatttacgatgacgaagaggagttcggtccttcgacagccgagattatagcgaatcaatcgcaggactacatcgacgagaagcttgccgaatatcagatgacgatattgcagttgcaaggtgagttgcgatatgatatgatactctatataagaaattaacttaggaacaattttagattaatatattttctacttatacttaaaagcttcatatattatttgaaaggatttccttagaaacaaaaacatattttttgaagtaatttttttcaatcattttacacatttgttcggcattatttctctcagtgcagctgagtcagcggcattctagcattttagtgtgctaatgtgacaaccccttcagcacacgaataatgtgtaaaatatttgattttctcttggcaaagcattgaactttgttgaatcagagcgctattctttattgtgccgcgcgggaaaagcgaatgtaaatgtcattcgaacttgacccagacagcagtggccacagttccactcccttctcctccgcatcacccgcatcctccgaatctttcgaatcatcggaatccgccgtatccgcatcgcactcctgacatcatcgctcgaaagtagactatggcccagatacttggacttgggttcacctttcgtcgttttgggcaccttcagttccgaatgctattttgggccattttagttcattttagtggcttaggtgcgatgggccaaaaaggtaatgacataatgctgtcgccccaatggaaacggaatataagtttttggcaatcgcgcaaattgcaatcgccaatacgggccaaacacatcgaatgccaaatgaatcgatgaattgttatgcgcacatatagattgtacatatatatgtgtgtgtttttaggtgctttttaacaatttgcaagtgccgagaatgagataatttgttatttaatatttggctattctatgtaggtgggtctagaaaatatttgcaaagtccatttgctttggcaatttatatactttagcacttttggtatcacttgcagatcattaaaattagggagttggttattatgcaggatataaattattttaaaattttttaaaattatttttaaagcagtatatacatatagtatagtatagtatagtatagtatagtatgaatatatcattgatttctaaccacaaacttatgttgaatattttatttatttagcttttaaaaacaagctcttctccttatgcgatacatttttctggtttctcatttcgaccgactttatcctggacaatatgtatgtaaaacggatttccttttggccataatcaccggcacatgccatttgtgatcgattgaatgaaagtgcgatcggattttgatttgaatgtgattgtgtgccttttgttcggcgtacttagcctgttgagtggaacggcaatgagatcactattttttattgaaacgcagtctgtgtctgtggcctatacacccgactatgggattattcaaaaatgttgtttatagactgaagcacaacgcagtgttgtgaatgcctatttttttttttttttttgccattttccaatggcgat

SEQ ID NO: 33515 - DNA, 900 bp, DROSOPHILA
atgtccgggcagcaaccgccgccgtacgggaatggaccacgtggctggaatccgcgtgcccacaatcccgcctcgccatcgccctcgtcctttctgtaccgtccaccatcgccgtggacaacggcgcccagtccgccgccgataatctcgggaccccgtccctacggacacgccatgtcgccggcgcccatcaaccaggtgaggggtcagcgcggcagcaccaatataccccatccgcgtccccagtggccaggtggtaaccaatcaccggcgccataccagcagccagcaccaggtgctggtggtgcatactacggcggaatggcgtccagtggtggcgcatcgccggcaccgcgtccctatcggccggctcccctgcagcaccagaactcgtatggcgcccagccgactagctccttccagctgtcgccgacgccatcgcccatcgtttgccaaactccaagttcggacttcaactacagcaatcgacagacgccactgtcgcaccaccagtaccaacagcaaccaccgcaattctatcagcagcagggagcgccagtgatcccgccgcaaccgagacaacacggaggacaaggaggacatggcgggcacggactggcccaggatcagatcgatttcgtgggcgtgccgctggaacctccgcaacctaaatcctatgtgatttacgatgacgaagaggagttcggtccttcgacagccgagattatagcgaatcaatcgcaggactacatcgacgagaagcttgccgaatatcagatgacgatattgcagttgcaagacagcagtggccacagttccactcccttctcctccgcatcacccgcatcctccgaatctttcgaatcatcggaatccgccgtatccgcatcgcactcctga

SEQ ID NO: 33516 - protein, 299 aa, DROSOPHILA
MSGQQPPPYGNGPRGWNPRAHNPASPSPSSFLYRPPSPWTTAPSPPPIISGPRPYGHAMSPAPINQVRGQRGSTNIPHPRPQWPGGNQSPAPYQQPAPGAGGAYYGGMASSGGASPAPRPYRPAPLQHQNSYGAQPTSSFQLSPTPSPIVCQTPSSDFNYSNRQTPLSHHQYQQQPPQFYQQQGAPVIPPQPRQHGGQGGHGGHGLAQDQIDFVGVPLEPPQPKSYVIYDDEEEFGPSTAEIIANQSQDYIDEKLAEYQMTILQLQDSSGHSSTPFSSASPASSESFESSESAVSASHS

SEQ ID NO: 33517 - DNA, 2282 bp, DROSOPHILA
atgaagcaggtcgatttcggcagcttctacagcgatgcgaatgatgacagcgagtccgcagccatacagcagcagctgcaatcacataataaaacaacttctgcagagacgcacgctcacggcaagaacatgtccggcttcgattttagcctgagtgccgtcttcattctggcacagacaatttgctcttgtctggcgggcgtttacaatgagtatctgcttaaagataagggagccgatgtgaatatctttgtacagaatgtcttcatgtacctggactcgattgtctgcaatgcagtcatcctcttgctgcgcggcgagctccttgatgcctttagtccgcagaatctgggcagtattatgcgctttagcgtgctaatcattattgttaacaatgcggctattggcattgtcacgagtttcttcctcaagtacatgaactccattctaaagaccttcgcgagcgctctggagttgctcttcacggcagtcctatgctacttcctcttctccatacccatttacatgaacaccgcgctggccatcgcggttgtatcctacgccatctatctctacacccaaagcccggtggttaatttgggcaaggtgcgtccgctgtccaatttaagtgatgccacgaccaaatcaacggataaacgaaagctgatcgacgaggaagcggcagaatcggacctcgatatggtgtaatgctgtagcttgtcctagacgtaatcttagactgtaaatagttgtggaaaagtgcctgcaaatgttttaaacgccagacgaatgtatttgaccccaggctttgtgcaatgcaatagcaacaggcttgtaaataccaaaacttttgctcctctagtttaagattcttattttaatcagaacataaatgcaatcaaacgaatattgtgcatgcttcttcaagaagctttttattttatggttcatatactatcacatatgtacatggtatatttggatgcctgcttgtcttagcctaaaatggtgtgtccacatcatgtccatcttcctgtttgggcggtatgcgactacgaagcgctatctgcaccgcctggttttcgatgctgcggagatagtagtcacactccttcagatgcttctccatgtcctggactcggtgtgtggcgttgtacttgcaggtctgcagcggcggtccacagtagttcttctcgcacttaattaagtgcttgggcatccggaagagcaagatgcggtgcgatttgtcgtaagggcaaattccgtactcgaaatcggacattttgaaaaagtcaagagccgtttgtcaaaacaacaaattcataaagcttaaggtaccgctatgttttaaagttttagttatcggttgtgttatcggaagtaaggaattttcgatttatttatttttcaaaccagctgtcaagatattgaccttatacggaatacccccgatgaatatagggtcacactgagcagacgcgcgtaaaccaccccgtccctcccttttacttttcattcagcttgaaaatttcatagagttcggtcaattgtcaaatctgctcaaaaccacttaattaccaggtaaacgatggcacgtaccaagcaaacagcccgtaaatcgaccggaggcaaggcgccccgcaagcagctggccaccaaggcggcccgtaaatcggcgccatccaccggcggagtgaagaagccacatcgctaccgtcctggaacggtggccctgcgtgagattcgtcgctaccagaagtccacggagctgctcatccgcaagctgccgttccagcgtctggtgcgcgagatagcccaggacttcaagaccgatctgcgcttccagtcggcggccattggagccctacaggtatggtgtacagcactccctgcaccgtgactatttcatacggtcatgtaataatgcgtctctcccccatttcaaatgcgcaatttgcaggaggccagcgaggcgtacctggtcggtctgttcgaggacaccaatctgtgcgccattcacgccaagcgcgtcaccattatgcccaaggacatccagctggccagacgcatccgtggcgagcgggcctaaatgcccatgaccgccatcttggattggaaaagcagtggcggcaaaactaccaacccacagctgtcgcttggaggggggaactcggagctagaggtggaggtggagaagcggaaaaccaaacccccggccgcagctgccgccgcttagtacttaggtctatctatacttaccgataagtaatcaatacacaatg

SEQ ID NO: 33518 - DNA, 282 bp, DROSOPHILA
atgtccgatttcgagtacggaatttgcccttacgacaaatcgcaccgcatcttgctcttccggatgcccaagcacttaattaagtgcgagaagaactactgtggaccgccgctgcagacctgcaagtacaacgccacacaccgagtccaggacatggagaagcatctgaaggagtgtgactactatctccgcagcatcgaaaaccaggcggtgcagatagcgcttcgtagtcgcataccgcccaaacaggaagatggacatgatgtggacacaccattttag

SEQ ID NO: 33519 - protein, 93 aa, DROSOPHILA
MSDFEYGICPYDKSHRILLFRMPKHLIKCEKNYCGPPLQTCKYNATHRVQDMEKHLKECDYYLRSIENQAVQIALRSRIPPKQEDGHDVDTPF

SEQ ID NO: 33520 - DNA, 2268 bp, DROSOPHILA
tacgcacgcacacgacacacccacacacacacgcacaggcaccgagctacagctgattttgccggttgaaattaatatgattttttttagccgacttaagtgccttctggtgactaaaaggccgcaattcgcagtgttttgtgctcgggaacgttgaatttaatttgaaccacagcgactcttttacaggcgccgtcgatgcagacgtttgaaaagtttcaatggacctgcgctagaggtggcacagcggtcgatactatcgatgacgctcacagcataattgcctaaaaatggacaaataccttgaacagccatgtttcgaaccaaagttttgatgttgccggcatctttagccatgacattaacccaatggctctggcaaattggctaaaattcacgacagctaaaatttgttgtatgtatttccagaaacttcgcgcaattcagttatgcctaatgtttgatttatttgtaaacataacaaccatgctcaggccgtccacttgaggcagcgcgtgtcctggtgcgtttgcaggcatctaacgcaacagtatcgcgttccgcaggcggtgcacgagtacaacgagaagttgccgcaaacggcgcagaaatgccgcagtggcttttgtggagccggcgctgcggcgctctcgtagttgggctgcttgtccttgtcctcctcgagcagttgctggaagttcttgcgatacttgacgagaaagtattcggcgcccttgcgcttgcctttcttctccttgccggtcttcaggctgtcctggaatttgggcaacttcttggacatgacaaggtcggcgtgtgggtcatcgtggtagttgtcctgctccagagcctccaaggctttgcgggcacgccgctggcgggctgtggagtccaggacacgcttcttttcagcgtccttgatgcggttggattcgcgacccgtcatggttgtttttaggtttttacttttggctattggattttatgggttgtgtaggttctaagcgtccttgtcgtgcagcggaaagcttatccgatccatcaagtcgtccactcgcgcctgcaaaacttccacaatgtccgtggagataaacaaatggttctcgtccagatcctggataatgaatttgcgtcccagagccagtttttcgtccaagtgcagcaggaattgtttcatagcaggatcactgcggggattgggttgaatatagcgaaaccaacgcataccaaacgtataccacttaccactccaccagcactcctttcataacatttaccatgttgccagcatttgtttgccgaaattaataaacaatctcaccaattctcagagctgaatgacatattcacagtgaaacgtaggctagaggtggcagtctttactatcgatatttttttgactttacttgataatttaatcaataatttcagcatggcaatataatatttacaatcaacgaaatataacacattgctttaaaccagcacccgatattaactatattatgttagtttcaccgtcggaagtttcgtactttaagaaatatagctattttgccagccctatcagtgctactcactacgaaaagtagacagaagtagcggggtatttgccagtcacacggacaaacaccaaggcaaaagtgtgaggaaatattgaattccaaattaaattcctaattaaatcagaccataagcacgcaatggaaaggctgaccggaaggaatgtggcactactggtgctgtgcctgtgcgccggatacgccctggtgttcgccgagggcgagaaggagataccggttaccaaattcggacagaacatagcgccgacgatgactttcctttactggtgcgttatatgcggggcaattaacataattgataacaatgacctctgtgtttctcaccattgattcgccaaatagctactcctgcggctatcgcaaggcgttcgaggactacgtgggcctgctgggcgagaagtatccgcaaattcaggtgaatggcggcaactacgatccgccgggtctaaactattacctctccaagatgatattcgccctgaagatcataatcattgtgtccgtggtcagtgcggtcagtccgttcaccttccttggcctgaacacgcccagttggtggagccacatgcaggctaacaagatatacgcctgcatgatgatcttcttcctgggcaacatgctcgaggcccagctcatctcgtccggcgctttcgagataacactaaacgatgtgcctgtgtggtcg

SEQ ID NO: 33521 - DNA, 210 bp, DROSOPHILA
atgaaaggagtgctggtggagtgtgatcctgctatgaaacaattcctgctgcacttggacgaaaaactggctctgggacgcaaattcattatccaggatctggacgagaaccatttgtttatctccacggacattgtggaagttttgcaggcgcgagtggacgacttgatggatcggataagctttccgctgcacgacaaggacgcttag

SEQ ID NO: 33522 - protein, 69 aa, DROSOPHILA
MKGVLVECDPAMKQFLLHLDEKLALGRKFIIQDLDENHLFISTDIVEVLQARVDDLMDRISFPLHDKDA

SEQ ID NO: 33523 - DNA, 2456 bp, DROSOPHILA
ctctgagaatggagccaggggagcggagaagccccgctcggcattcataaagtcggtggtcagtccactgatgccctgcttcacctccttgccagcgtcgcgcagaaagtcctcgaaatcatcagtcttctgtgcaaacttggtgtccaaatcgagtttggcatccttagcgtcggcggccaggcgttggacaaactcctgcgcatcgccaaagtccaacttcttttgctcgttggcgaagtagtgctccgtgtgggcattatcgtcctgggcaccaccactcacattgccagtatcgccaccaagtgcagagtcttcgtaggcacgttgcgcctgcttgaagatgtcctcgttggtggcagcggcctcctttttcagttcgtcgaagttccgatccatattctacagtgttttgatttcaaaatataacacttgtgatcaataagaaattttcacagatgtgtttgaatatcctggccttctgattggaacttcgcacacacacacacgtacgcacgcacacgacacacccacacacacacgcacaggcaccgagctacagctgattttgccggttgaaattaatatgattttttttagccgacttaagtgccttctggtgactaaaaggccgcaattcgcagtgttttgtgctcgggaacgttgaatttaatttgaaccacagcgactcttttacaggcgccgtcgatgcagacgtttgaaaagtttcaatggacctgcgctagaggtggcacagcggtcgatactatcgatgacgctcacagcataattgcctaaaaatggacaaataccttgaacagccatgtttcgaaccaaagttttgatgttgccggcatctttagccatgacattaacccaatggctctggcaaattggctaaaattcacgacagctaaaatttgttgtatgtatttccagaaacttcgcgcaattcagttatgcctaatgtttgatttatttgtaaacataacaaccatgctcaggccgtccacttgaggcagcgcgtgtcctggtgcgtttgcaggcatctaacgcaacagtatcgcgttccgcaggcggtgcacgagtacaacgagaagttgccgcaaacggcgcagaaatgccgcagtggcttttgtggagccggcgctgcggcgctctcgtagttgggctgcttgtccttgtcctcctcgagcagttgctggaagttcttgcgatacttgacgagaaagtattcggcgcccttgcgcttgcctttcttctccttgccggtcttcaggctgtcctggaatttgggcaacttcttggacatgacaaggtcggcgtgtgggtcatcgtggtagttgtcctgctccagagcctccaaggctttgcgggcacgccgctggcgggctgtggagtccaggacacgcttcttttcagcgtccttgatgcggttggattcgcgacccgtcatggttgtttttaggtttttacttttggctattggattttatgggttgtgtaggttctaagcgtccttgtcgtgcagcggaaagcttatccgatccatcaagtcgtccactcgcgcctgcaaaacttccacaatgtccgtggagataaacaaatggttctcgtccagatcctggataatgaatttgcgtcccagagccagtttttcgtccaagtgcagcaggaattgtttcatagcaggatcactgcggggattgggttgaatatagcgaaaccaacgcataccaaacgtataccacttaccactccaccagcactcctttcataacatttaccatgttgccagcatttgtttgccgaaattaataaacaatctcaccaattctcagagctgaatgacatattcacagtgaaacgtaggctagaggtggcagtctttactatcgatatttttttgactttacttgataatttaatcaataatttcagcatggcaatataatatttacaatcaacgaaatataacacattgctttaaaccagcacccgatattaactatattatgttagtttcaccgtcggaagtttcgtactttaagaaatatagctattttgccagccctatcagtgctactcactacgaaaagtagacagaagtagcggggtatttgccagtcacacggacaaacaccaaggcaaaagtgtgaggaaatattgaattccaaattaaattcctaattaaatcagaccataagcacgcaatggaaaggctgaccggaaggaatgtggcactactggtgctgtgcctgtgcgccggatacgccctggtgttcgccgagggcgagaaggagataccggttaccaaattcggacagaacatagcgccgacgatgactttcctttactggtgcgttatatgcggggcaattaacataattgataacaatgacctctgtgtttctcaccattgattcgccaaatagctactcctgcggctatcgcaa

SEQ ID NO: 33524 - DNA, 456 bp, DROSOPHILA
atgacgggtcgcgaatccaaccgcatcaaggacgctgaaaagaagcgtgtcctggactccacagcccgccagcggcgtgcccgcaaagccttggaggctctggagcaggacaactaccacgatgacccacacgccgaccttgtcatgtccaagaagttgcccaaattccaggacagcctgaagaccggcaaggagaagaaaggcaagcgcaagggcgccgaatactttctcgtcaagtatcgcaagaacttccagcaactgctcgaggaggacaaggacaagcagcccaactacgagagcgccgcagcgccggctccacaaaagccactgcggcatttctgcgccgtttgcggcaacttctcgttgtactcgtgcaccgcctgcggaacgcgatactgttgcgttagatgcctgcaaacgcaccaggacacgcgctgcctcaagtggacggcctga

SEQ ID NO: 33525 - protein, 151 aa, DROSOPHILA
MTGRESNRIKDAEKKRVLDSTARQRRARKALEALEQDNYHDDPHADLVMSKKLPKFQDSLKTGKEKKGKRKGAEYFLVKYRKNFQQLLEEDKDKQPNYESAAAPAPQKPLRHFCAVCGNFSLYSCTACGTRYCCVRCLQTHQDTRCLKWTA

SEQ ID NO: 33526 - DNA, 11472 bp, DROSOPHILA
cgatttgcctaaattttagcttgattatagcaaagctataaaaatatttcaattacgttcaatgtgtaatcaaagctaagctttagttgttgttatgtaaataatatgagaatacgtaactatagtagggaataatgaaattaactagttgttgtcaaggatgtattggaaaggctacttctaccaaagttatttcatataaaaataaaattaacctaattataaagagtccgctgtaatattttattctatattcttcagattatttgtagtagtcaatttgtttgtggaatattttagcatatatttaagtctgctatttgccagcactgatcaacactgtctttatatcgatacataaaactatcgataatgggaattggcgccaagctcgaaatttttaagcggataaaacttaaaaagcaaactcaaaggacttgaaagtactggaaagagtgtattccgatgttatatttggtacaacaatagaatgagtgtgtagtgtggtcgaaagtgaagtgagctgaggaaaactaagactttccgcaagaccgaacaccacaaaatttataatgcaccatccatccgcccgtcaaatgccatgggaaatgaggtcttcgccggcaaaaccgaaacaatttgagcaagtacaatgcagagccgccttttgtttttattgtgccaattaattgcaccaaaaaccttttgccttttggatgcggcgccttctttatgcctttcacctcgctcttggcgatggggattccgattaagagattcccagaccgccagacgctcgaaaattcgcttaaaatgccatcaaaaggtgggacgacgccacacaccggctacaaaatccaaagcccaaaatccatccgattgcaacacacggactactccattttccgtctcgctttggtaattgaacaataggttttccatctgccagcagacttttccattcgccgctcggcttttcagcttcagttgcattttgtcgctcgcctccagcacgcgcactccacacaattgttgttaaagtttaatagttttatacttttcgcttggttaaacgttgtgctcaagatatttgcaattattcgcatacaaattgcgagcaaatagtgcactcatttgccgcaagcgtagccaaactcaggtaattaaatacaaattgtgaatacttctagctgaaaggtggcgaatttcagctgagaccgacatatttgtgtcgattttgtatttcgctgttgacttgccctcttatcacccaacgaaacacagccacaaaattgttattgttgataagtgagagactcgaacttagagagctttttttttacagggggtgtgtgtgttctattagtacacaaaaaataaaattcggtaataatgtgtgtgcttaaatcgagtaaatcaaacgagtagtaattccaaatgattactttaaactaatgtatctttgagttcttactctcacatataaagtaagtattattattctagtggctagtgaactcagcaaatttttcgctctgtgtacttttaattacttaaacagctgcttggtatttgcttaggccgaaaacaaaagaaacgtgctccatttcgccattgattaaatagtttcacatctgacttgggcatcttaaacgctatccattgaccttgtcaacgcttaaatcaatcccgttcgaagaaatgacgtgaatgcactcaatctggttacaaaaacgtggcaaataagcacatagccgatattaaaggggggggggggaacaaagtggagaaaaacacgtttgttcagctgtgaaattgaccttttatggcctaactcaacccaaaaccgcccaaaactgaacattttgttggagccgtctgagtttgaaagaaatgagcggaaatactttacaatgatagtcgctctaattgctaccaaaagtggcagtggaatcccaaagaaacagagaagataataagggtcagatgggtaaaacaattattttggatgtgggaaatgtttttgggggtcttgcaaagagattttaaaattgtagaaattaaatataagaaattaatggtaaatgcttataaataatatttaattgaagtagtctataataactagaatgccagaaagcttaaaaagataacacttgatttcgcattgatttgccaactgacacagaaattcttatcacctttgatgtctcacttaattgctgatagtgacagaaaatattcaactgaatttctcgcaccttttaaggtgtcaaataaaataaaaattatttaacccaaagacctttgagatcgtatcaacttgtgtaactagaacaggcagatacaatacattgaaaccattgaatccacagaaaccaaaaacgaaaaagatctcaacaaacaaatttcgtaattatccgcggaggaaaaaactgaagaaaaaaaaaacagaaaacacgaaaacaaaaacctgagagttgcatgtctgggaaaatgcttaatttcacttttcatttgggatttgcccagcaaatcagtgcaacaattggcgagcggaaaggagtgaagatcgtaattattaattacgggctgaagaaagttttttaattacccgacgagcgtttaagataatgaagtcgtttatccgaggcattcaattattaaattgcttacattttgaaagtgcaaccagtgattagaaattgattttagctcaatttgtatgcagctcattttgccaatcataattttgcatttcactttcatagtagtaaaatggttagttaactgtctttatatttaaattttttagttgctaatactagcttgaacaaacatttcatgttcaaacatttaatttgattaaaaacacgtctgtaatcttgcaattatttctctctctgcagaaatgatgacgtcgctgcagctggagacgtcactgccggcggtggaggagcaagtgcagcgggagaaggacaacgattccgccgaggactcgcacacggcatccacaacgcccacacgcattccacatcccgccgtggcgcgtttccggcgttccgcttctctgcgcctgcgcgggaatcccgcagagctcggtttacgggctgagcactgtccagccggcggaggcggattcagttcgcgcgccaagctcacagcgatcccatccagtctcgaaacgcgttcgcacccggttcacttgaggcgtaatcgcagctggtgcaatttaggccacaaaacggagcaggaaccggaagtggaggcttccacggaggcactatgcaacgccgcccagtgcttgtcattggataaggaggcactggctccaaaggtgggcaacagcagcatggccaacggcaagccgcgaaatttggtgagttgttgtaggtggattggtgggcggtgggactacacaatattctgtattgattttcactgctggtaattgacgagccgccctcgcacggcgggttaaaggttacgaggtggtggctaccacaatacgcactcgttgtggtaagtaatgagtgtattacgaaactatctacggaactctagaggcattttccgggaattcaggagcactcccaatgaaacactcccactggaaaggcaaaatatgtttagcttacctcatgaaaaggcaactaagtttgttctagacttattaggtaccctggaaagagtgggctttcaggttataagatagtttacactttctgagaactgactagtgcattgattgttatctagatagtttgttttcttcaatagcttgtaattttttattaaatgtgatttttaccgtttataaagatattaaatattaagtgaaaaggtttataacctaccttagcctgcagctttagccaagttagtaatgacttggcatgtttcaagttttgcttcaagtttcctggaaagttacatttaattgatttagctggctaatgccattttgtcacttgcacttttgttcatgtcgtgatgacacgcagcttacaattttgtgctcttcccgccgacagcgatcattaaaccagatacagtacataaatatatatatgtacatatatttgtaccgtgcgaagggaacaagtaagaaacccaaagccgagtttgcataatactggggaaatgggagaaagggagaaagaaagaaggtaaagacaaacacagcttacacacgctgtaccttcaactcaacctctctctcaaccccccccccccccttccttcatgtttggtaccagctgtttcgtttccacttccgtttgttccgcttgccaaattgtacctaggaaacagctgattttcggcttgtttgtgttttctgattctgattcgcggggggttgagagaacaggaaatgcaagtgcgcagcttacgggccacaatatgtaccacccccagcaaccaacacccccccccgctcttttttttgctctctccgcctctggctttaaccacctttttggtatcttcttcgcctgcttcgctctcttcttcgcttcttggccaagtgatttgcgtttcagttgatattttccactcatcgcgttcacaagattcgcggttcggctcacagatattgtttaaacaattcaagcgtgcatttttgcctttagtgcattgttgttgttcgcttagttcgcgttctcaaagtacccaagtgtacctactaagtacagtgtgcgagcgattttaattgaagccaacaactgagggccatggctcataaatggtaattacgcgctttggtcgaggtattttaagccatcattaaaagtgccagttcgttggcccctccactttatttattcataattgttattgattttctacgctccacgttctaattacatcgaaaatggagcattgaatatgtgctgtatttttggggtagaacggaagtggcacgtgtgaatacataattatgtacatacatagaaaatcatgggaaatatttcacaaaaattgtgtccaaatagcttcttttcttaaaaccataatgcttttaaaccagtttttttcaacttttttaaacaaggtggttgagctttttgaacgtcgttgcttgtcatgaaattacagcaattagggatgatttatacagttataaagaaacactctttaaccaccataaatcgcaaaaagtggcagataagtttttaagtcttttttagttagaaaatgaaagctcagtaagtagttgaaataatattgatcaaagtagcgtgtaaaagccattagtatcccattgaattttccaccccttgcgaccctgaaaagtatgcaaagactcggatgtccttttgtgttttagccaaaaataaaaaacaaaacttggccaaaacaagcagcgaaaattgattgccaacacgtgaccaaaatagtgcaaactggcacttggccaagtcggctgaatgggccattacgtgagttttcttctgatatttttcatttttttcacctgcattgtgtccgcccatctctcccctccgttcggaatcaaagtcattgatttttcttggtcagcagctcgattgatgcccacctgagcgccgtgttagccaagttagatgcctgaaaacgtgagagcctctgatggctcaaagacggcctcaagtgcgtaatgcaactaagggtcggttattacgtggccaagtgtgtgctggccccgtttgccggccattattccccctttaaccagtcaggttttggccattgtttagccgtgcgtaaacagtttctccagtgctggccataccagtaaggccataaaaaaatattccccagaacttgggcaattaaatggagcaagaaacccattactgattatgaaataaacataccatgaatgcttagaatgcagtggcagttatagagatttgctttccattcgaacaaatcgctgtcaacgaatcgttgtcagtcgaccaattgacaagttggtcagtgtggcagaaaaagggggctaaatcacttcttcacaacagaatcgatgcagtgcgccatgtcaatgaacctttcacttacttatgcactagttagttaaagtagatgattagttgactgattggaggggggcacttgttgggcttacaaactcatattgaaaaaaagttcatatttaagtacagtagtaatcagaacttatgtgcattttcaatcacattcagaacaccttatttcagtttatatggactcacagaatattttagtggcgcaatggcaagtgtttatttaaggattcttaagtttttagtcaagtgctcaaaacgtgtatttaagaaggcgaataaaaaggatgcgttggcttctcaaacagctgagtacatttttctattcttgagagaaaatcagtgaacactaatagctttggtagaatagttattgaaatgattttgctccagttataaattgtaaatcggagaaattcgtgcatcatttgcagaacttaatgatttaatcgtagcaccaccgatttaagtcagtcggttagtccgattagtccgattagcaaaatgctaaaaactaaatacttaataccccccttggaaaacgcagactaatggtcagttaattgaccacaaaaatgctgctcgattcgtaggagctgcaagaaaaaaaaatatataaaaaaaagggaggggattttcgagagcagcacaacaatgaaagtaagcaaagcccgccgccaatgttttgttaaatctatggcaacaaattgcttttaggggcgttgcaaatgcgaatccaacttgccctgcatttcacgcggctactttttgccattttcttgccaaatctatacaaaatcccatgcacgactgaccagcgaccacgcaacaaaattagaaaatagctaagcagttaaacaagagtgtaaaattgaaaagcaaaaaaaaaaaaaaaaagaaaagaaagaaagattaagatatcgaggggcagccaccacatcggcgaaagatagttactaataccagtctacgatcttccatactccgtctgccatctcccatcatgcagtctctccagttgaacggcggcagtgacatcagcagcagtggcacctccagcagcagcagcaacaacaaggagtcgtcccccaggaccaccaggacgcccaggacaccgcagacaccgcagacgccacaaacgccggccagcggagtagctgcatctgtggcagagacgccacacagctgcattcggcagggcaactgcgtcaaggccaaccaggttaaactttccacgctgcacgagtccaagatttctccgaggactccgcccgttacaccggactcacccagtacctatctggacgatgatatagactcgatgtactcgttcgctaccaccacttcgggtcgctccacgatgtcctgcgagcatccctatgtggccaggtaggtgttgctttaattaaatgcaaatgaaatgctataaatccttgattaacttttaggaacggcaccaccttcagtggtcgcaagatgaagtacgtcgtgcattgctccaactatgcgggtcaggtgggacccgattatctgacgcccacgcagcgggcacagcgccagatccggcggctcaaggagctgctgtgcatcgcgcgacaggatctggagcagaaggatacggagctgctgcgtctgacgcgcgaggtggtggagctgcgcctgttcaaggcatcgctcagttcgccggaggagcgttcggcctcctccgatgcggtcaccgtgcgtgaggcggagctgaagacctcgcaggatgtctcgcccatcgtcgacatggtggacgagggcaacgcaaagggcagtccacgccatctaagccgccagcagcagcagcaggcgaaccactcactgcaggccatgcagatgtcggcggagatgcagagctcctacgcggactccggccatttcgaggacctaaccatgtcgtcggtgcactcgaaggactcgcagacgcagagcgaggcatgcggcacagccacgcccgatggagaagcggatgtgggatgcggagccggcggtgattccgccagcaatctggagaactacgagctgcagcgacaggaactgataagcatgtacgagcatcggatcgaggagctcattcggagtcaggacagcgccactagcgatctgaagcgatcccacaacgacaaggtggaggcgctgctccagaagctggccgagtgcaataccaggtactcggacatggtgcccgactatgagcaggccaagcagcgcatccgtgagctggagaagcagctggaggatttgcagcgcaagctgatcgagcacgaggagaagcagaacaagatgtacctgcacatgtaccagcagggacaggaggcggagcgcatttctcgagcggatcaggtaggcatttactcggatttgaaatgatgcgtaacggttatagcggatgatcctatgtccatttgcaggcactggatttggcacagcgtcaaccggagagcaaggtgtcgatcaatgagctactgcatcagttgcagagcacgcaggacgagttggagaacatacgcgtaagattcttcaatatattcctcatcctattttcggttttgttttgtgtgttgcattttgttgcatcgtgaggcatcttagctcgacaccgccaccagaacaacaagaacacaacgcgacaagaacaccacgcattcgaatcacctacatacatgcatacgtatgtattatacatgtatgatcacattggcttgtgggcgtggcacttcaattgggctgactttgcctggctggaaaagcggcacctaattgaaatgcccgccgatcagtgctcgattacgatcgacacaagcgacattttcgtttaatttcgtttctagttgttaagatcattttgcatataactaattttctagcaagatttactacacacttaaacttacattaaatgcgacatcatttacgttcaattcgtttaatttgtttcatttccattccgttgcgagttcgagtagcccaagtacagtcacgtagtggagtgcggcgagcaagcaagtgcatgcatgcataaccgagtacagttgacacactttcgttcatgtttcaattccaatagcaattccaaacgttccaatcgcatgctggactttgaccttagctaactatctacgtacttctctttggttcagttgtgtatctttttagttcatctaaccgataaaagcaacaactatttctaaatttcaaatatttctgtcgtaaaacaaacaaaaaacaaactatttttgtaggcatcagagtgcagaatgagagagtgcggcagtaatcatgctctccttactgcaaaagaggcgatttctttgtgggtacttggcgcgcgtaaggtttgtaatatccctaaccaaaactaccccaacacccccacccaaaaaattaatcatccctactaactaaactaaatttttaagttattatggaaaaattaccccagcaaaaaaaaaaaaaatgaagacatattttgagttgcaatctatgatttgtgatcacgcacattggctatatcgaacattgggtcctaccatccaaaaaccatccaaaactcccatacctcaccacaccctcgagactaaccagcattttcatccgcattcgcgctcatgggacagggtaaggttattgggttaacatcgaaactacaattttgagatcttgtgaacaccttaatgatttccattttaacatatctatttcgttgttttgtaagtacttgttgttttcgaacaacatcgtttcgtagaggtaacaactagaggtatgttcaacatcattcacacatgacactatggctagatgatacatacatatacatacatatgtatatctcggttcgagaccaaacacccaaagctaatctctatctaaaatccatttagcatgtggttcacctcaagttaacttccaattaaagatcgaaaaagtaagaataaacaaccataaccgctcccgaaaattattcagtgttacatacataacattataacctaaatgttcatatggcatagcactatcaagattaaagcgaatcctttgtaaatacatttgatttcaacgactaaccaccacacactttcgatttttgcgtttgaatactaaaaattctgactaattctcttcacttattcttgcactttttctctctctccactcgactaaaccggactattgtaaaaatgtacacgaaactaatccaacaaaatttagaccatttatcgccgcctgctggaagcccagaagaatcgcacccatgtggatccggaggtgacgctgcagttcctcaagagcgctatcttctacttcctcacggacaaggagaactcccagggccatctgcaggccatcgagagcatactcgagttcaccgatgccgagaagcagaagatcagcgccgccaatcgaacgccaaagtgaggtccttgttcgtcgttacccatggcgtatacttattattaacacttagattgcacgccaaaatgagcaaaacgatgtctacgattttggttcgcgctaaattgcattgttttcagctaattggctggcggcattaatttcaattttattttgttaactgaataattttgttaaattttgcaggcgcccgtgttaagttctctctttggcaacgaagtgtataaaattttcccataagttaatttttacgaacatatatattttgtggtctaaggcttaaggcatactagtacgtcctttttatgaaatacgaacatcttgagataaatacaattttacaaaatctacgtagtttttgtagatctagctaatcaagtgagaataacaccatcatgttttgtggagtttcagtggagttttaatggcaaataaatgaaaaatctgagtaaattgttaagtggcgttatttatttgggtgcatacataagcataatagaaattttatttcacaacttgagaaaataaaaattgatttcggactttatgaaaattttcggcatttatgaaaatataaaggagatttcaaaatctcgataaatttgggttcagttcttagctagttgcgcatccaagtttcacaccttgtcgcgtccacattttgaggtatcatgcttgtatcgagcggcggtcacacttttcgctcttttcgatttttcgtttccggcgtgtaagtgtacaattttgttgctccacgtttttttcctattaatttatatttatctcattttcacgtgcacagaatactgctggcgaatctttcccgtgtctaacacaccaacaacaacagcaaaatggtatggctaccttaaaatccatccggaaatgcacactaaccgcataaccctctttttttttattgacaggccaagcgcaccaagaaggttggaatcgttggtaaatatggtacccgttatggtgcctccctgcgtaagatggtcaa

SEQ ID NO: 33527 - DNA, 2234 bp, DROSOPHILA
ctcgcctccagcacgcgcactccacacaattgttgttaaagtttaatagttttatacttttcgcttggttaaacgttgtgctcaagatatttgcaattattcgcatacaaattgcgagcaaatagtgcactcatttgccgcaagcgtagccaaactcagaaatgatgacgtcgctgcagctggagacgtcactgccggcggtggaggagcaagtgcagcgggagaaggacaacgattccgccgaggactcgcacacggcatccacaacgcccacacgcattccacatcccgccgtggcgcgtttccggcgttccgcttctctgcgcctgcgcgggaatcccgcagagctcggtttacgggctgagcactgtccagccggcggaggcggattcagttcgcgcgccaagctcacagcgatcccatccagtctcgaaacgcgttcgcacccggttcacttgaggcgtaatcgcagctggtgcaatttaggccacaaaacggagcaggaaccggaagtggaggcttccacggaggcactatgcaacgccgcccagtgcttgtcattggataaggaggcactggctccaaaggtgggcaacagcagcatggccaacggcaagccgcgaaatttgtctctccagttgaacggcggcagtgacatcagcagcagtggcacctccagcagcagcagcaacaacaaggagtcgtcccccaggaccaccaggacgcccaggacaccgcagacaccgcagacgccacaaacgccggccagcggagtagctgcatctgtggcagagacgccacacagctgcattcggcagggcaactgcgtcaaggccaaccaggttaaactttccacgctgcacgagtccaagatttctccgaggactccgcccgttacaccggactcacccagtacctatctggacgatgatatagactcgatgtactcgttcgctaccaccacttcgggtcgctccacgatgtcctgcgagcatccctatgtggccaggaacggcaccaccttcagtggtcgcaagatgaagtacgtcgtgcattgctccaactatgcgggtcaggtgggacccgattatctgacgcccacgcagcgggcacagcgccagatccggcggctcaaggagctgctgtgcatcgcgcgacaggatctggagcagaaggatacggagctgctgcgtctgacgcgcgaggtggtggagctgcgcctgttcaaggcatcgctcagttcgccggaggagcgttcggcctcctccgatgcggtcaccgtgcgtgaggcggagctgaagacctcgcaggatgtctcgcccatcgtcgacatggtggacgagggcaacgcaaagggcagtccacgccatctaagccgccagcagcagcagcaggcgaaccactcactgcaggccatgcagatgtcggcggagatgcagagctcctacgcggactccggccatttcgaggacctaaccatgtcgtcggtgcactcgaaggactcgcagacgcagagcgaggcatgcggcacagccacgcccgatggagaagcggatgtgggatgcggagccggcggtgattccgccagcaatctggagaactacgagctgcagcgacaggaactgataagcatgtacgagcatcggatcgaggagctcattcggagtcaggacagcgccactagcgatctgaagcgatcccacaacgacaaggtggaggcgctgctccagaagctggccgagtgcaataccaggtactcggacatggtgcccgactatgagcaggccaagcagcgcatccgtgagctggagaagcagctggaggatttgcagcgcaagctgatcgagcacgaggagaagcagaacaagatgtacctgcacatgtaccagcagggacaggaggcggagcgcatttctcgagcggatcaggcactggatttggcacagcgtcaaccggagagcaaggtgtcgatcaatgagctactgcatcagttgcagagcacgcaggacgagttggagaacatacgcaccatttatcgccgcctgctggaagcccagaagaatcgcacccatgtggatccggaggtgacgctgcagttcctcaagagcgctatcttctacttcctcacggacaaggagaactcccagggccatctgcaggccatcgagagcatactcgagttcaccgatgccgagaagcagaagatcagcgccgccaatcgaacgccaaagtga

SEQ ID NO: 33528 - protein, 689 aa, DROSOPHILA
MTSLQLETSLPAVEEQVQREKDNDSAEDSHTASTTPTRIPHPAVARFRRSASLRLRGNPAELGLRAEHCPAGGGGFSSRAKLTAIPSSLETRSHPVHLRRNRSWCNLGHKTEQEPEVEASTEALCNAAQCLSLDKEALAPKVGNSSMANGKPRNLSLQLNGGSDISSSGTSSSSSNNKESSPRTTRTPRTPQTPQTPQTPASGVAASVAETPHSCIRQGNCVKANQVKLSTLHESKISPRTPPVTPDSPSTYLDDDIDSMYSFATTTSGRSTMSCEHPYVARNGTTFSGRKMKYVVHCSNYAGQVGPDYLTPTQRAQRQIRRLKELLCIARQDLEQKDTELLRLTREVVELRLFKASLSSPEERSASSDAVTVREAELKTSQDVSPIVDMVDEGNAKGSPRHLSRQQQQQANHSLQAMQMSAEMQSSYADSGHFEDLTMSSVHSKDSQTQSEACGTATPDGEADVGCGAGGDSASNLENYELQRQELISMYEHRIEELIRSQDSATSDLKRSHNDKVEALLQKLAECNTRYSDMVPDYEQAKQRIRELEKQLEDLQRKLIEHEEKQNKMYLHMYQQGQEAERISRADQALDLAQRQPESKVSINELLHQLQSTQDELENIRTIYRRLLEAQKNRTHVDPEVTLQFLKSAIFYFLTDKENSQGHLQAIESILEFTDAEKQKISAANRTPK

SEQ ID NO: 33529 - DNA, 3295 bp, DROSOPHILA
ggagctctggtaccagcccacatggagatgatctacgttgacgcgacgcaggcgacgcatcacggtcagctggtacatctcctcgtccatggtctcatcgccgctcttgggaaacgggaagcagttggtgatctccaggcacttgtctaccaccagaccgagcagggcgccctgggcgaggtccatgttgctcgactcctcatggcagtgcttcaccatcttcatgacggcctgcaaggtaaagtgatcgtagtaattatgttccaaaatcaattagcgacagacaactatttgcatttgaacaggggcgtggaaagtagatatatttcggactttcttttaatagtttctctgaagaaaacatttgactgaagttttttgtgctatggtaatgaagagaccggcccccttttccttatagctctacgcccatgtcctcacgaacacccatacaaacacacacaaagcacgcaaatttctgagacagcgcgtggcattaacttttccggctttcgcgccggttcccacgggccaatctcggccaggtcttttggccaacagcactactcaccagtccgtcgcattggacgtagttaatggtattatccgaatcctcggtgcgagcagcatgacgatttgcgcgatttgccatgttgacgaattgtaagcgaaaagacccacgacgtgaactcggctgcagtggtaaaagggcgtttcgcaacaccacaatttttgtgtgggttgaagtgttgaaaagcgtgcactgctttaaaatcagctgttcgggcgagcgataaaaaaaggcccaaaatatattttgtttatcagtggaaaagcaacagaaacaaactcaaaattgtacttcctagaaaaccgagaaacggcccacttgtcacgaacgagcggaacggtactgataactgcggttgccgcaacttgtagctagtcttagttctcttcgcattagcaacgcaacgctggcagtacgaagaccgcagaaatgtcaactaattggcgtgaattgttccccaccaagctcacatttgtgatcttcctgttgtacatgtccctattcataggacagggtatgcagctgccttattaaggctttttacgcaagccaaagccgcaccctaattcctgtctattttgcaggcatctttgtcacagcatctcaggaatcgaataactcctatggctacaataccgtcacggttgtgctgctaaccgaggtctttaaattgatagtctccacctgtctgtattgccgagagtgagtaggagtggaggcgctcctttgtctcgctattaaaccgcgatttcattcacagcaacaacctacgctccctggtgcgcgatgttcagaaggatcggaatgtattgggcttgtacatggtgcccgcctttctctactgcctgtacaacaatttggcctttgtcaacttggccacattcgatcccaccacctactatctgctactgcagctacgtgtcgttgtcacgggcatactattccaaattatcttcaagaagtacctgtcgcaaaggcaatggatctccctcatactgctgacactcggctgtatgatgaagcaggtcgatttcggcagcttctacagcgatgcgaatgatgacagcgagtccgcagccatacagcagcagctgcaatcacataataaaacaacttctgcagagacgcacgctcacggcaagaacatgtccggcttcgattttagcctgagtgccgtcttcattctggcacagacaatttgctcttgtctggcgggcgtttacaatgagtatctgcttaaagataagggagccgatgtgaatatctttgtacagaatgtcttcatgtacctggactcgattgtctgcaatgcagtcatcctcttgctgcgcggcgagctccttgatgcctttagtccgcagaatctgggcagtattatgcgctttagcgtgctaatcattattgttaacaatgcggctattggcattgtcacgagtttcttcctcaagtacatgaactccattctaaagaccttcgcgagcgctctggagttgctcttcacggcagtcctatgctacttcctcttctccatacccatttacatgaacaccgcgctggccatcgcggttgtatcctacgccatctatctctacacccaaagcccggtggttaatttgggcaaggtgcgtccgctgtccaatttaagtgatgccacgaccaaatcaacggataaacgaaagctgatcgacgaggaagcggcagaatcggacctcgatatggtgtaatgctgtagcttgtcctagacgtaatcttagactgtaaatagttgtggaaaagtgcctgcaaatgttttaaacgccagacgaatgtatttgaccccaggctttgtgcaatgcaatagcaacaggcttgtaaataccaaaacttttgctcctctagtttaagattcttattttaatcagaacataaatgcaatcaaacgaatattgtgcatgcttcttcaagaagctttttattttatggttcatatactatcacatatgtacatggtatatttggatgcctgcttgtcttagcctaaaatggtgtgtccacatcatgtccatcttcctgtttgggcggtatgcgactacgaagcgctatctgcaccgcctggttttcgatgctgcggagatagtagtcacactccttcagatgcttctccatgtcctggactcggtgtgtggcgttgtacttgcaggtctgcagcggcggtccacagtagttcttctcgcacttaattaagtgcttgggcatccggaagagcaagatgcggtgcgatttgtcgtaagggcaaattccgtactcgaaatcggacattttgaaaaagtcaagagccgtttgtcaaaacaacaaattcataaagcttaaggtaccgctatgttttaaagttttagttatcggttgtgttatcggaagtaaggaattttcgatttatttatttttcaaaccagctgtcaagatattgaccttatacggaatacccccgatgaatatagggtcacactgagcagacgcgcgtaaaccaccccgtccctcccttttacttttcattcagcttgaaaatttcatagagttcggtcaattgtcaaatctgctcaaaaccacttaattaccaggtaaacgatggcacgtaccaagcaaacagcccgtaaatcgaccggaggcaaggcgccccgcaagcagctggccaccaaggcggcccgtaaatcggcgccatccaccggcggagtgaagaagccacat

SEQ ID NO: 33530 - DNA, 1167 bp, DROSOPHILA
atgtcaactaattggcgtgaattgttccccaccaagctcacatttgtgatcttcctgttgtacatgtccctattcataggacagggcatctttgtcacagcatctcaggaatcgaataactcctatggctacaataccgtcacggttgtgctgctaaccgaggtctttaaattgatagtctccacctgtctgtattgccgagacaacaacctacgctccctggtgcgcgatgttcagaaggatcggaatgtattgggcttgtacatggtgcccgcctttctctactgcctgtacaacaatttggcctttgtcaacttggccacattcgatcccaccacctactatctgctactgcagctacgtgtcgttgtcacgggcatactattccaaattatcttcaagaagtacctgtcgcaaaggcaatggatctccctcatactgctgacactcggctgtatgatgaagcaggtcgatttcggcagcttctacagcgatgcgaatgatgacagcgagtccgcagccatacagcagcagctgcaatcacataataaaacaacttctgcagagacgcacgctcacggcaagaacatgtccggcttcgattttagcctgagtgccgtcttcattctggcacagacaatttgctcttgtctggcgggcgtttacaatgagtatctgcttaaagataagggagccgatgtgaatatctttgtacagaatgtcttcatgtacctggactcgattgtctgcaatgcagtcatcctcttgctgcgcggcgagctccttgatgcctttagtccgcagaatctgggcagtattatgcgctttagcgtgctaatcattattgttaacaatgcggctattggcattgtcacgagtttcttcctcaagtacatgaactccattctaaagaccttcgcgagcgctctggagttgctcttcacggcagtcctatgctacttcctcttctccatacccatttacatgaacaccgcgctggccatcgcggttgtatcctacgccatctatctctacacccaaagcccggtggttaatttgggcaaggtgcgtccgctgtccaatttaagtgatgccacgaccaaatcaacggataaacgaaagctgatcgacgaggaagcggcagaatcggacctcgatatggtgtaa

SEQ ID NO: 33531 - protein, 388 aa, DROSOPHILA
MSTNWRELFPTKLTFVIFLLYMSLFIGQGIFVTASQESNNSYGYNTVTVVLLTEVFKLIVSTCLYCRDNNLRSLVRDVQKDRNVLGLYMVPAFLYCLYNNLAFVNLATFDPTTYYLLLQLRVVVTGILFQIIFKKYLSQRQWISLILLTLGCMMKQVDFGSFYSDANDDSESAAIQQQLQSHNKTTSAETHAHGKNMSGFDFSLSAVFILAQTICSCLAGVYNEYLLKDKGADVNIFVQNVFMYLDSIVCNAVILLLRGELLDAFSPQNLGSIMRFSVLIIIVNNAAIGIVTSFFLKYMNSILKTFASALELLFTAVLCYFLFSIPIYMNTALAIAVVSYAIYLYTQSPVVNLGKVRPLSNLSDATTKSTDKRKLIDEEAAESDLDMV

SEQ ID NO: 33532 - DNA, 2950 bp, DROSOPHILA
cctacatatttatgattatcgtcctgctgctgctgttccaatcgctgtgcctctactgccaacgcctggtgctctacgtccacgaccgatgcttcccgaggaacgtgcgcctgctgcaggaggtggccgaaacggtgggcgatcgtaaggcgccacagcgcctggcggagcagcagctggagcaacagaagcgcagccagaagcgtcgcatcctcgaaccaatccttccgctcgttggtggcctcaattccgaggcctgtcgattttgtgctcacagtccgcagggctactgtcgccatcacttccatctgcaggagctgcagctgcacaggcagaggggttccggtggtgagcaggatttccggcagattcgccgaatcaagcgggagctaaagcggactcttggccagcagcagcagcaactgcaaccgacgagaagctatcgtccagtccgactgagtgccagctggagcagcagttccctgagcagtggttacgcttcactgaccagcgttggatcgcaggagcaggaggaggcgtccttcgatcaggatattattgaggacgttccactggaggaggaagcggagctgcaggacctgccgcaggaggatatccaacagcccctactaaccacttacttgtagataaacgcctcttggtctcatccttgcataaagaatcatccacttggagttcgtctggagaactgaagaacccttcataaaaactatgctataaagatgtattgaaaaaaattgtataacatagttaaccaccagagaaacgaaagaacaaacaactacgagctaaagacgccacccctgaagccgctccttgaacgatttcaacaacttttgagacctggagaagctcatcaaccccaggaagccaaccctattgaaaacttaaccccccccccccctcccaacagttcgaagggttccctttgtcaaattgatacaaattgagaagcgaaaaaatttctagtcgcaacacaatgtctgatgttgaagtggatccacagcaggctcacccccatcccatagcggcaattgccccgaggagacgtcgtccaaccggtcgacgaggaggagtaacaggagggttgtcgtccggttcactggatgcatcatcttccacatcgccgccaccccgtttctgtccgctgcccaatggcgttgaggataactggacgtggagcaagcggcaccgctccaaggaagtggtgctcagaggacccaactcgcggaccgtgcacttccatcccaactggagcaagggcactgccggtgtccagggcaaaagatccctgaataacggacggcattactgggagcttcatgtctcgcagcgcgtctttggcacctcgataatgttcggtatcggtaccaagtcggcacggctacatgccaacgccttccggaacatgctgggcgagaacgaacacggctggggactgtcccacaagggcgtgctctggcacgagggcgtggccctgctgtacacgaagcggttccgcgagaatcaacccacccaaattggcgttctcttcgatggcattgagggcacactcaccttctacaaggatggcaagtgcctgggcgttgctttccgcggattggatcaggtgagtccggttgaattgttcaatcctccaaggatcaggctctagaatctcgcctaactgcccaacagattgatgagcccctgtaccccatcgtatgctctactgccgccaaaacggagatgaccctaaagtgcaccaggagggagttcgtcaacctacaggatcgctgtcgggcggtgatcatgcgccgcgtacgaagcgctgcgcagctggagaagctgaagctgccgctgcccatcgccgactatctgagcgaggtgatcgacgagaagaagccactgcgtcaggtagacaactacgatatactgtgtgatttgtagagctcggatcgtgtccggtcaacgtaagctaagtttatagagtacgtcctcgcccccaggtgaatcagctggagatgtgcattatgaattacgatttgtatgaggcccgtgaatgattttagtgccatcacatattggagtgcccaatgactaccagacgatgcagtggctcctctgggacgtgtgcatttctcgtagtagctttagagcgtgctaagtttaagcattcggaatttgtgtggataatagtcgtccgaccttttgatttgtcttcatttgtagcgaaaatgtgggaaaataggccaatttggtgcaatatttgtgatataagaaatgagaaaaacgtttttcggggcttcaagtgcttgctagaaaatcgcaaaataatctagagctaagcatatttttcggtacagacgagtgtgaaatctagtcaaaaagaacacgctgctaaactaattttgtaaattcgcagacagcaattaaggcctaagtactgtaatgtaacaaaatgaaaatgtgtctagtcataaattgcatataaagcaaagtgtaatttagtaaaaattatttagtacgctttatgtagatttttgtttctgtttatataaattactacacataatgtaattgatacatgacgaaacaaacgaaatagtattgaaaattaaattcgtaagaagtgctcaaaagaatttggcgatattgatttgcaattgtcacttgaatttacataaataaacataaatttactaactatttaaacgaaatacaatactaagcacaggttcactatagcacgatggggctttgaatggcatctagagctcgtcggagagatggttaatgttttgtaaatggtcgccgtagtcggtggcctcactgcccacaaaggtatcgtagttgttgagtatttccaggtaggacaggcgatcgtcgtgatcctcatcggtggagacaaagagatggtccacctcgtcgttggcaattgccgtattgc

SEQ ID NO: 33533 - DNA, 882 bp, DROSOPHILA
atgtctgatgttgaagtggatccacagcaggctcacccccatcccatagcggcaattgccccgaggagacgtcgtccaaccggtcgacgaggaggagtaacaggagggttgtcgtccggttcactggatgcatcatcttccacatcgccgccaccccgtttctgtccgctgcccaatggcgttgaggataactggacgtggagcaagcggcaccgctccaaggaagtggtgctcagaggacccaactcgcggaccgtgcacttccatcccaactggagcaagggcactgccggtgtccagggcaaaagatccctgaataacggacggcattactgggagcttcatgtctcgcagcgcgtctttggcacctcgataatgttcggtatcggtaccaagtcggcacggctacatgccaacgccttccggaacatgctgggcgagaacgaacacggctggggactgtcccacaagggcgtgctctggcacgagggcgtggccctgctgtacacgaagcggttccgcgagaatcaacccacccaaattggcgttctcttcgatggcattgagggcacactcaccttctacaaggatggcaagtgcctgggcgttgctttccgcggattggatcagattgatgagcccctgtaccccatcgtatgctctactgccgccaaaacggagatgaccctaaagtgcaccaggagggagttcgtcaacctacaggatcgctgtcgggcggtgatcatgcgccgcgtacgaagcgctgcgcagctggagaagctgaagctgccgctgcccatcgccgactatctgagcgaggtgatcgacgagaagaagccactgcgtcaggtagacaactacgatatactgtgtgatttgtag

SEQ ID NO: 33534 - protein, 293 aa, DROSOPHILA
MSDVEVDPQQAHPHPIAAIAPRRRRPTGRRGGVTGGLSSGSLDASSSTSPPPRFCPLPNGVEDNWTWSKRHRSKEVVLRGPNSRTVHFHPNWSKGTAGVQGKRSLNNGRHYWELHVSQRVFGTSIMFGIGTKSARLHANAFRNMLGENEHGWGLSHKGVLWHEGVALLYTKRFRENQPTQIGVLFDGIEGTLTFYKDGKCLGVAFRGLDQIDEPLYPIVCSTAAKTEMTLKCTRREFVNLQDRCRAVIMRRVRSAAQLEKLKLPLPIADYLSEVIDEKKPLRQVDNYDILCDL

SEQ ID NO: 33535 - DNA, 2705 bp, DROSOPHILA
tacgtatgttaagtaaatgaaacaaataaataaactagcctcggtcgtatgtccaaaagtataaaataaactatgtgccagcatgttccatttatttttgaaaccgattaaatgcgaaacaatgcaacaaaacgcggtatcgaacgaatatcgaacgaatcgaatcctcaactgctatacaaaacttgtcgcatatcgttttaaaataaactaaaatttataaatacaaattacgaccacaatttcatacaagcctatttagagcaaatattgttgaggataaaaaatcgtatgcccttcagtgataaacttcctgcaagacaaatactgcatactttttacccctaacattgagtgataagatcttcctcaaaagaccagggctaagggtaggctattgtggtggaaaccccgtcgcggagaacccttaaaaaagcaatgccaagccaaggatgagagcgaactcacctcgtgcacttgtgcgcatgccattgcctctctttgtgcggatttgcggtgggggagggggttggttagctgtcaagggggtggcgatgacgattggggtcgccgtggacggtttgcggggcataaagtggggtggaccgagccatatgataatgatatgcagacacacacacgcgcacaaagtccaattggtggttggaagcaggtcgtggaaaataagggtaggcctttgtggggcgattcaagttggaatcgtaaaagtgagttggaaaaaaagtgccagaagccagtgtgacttggacgcaagcggaggcggtcgtcggtgggagttgtaacttcagccagataagaggagctgctttttgtaggtgtggaggagcagcaagacggaaaaaatgtgtgtacctcgaaaaaaaaaacagtgaaaattgcgagctctcgtttggaaagcagcgtgaaatttgcataaactaacaagaccacaaagccaacgggaagtgcaccaccaaaatcagagactcccaagaagcagcagtcttccgccccaccaaaaaaaaaaaaaaaaaaaaggaagaggacacaccaccacccctacatatttatgattatcgtcctgctgctgctgttccaatcgctgtgcctctactgccaacgcctggtgctctacgtccacgaccgatgcttcccgaggaacgtgcgcctgctgcaggaggtggccgaaacggtgggcgatcgtaaggcgccacagcgcctggcggagcagcagctggagcaacagaagcgcagccagaagcgtcgcatcctcgaaccaatccttccgctcgttggtggcctcaattccgaggcctgtcgattttgtgctcacagtccgcagggctactgtcgccatcacttccatctgcaggagctgcagctgcacaggcagaggggttccggtggtgagcaggatttccggcagattcgccgaatcaagcgggagctaaagcggactcttggccagcagcagcagcaactgcaaccgacgagaagctatcgtccagtccgactgagtgccagctggagcagcagttccctgagcagtggttacgcttcactgaccagcgttggatcgcaggagcaggaggaggcgtccttcgatcaggatattattgaggacgttccactggaggaggaagcggagctgcaggacctgccgcaggaggatatccaacagcccctactaaccacttacttgtagataaacgcctcttggtctcatccttgcataaagaatcatccacttggagttcgtctggagaactgaagaacccttcataaaaactatgctataaagatgtattgaaaaaaattgtataacatagttaaccaccagagaaacgaaagaacaaacaactacgagctaaagacgccacccctgaagccgctccttgaacgatttcaacaacttttgagacctggagaagctcatcaaccccaggaagccaaccctattgaaaacttaaccccccccccccctcccaacagttcgaagggttccctttgtcaaattgatacaaattgagaagcgaaaaaatttctagtcgcaacacaatgtctgatgttgaagtggatccacagcaggctcacccccatcccatagcggcaattgccccgaggagacgtcgtccaaccggtcgacgaggaggagtaacaggagggttgtcgtccggttcactggatgcatcatcttccacatcgccgccaccccgtttctgtccgctgcccaatggcgttgaggataactggacgtggagcaagcggcaccgctccaaggaagtggtgctcagaggacccaactcgcggaccgtgcacttccatcccaactggagcaagggcactgccggtgtccagggcaaaagatccctgaataacggacggcattactgggagcttcatgtctcgcagcgcgtctttggcacctcgataatgttcggtatcggtaccaagtcggcacggctacatgccaacgccttccggaacatgctgggcgagaacgaacacggctggggactgtcccacaagggcgtgctctggcacgagggcgtggccctgctgtacacgaagcggttccgcgagaatcaacccacccaaattggcgttctcttcgatggcattgagggcacactcaccttctacaaggatggcaagtgcctgggcgttgctttccgcggattggatcaggtgagtccggttgaatt

SEQ ID NO: 33536 - DNA, 705 bp, DROSOPHILA
cagtcttccgccccaccaaaaaaaaaaaaaaaaaaaaggaagaggacacaccaccacccctacatatttatgattatcgtcctgctgctgctgttccaatcgctgtgcctctactgccaacgcctggtgctctacgtccacgaccgatgcttcccgaggaacgtgcgcctgctgcaggaggtggccgaaacggtgggcgatcgtaaggcgccacagcgcctggcggagcagcagctggagcaacagaagcgcagccagaagcgtcgcatcctcgaaccaatccttccgctcgttggtggcctcaattccgaggcctgtcgattttgtgctcacagtccgcagggctactgtcgccatcacttccatctgcaggagctgcagctgcacaggcagaggggttccggtggtgagcaggatttccggcagattcgccgaatcaagcgggagctaaagcggactcttggccagcagcagcagcaactgcaaccgacgagaagctatcgtccagtccgactgagtgccagctggagcagcagttccctgagcagtggttacgcttcactgaccagcgttggatcgcaggagcaggaggaggcgtccttcgatcaggatattattgaggacgttccactggaggaggaagcggagctgcaggacctgccgcaggaggatatccaacagcccctactaaccacttacttgtag

SEQ ID NO: 33537 - protein, 211 aa, DROSOPHILA
MIIVLLLLFQSLCLYCQRLVLYVHDRCFPRNVRLLQEVAETVGDRKAPQRLAEQQLEQQKRSQKRRILEPILPLVGGLNSEACRFCAHSPQGYCRHHFHLQELQLHRQRGSGGEQDFRQIRRIKRELKRTLGQQQQQLQPTRSYRPVRLSASWSSSSLSSGYASLTSVGSQEQEEASFDQDIIEDVPLEEEAELQDLPQEDIQQPLLTTYL

SEQ ID NO: 33538 - DNA, 3803 bp, DROSOPHILA
ttttatgtaaattagtaatgagatgagaattttttttttggagcgataagttgtgcatcgcatagagggagctactggtttggttaaccattgcacaagaagtagtcaatggaatagttaacgaaaagtatggcgaaaactcacacaaaaatcgtgtttgaaatttagtttggatcgcaaaatatttgaatcaataatggacacgggtcattcctattgcttatgcacaaacccaatcccaccttggcaagaatgttgtggtacttgaaactttcctggtgtttccgcgttgcgaggtgctgcttgatggacgctagtctggcgaggacattgatgtcgcagatcttgcagtgcgccgagtaaccgtcattactagacgccagccagctggagagctccggatatttctcccactctgtgcgatagcgttggtggtacagtcgcttcaccttcttgtcctcatccgtcttgtaacccttcagcattgtgcccgctttcggatgaagcttgtctgatttgtggaaaagtattctttgaaagatgagcgccaaaagcagtctttaatagctgatggtggtaaatattttggtatattccaaaaatttgcgacgcgaaaaaaatctgaaagtcgatgcggtgtgactgtaatcgaatacgttataataccagcaattaattccagggttgcgacatagaggttgctgcgcaacggtcacactaagctgttttgtttatataaacattttatgccttcaagtttatattagaggcgtttatggttgtgttatgtactttttgaaaataccttacttgtacatagttcaaattaatttagtttgagattttaaataaaatattctttcatggtttgggtctcaggtaaagtttaagcagtcacaatacggccacactacacactcatagagaaaaaatatagtaaataaaaaggctttgccgaattcaggatagcttttgcctgcaccgtgggtgctcagccaacatggtcattccaaaggagatcctaagcgacttcaaggagctatacgagaaggccaaccgtctggtggaggaggagagccgcaatgatccgcccacggatccattccgctcccattataaagcgcgcgatgtgctaattgtcttgaagaagcagctggacgaccaactggtatctgtgcaggccagcgaggaggacggtggtcaggacgatcgctgctatcactctctgttggccttcgtttgccgggatctaggcaggatctacatctacacagaggagcaggcagagggcgaaaagatgctcaatcgttgtctggaactagtcacgccgtttaaggagtgccctgagggcatcattccattcattggggcaatcaacgagcttagcattgtgctggcctccaaggaagagtacaataagggactggaaattctcctggaggcagaaaaaatctacgaggacttcaaagccagtggtctgaagcccctggccattcaagatgtgttcaatcctccggaggagggacaacaatctcacgaagctggtcccaaggaactggaatccctgtacacgctagtctcattttacatggcgcaaatgtacgggcatttgggtgagccggaaaagtcggccaagtgctgccatcgcaccctccatcgacagcttgagtcaaaaacatacgatcccattgatttcgcactgaacaccgccaccttgtcacagttctatattggagagaagcgcttcgaggaggcccgtcatcacctggccgctgctacgctcatcatggccgaatatgaggtgcacatgctggagccggagatgagcgagaagcagcgccaggacgtgtcggagacctttaaacatcgctacgccgatgtggcacgctgttgggccaaatatggattgtatttaatgaacacatccaagcttcggctgatgcgggacgaagatgacgaggatgccaagaacctggagatcgttctgcgcaatatgcggctggtcgaggcggaacagtcccggtttcctggacttgacctcaccgcgtgtgaaaatcgtattagttgtgaatactgcctgaccttcgacgatgccaagttggtgtttcattttgtgaacgagtggctcgacatagccaaggactattacaaggccgagaacgaagctactgagtattcaaagataatgcaggattacgccgaagcgtatgagcacattgccttcttcgaggagaatccagaaaaccaggccaagatgcaaaagcgtcgcgccaagtatctggaagatcttttggatctgcttgaccccatcttttacatgaagatatgccgagaatgctggtatggagccggcacagctcatgctgccgtgatggatgtccgtctcgacatcattcgggccactagcacgccagcgccggaggacatcaagaaggtcaatcagagctgtatgaaggccatcaagcactttgagagctatgtcaaatcctatctggtcaaaccgcccagcgaggaatggcgacccaacatggacgtggaggagcaacgccacatgctctacgcccacttccacatcggtcgcatctactacaagctgatcagtggccatccgctccagcagctggagcacctaactagttgccacacctactaccagagattcgatgctggttgccagctgcacaaggaggcggccgagacgctgcagggcgagattggtgttgtgcgtgaaatgctccagctgttgccgctcaagataaacacgattaaggccaggttgaacaaggctgggctaaccgcgtgagaatttccaaaaaattaattgcatttgctaaaagctttatacgtagtcaaaataaatcgcgtttctttcaaggatatttaattgttaatacattagtaacttacatgttacattctgatagcgaaagtaagccgcttttcgattttaattgccgacagcataaatttatttcttgctactcgtgaatggtacttatgccggagtatggcttggcgcactgtttcatatattgattataataaataagttgaactacttcgaaactcaattttttgccgagcatttctaaatttcacaaaactaaattgaacgaagctctgtctccgaaatacttttcaaacctggcaaccctggctgccagccattcacatacgaacagctgttttttccaaacaggaagaggaagagcgccgttggcctagccaaaatcagggaaaatatagtttaatagccaagtttaaactgccactatagttttaatagtgaataataacagtaaactgctagttcgttccttaaaaaatggcacacgccacgccacaggtatgtgattgcctcaaaaataaagaggaaactggtagtgcgccgcgtttctgtgacgcaatagctgcgttaactttcgtaaaccccatggaataacaaagcgtttaaaccttctgcagggcgtaaagctattaaacggatggaagcgtccgggtcgctttgacaagggtctgggagcccagctgcccgaggcgtacaggaagttctggcgcgagtggaagctgacgaccccggctgcggtccattatatccccaaggagcagcagtgggaacgagatgaggtgacgcacgccatcaagccggtgcagaacatcccgctgccattgatcgatacgccggaatcgcaccgtggcatctggggtggcgaggccgtgatcaagggctttcagaaacgcgagcaaacaaagcgtcgcgtgccgcacttttgggtaccaaatcttaggcgttcggtggtcca

SEQ ID NO: 33539 - DNA, 1803 bp, DROSOPHILA
atggtcattccaaaggagatcctaagcgacttcaaggagctatacgagaaggccaaccgtctggtggaggaggagagccgcaatgatccgcccacggatccattccgctcccattataaagcgcgcgatgtgctaattgtcttgaagaagcagctggacgaccaactggtatctgtgcaggccagcgaggaggacggtggtcaggacgatcgctgctatcactctctgttggccttcgtttgccgggatctaggcaggatctacatctacacagaggagcaggcagagggcgaaaagatgctcaatcgttgtctggaactagtcacgccgtttaaggagtgccctgagggcatcattccattcattggggcaatcaacgagcttagcattgtgctggcctccaaggaagagtacaataagggactggaaattctcctggaggcagaaaaaatctacgaggacttcaaagccagtggtctgaagcccctggccattcaagatgtgttcaatcctccggaggagggacaacaatctcacgaagctggtcccaaggaactggaatccctgtacacgctagtctcattttacatggcgcaaatgtacgggcatttgggtgagccggaaaagtcggccaagtgctgccatcgcaccctccatcgacagcttgagtcaaaaacatacgatcccattgatttcgcactgaacaccgccaccttgtcacagttctatattggagagaagcgcttcgaggaggcccgtcatcacctggccgctgctacgctcatcatggccgaatatgaggtgcacatgctggagccggagatgagcgagaagcagcgccaggacgtgtcggagacctttaaacatcgctacgccgatgtggcacgctgttgggccaaatatggattgtatttaatgaacacatccaagcttcggctgatgcgggacgaagatgacgaggatgccaagaacctggagatcgttctgcgcaatatgcggctggtcgaggcggaacagtcccggtttcctggacttgacctcaccgcgtgtgaaaatcgtattagttgtgaatactgcctgaccttcgacgatgccaagttggtgtttcattttgtgaacgagtggctcgacatagccaaggactattacaaggccgagaacgaagctactgagtattcaaagataatgcaggattacgccgaagcgtatgagcacattgccttcttcgaggagaatccagaaaaccaggccaagatgcaaaagcgtcgcgccaagtatctggaagatcttttggatctgcttgaccccatcttttacatgaagatatgccgagaatgctggtatggagccggcacagctcatgctgccgtgatggatgtccgtctcgacatcattcgggccactagcacgccagcgccggaggacatcaagaaggtcaatcagagctgtatgaaggccatcaagcactttgagagctatgtcaaatcctatctggtcaaaccgcccagcgaggaatggcgacccaacatggacgtggaggagcaacgccacatgctctacgcccacttccacatcggtcgcatctactacaagctgatcagtggccatccgctccagcagctggagcacctaactagttgccacacctactaccagagattcgatgctggttgccagctgcacaaggaggcggccgagacgctgcagggcgagattggtgttgtgcgtgaaatgctccagctgttgccgctcaagataaacacgattaaggccaggttgaacaaggctgggctaaccgcgtga

SEQ ID NO: 33540 - protein, 600 aa, DROSOPHILA
MVIPKEILSDFKELYEKANRLVEEESRNDPPTDPFRSHYKARDVLIVLKKQLDDQLVSVQASEEDGGQDDRCYHSLLAFVCRDLGRIYIYTEEQAEGEKMLNRCLELVTPFKECPEGIIPFIGAINELSIVLASKEEYNKGLEILLEAEKIYEDFKASGLKPLAIQDVFNPPEEGQQSHEAGPKELESLYTLVSFYMAQMYGHLGEPEKSAKCCHRTLHRQLESKTYDPIDFALNTATLSQFYIGEKRFEEARHHLAAATLIMAEYEVHMLEPEMSEKQRQDVSETFKHRYADVARCWAKYGLYLMNTSKLRLMRDEDDEDAKNLEIVLRNMRLVEAEQSRFPGLDLTACENRISCEYCLTFDDAKLVFHFVNEWLDIAKDYYKAENEATEYSKIMQDYAEAYEHIAFFEENPENQAKMQKRRAKYLEDLLDLLDPIFYMKICRECWYGAGTAHAAVMDVRLDIIRATSTPAPEDIKKVNQSCMKAIKHFESYVKSYLVKPPSEEWRPNMDVEEQRHMLYAHFHIGRIYYKLISGHPLQQLEHLTSCHTYYQRFDAGCQLHKEAAETLQGEIGVVREMLQLLPLKINTIKARLNKAGLTA

SEQ ID NO: 33541 - DNA, 3383 bp, DROSOPHILA
gaattaggttagcacattagctggttaaggacaaacgtggattgaagttaggatggggagagaaacaggaaaacttaacgagttctagcatatgataatgtgtacagccataaacttatagctaacatcgtaatccgtgcacaagctattaaaaacttcaagaagatatgtccctaaatttttccaatagtaataaatatataaccaaatttactctctctgtagggcatactacaatcctaataagctataaacactccagagcagagcctctaatttgctggtaatttatcaaaatctagattataatcctgctgatggattatgtttcgggtcgattagtaccccagttataggactactagagttcgtccttcgttcagctgagcttgcacatttcctacacaataagcagatgttaatggctcccttctttgttgtttttgttaacttgttaatacaaatacaccgtgtgccaattcacaaatccaacaaggtatagtggacatgccaacaaaaaagctagcaaagcaaataacacattgttgacaaacagcgggctattggggtgaaccttcaaaaatctattgaacaaaagtattactcgtcatatgtattgtagcattttaattaaggaaacatgtattttaatcaatataacttaaacttaaagatagtaatggttgcacatgtcgtatgcgcaattttcatgaagagtggtccgctctaaaggacacatacgtggtaacaagggggctacgctggcccctgtccccacctcccgaaatggtttgtgggtggatttggtgtggccctgtccaatggctagcgcgcaaaaataatttttgttattgtgttttccctcataagtggacatgacggacccaacgaaagctcattcagcgctggacaggcgaactggaaaggtctaagacggaagatgtcatcgccggcagagcgggcgaacttcgtgcagcacttcggacagacaacctgagtgatgggctgtggctcctccatggatacgcagacgaatcctgtcgtcacggaggtcagctcggaaatgcaacctcgccagaatggcgcctctggagtaatagcacttgaacaagtcgtcttacctttgccataatcaatacctcttccatttcgtcatcagaatgtggtcgagcaatatgtgcgcctggacgagcagatcagcaagctggagggcacatgtcctggtcctcgaatggccaccgccgaggcctgggtggagcacattcagagcaagcacgaggcgatgctgggactcgatggcatgggagtgtctcctttgcgcgagagggaatgggaaaccgaggaggccctgcccattccagcttacacaatgggggggcggcagggcgacccaattgtggccaacacgcccaccaaggacctggcccaggtaaatggcctgccattagtgaatgtgatgaacttccctcaagtatattattaccattcgactttagcttgcctacaacctgggcgtaattggcgatgcccgcaaggcttccatgcacgaggatttcttcgccaacctgagcgagtccgccatgtatttgcttagcattcgttactacggcgagatgttggaacacactaaggtgcgtctaaagactctggccgagagctatgcagagctgaacgagctgtacgtaaagcaagacgggattatagcgtatataagcgggggaacgtacatgactcggctggaggagagcattgatgagcagcttgagacggcaagagatacaagggataagctgggcagcgcactggagcagtggcgcatctgtggattactacttagagcagccgcgaattcctcgacgcaggcattaaaacaatggcgacagcttggacggataatgtgggtaaattaattccccacttagaacttgttgacatgttatttctcgttcagagatcccaagcaaaagcttcagtgggcgttggactgtcgaagtctgttacacgcctccacgatatccctagaggcggctcagctggctctgccgcacgtggaactcaagtacatgagtcatcggcaagtcctagccgtcaagcactgcaacacctacctaatcacggatatagcaaacaaagcgcggtaagttaatatatagatttctctagaatcttctacaaagggaaacgaatcccttttaggtacgagcacaccagtcgggtcttcaccagttacgaatcaaacatgtccaaaacctgcacgtggctctacgaaacctttaacagcacgctgcgcccagactacgacagggcggaggaaactgtatgcgggctggccaagacgctccgggatcatcgcgaggaggtcttcaacacggtgcgcaagtgacattaaacttattgctcaattatatgggtattttgtacattactttaataaacagtaggcataacattagtaccaatagctcttgactggcgtgcgttcctctttgatgcccatttcctccataatgtccatctcgaatgtggacaacttgggctgaaaggtgatctcgcccacaacagcgcctgaaaaggacagacttgtatgactaggaacatattgaaatgcgataatagcccatacctggcgtatccttctccctttcgatataggcgtttggtgttttataatcgtgcgtctggttgttcgtctccgggatgggtatgattcggccagatcgcaaggacacccgcactttctcgccctcctccgtgaaacgccactcaaagtcggtgccctgaagatccgatgggtcaaccagacgaatgtccttggtgacgtgcaaaggtgcctcggacttgataatgataccgggaaactccttctcaccgccaaccttgcgatagtgccagttcaggccctctacaattacccaattgcgctcgggtataacctgggtgacaattccctgctttcctttgtctttacccacaaggacttcgatacgatcgccgcggaaaaagctccagtcctctgaaaaggatatacaaccatgttttattaggttttagaggtcaaggcttcttattccttaccaattggttccactagcaccttgcgacgcacggttccgggcatattttgctggcggaactgacccgtccatgaacgatttgtggtgtagcggaatctctttcgctccacggtacgcggtaggtaattaatctccttcggagtttgccagtacacctgtgttgagatgaaaaaaaatattttaataaatgtgaaacattttccatgcgatgtgttacgtgagccgctgttcacaagttgttcaatgaaaaagactcttcctgttacctgttttttgctgcgctcgatgtattccttgggcagattggaa

SEQ ID NO: 33542 - DNA, 1137 bp, DROSOPHILA
atgggctgtggctcctccatggatacgcagacgaatcctgtcgtcacggaggtcagctcggaaatgcaacctcgccagaatggcgcctctggaaatgtggtcgagcaatatgtgcgcctggacgagcagatcagcaagctggagggcacatgtcctggtcctcgaatggccaccgccgaggcctgggtggagcacattcagagcaagcacgaggcgatgctgggactcgatggcatgggagtgtctcctttgcgcgagagggaatgggaaaccgaggaggccctgcccattccagcttacacaatgggggggcggcagggcgacccaattgtggccaacacgcccaccaaggacctggcccagcttgcctacaacctgggcgtaattggcgatgcccgcaaggcttccatgcacgaggatttcttcgccaacctgagcgagtccgccatgtatttgcttagcattcgttactacggcgagatgttggaacacactaaggtgcgtctaaagactctggccgagagctatgcagagctgaacgagctgtacgtaaagcaagacgggattatagcgtatataagcgggggaacgtacatgactcggctggaggagagcattgatgagcagcttgagacggcaagagatacaagggataagctgggcagcgcactggagcagtggcgcatctgtggattactacttagagcagccgcgaattcctcgacgcaggcattaaaacaatggcgacagcttggacggataatagatcccaagcaaaagcttcagtgggcgttggactgtcgaagtctgttacacgcctccacgatatccctagaggcggctcagctggctctgccgcacgtggaactcaagtacatgagtcatcggcaagtcctagccgtcaagcactgcaacacctacctaatcacggatatagcaaacaaagcgcggtacgagcacaccagtcgggtcttcaccagttacgaatcaaacatgtccaaaacctgcacgtggctctacgaaacctttaacagcacgctgcgcccagactacgacagggcggaggaaactgtatgcgggctggccaagacgctccgggatcatcgcgaggaggtcttcaacacggtgcgcaagtga

SEQ ID NO: 33543 - protein, 378 aa, DROSOPHILA
MGCGSSMDTQTNPVVTEVSSEMQPRQNGASGNVVEQYVRLDEQISKLEGTCPGPRMATAEAWVEHIQSKHEAMLGLDGMGVSPLREREWETEEALPIPAYTMGGRQGDPIVANTPTKDLAQLAYNLGVIGDARKASMHEDFFANLSESAMYLLSIRYYGEMLEHTKVRLKTLAESYAELNELYVKQDGIIAYISGGTYMTRLEESIDEQLETARDTRDKLGSALEQWRICGLLLRAAANSSTQALKQWRQLGRIIDPKQKLQWALDCRSLLHASTISLEAAQLALPHVELKYMSHRQVLAVKHCNTYLITDIANKARYEHTSRVFTSYESNMSKTCTWLYETFNSTLRPDYDRAEETVCGLAKTLRDHREEVFNTVRK

SEQ ID NO: 33544 - DNA, 9609 bp, DROSOPHILA
agtgtgatatatatatatgcatattctatgtagatatatgtatatatccataagctaaaaactcttgtaaaacgtaaaccccgttggggtttcgcgtagcagattgtgcatctgtttggtgtatatttgactagctaatatacatatatatatggctatatctaaggtgggtatactatgtatactcacatacattactaaaaacagctaaatactagcgttaaacacatacaatcatcatcgaacgttaatctctgccctcgttcaactgtttattgctatttacacccgattcaaaatcgacttggatggaacgaataccatataaagggagggttactcaatgggatatatggtacggatgtcaatacacgagtatatacaatgcacaacagagatacatacacttagagagcgatgaataatatatgtctatgtacaattttccacggataattgtcacttctcactcgaaattagagtcagctaaacacatatgcttttcacctggatcttaaaatctttggccctttaagtgtttctgccttaagaaatcactagagctattatataacagttgaatatacatgtgaagtcagctagctatcttacgatgcaaattggaaaagaaatctgtgaaacacagcggatttttaaaatggctcatatccaggtgataggttcttaaatgttgtttctagtatcttattcgggtgtcactcgttttaatctcactgttcggttcctgattctgatatcctggcaaagtcaatccccaatcttccaaagacaggctgccactacactacaaagttttgattgtgagtgatggaaaacttggccaaagctgacacaaaagcagagcaaaacggcgattgagctaaatatttagagatatagagcagaggtttctgggtagttcagtggtaacatagttgagtaagctcgtcgagattcaaagattgtgcggcaaggggctgttagcggggtctgactgcagccagaagtcaaatcacaggtccagcgagtccggtggcgttggtctggttggtagcatgccgaagggatcgtccactaccacgctatcgtcctcgtcactgtcctcgtcgtgtccgtgtccctcagtgccctctctgtcctcctcgtcgcccaaaaagatgcactcctccacatccgtgtcgtagctgggatctaaattgacctcgtgcagctggagatcgagctccaatagatcccaggagccaccaaattcagctagcggtatattcggtcctttcccggtcgtggatgttgccacgaagtcattggaaaaggcgtccgagttgcagggctgcgaagtggtgggtgaaatgttgggtgtgggtgtctctggcgtagtcagggagacctgaccaccaaccacaccgccagactcatcgatgaacgatcgacccactgagctcaagctaaactccaagagtttctgcgaggcatgttgattgactggcggttcactagtaacctccggaatgacggttaagcacttgcaactggagagggacagcacagaggtttgggtctgcgagtgggtctgtgaatggtttagagtctgggtgtggacctgcgtctgggtttgagtcaagctagcgctgctgctcaagcaagagctgtttgtattgcagccaccgaaactcacaccacccactccgttcggcaccgacccacccacatgtccttggccattcggatggcgttggttccgggcgggcgagttggtgcgcgagggcagcgaggtggtgcagagaggtggctgcggatgggactgcgtctgggtggcgctgctcgtggtggtgctggcacagtggtgtcgaaccgcactggccagacgctgaagattctcgtaggaatcaccgctgtccaaacgcttgctgcgaaagagacgcacctgctgtttctgctgctgcttcaggtggatgctgtccagcgatggtaacttcatcgaccccatggaggcggtggtcagaccaatatcactcagcggcaccagggtgttgagaacatccggcgagtccaagggactggacaagggcgtggagccaagggcggcgttaactagaaagctgaggggtacaggtagtagatgagtggtatggttttctcactgggaggcatatgacatacatctgccgctggagaagattctgccaaacggccttaagttccagcgaaggtgcccttaaaataaggctcttgcggcgggctcctcgctttggagtgcgggtgagatcgggagcacagtaacccgtcggactctccgccaggcgtccattgggatccactgtgagacgaaactcggtggctgaaagggaaaagttgaatgtcaagtctgggagcggatcttgcggaatcgcactcacttttcttgcgcatatggaaacaagagtcaaccacattggcgatgggaatgggctcctctgtgataaacaggactcgatcacggctgaccttggcaaaaacgatgatatcactgaatagtagtgtccaatagggcttaacggagcgaccttcgacccgggacaaatcgccgccaaagatccactggcgcccctgaacggccaacgtaaaaggcttgcatttggtaaagaccatccgggactccagatcctggagggtgagcagggggcgaccttctcccagtggttccatcagaccactgctcacagtgatctcccgataggcagcctgcagttcgttgataaccgtgctaaagttcttgtgctcctccgtatccacatggcaatttccagcgagcaactgcatcagtttaaggatttcacgaaaatgctgcagtggtcgatggatgaacatggtgagatcgggtcttttacgtggaacggccggttccgtaatgaaggctataaactcggagccagtctgtcgggacttattgaccaaaacacagtcggcccgcttaattccattgcagtacttcttgtatgccgcacagatcgctgtagtttttgataggtagacccgcgaggcaaagttcatttgtggctcctggtcctgctgatcgctgctgcacaactgctccaggatgtcctcggcaatcctgagcagctcgtcgatgttctggaacaaagtgcgatgatcgttcggcgagatcagatcctttcgttcgccaagcggctgcacaaagcggtccactccgaagtgcagggcagccgtgaagttctgctcccgactaatcagctggagcaggaagcgcctacggttgtccgtgacaggcacaatcgactgtgggcgttcaaacgggtcaatggttagagtgttaaataagtcgagcttgttagtatatccaccaatgggaacagcagatggaaacaaacttatgataatcaaaaaaactcaaaatcatttgggatcgaaaaaaaaagtttattgtcaagcgtagcgaagtcgcacgaagcttaaggactctcaaacaaaatagaggcctaggctaggcaaaaaaaaaggataaataattaggtagtcgtaatgataaccagcatggcgcgataacttaatctcttaaacttaacaaattagtatgtacacaaagacacgaaatgaatcaaagcaaaaaataataatccttagacgaagacacctttgcctacctccttgctgaaggtgacctgtggcaggtgaagcctccttttggccgcctcgatggaggaggtggttcccgagcatgcggtagccggccggctcatgctatttgccaatggctggatcctcgtactggtggtcctttgcagactcattacggtggtcgttcctgttgcggtggtggccagggtgtgctcctcgctgcccaagcccactgccgcgcccaatctggtgcttatgtgtacattgttctggcccaagtccgtcgacgtgattgttgtggcgcccgcgcctgaccttctgaatatctccaacgtcaaggacgagccctgcgatcgtatcaaattcagaacatcagcctcgggcatcgtgacgacgttatgcttgtccacaaagatcacatagtcgccgggcaaaatgccacaccgatcggccgagagtcccgcctcgattttctccacccgtggcggatgcgtccagacaatagagaatccaaagccccgttcctcggttcgcgtaagtcttttcgtcatggtgaatggggtacgtccctgctgctggcggacagcgcctcctacgctagatcctccgctatttggcatggtggactgtctgcgtccaccggatgtcccattgttcaagtggttggcattgctttcgttggccttcgacgccgaggactgggagcccgtcgcttgtgcctgggtggtggtactgtttgcattgccatccgctggcggatccagctccaggaatcttaaaaagagattctcgtcggcatctcgctggtggagtgccttcttgctgagcttcatgggctgctggggctgctggggtagcagaggatcctctttgcccatgctatcgatgctaatgctgatcacctcgtcgttcagtgccatcgctgcggaattcgatcccgaaccggatccagtggcaaccggtttttggggcgtgactgtgacggctgctgccatttctgcgggggaatcgtcctgctgtttatcctgatccttcgccgcttccgtttcctgcttttgatcctggcctgcgttggcttttggttggctatggcggctagtaggcggaggacatgcctgtgcatgcagcttgtaggatcctgccgagacgcccgaatccggatgcactaactcattcagtggaaaagtgctgcagcccaggaactcgctgcgtctgaaagggaatgcagaaaaaacagtcagtgggaaagttctaagtcaaacaaaatatcacatatatatatatatgagttgaagaattttttgacccttcgctatttgccaaagtctcctgaattatggaatcaatgggcttgtggacggactcggacggaactgagaaaactaatatggccattagatatgaacgaacgcttgtccgccaaaatccttggcccctcgcaattgcttttggataatgccaatgcccatggcagtacccattttggtcagtttgcgtcacgttacaacgtctgacggacattgtctatttataagtgagtgaaggtggctcgcccacagctgatccaatccaatccgtggaaggccgcagaaagcccgtaccgagacaccaagttctcctggtcgtacgtgacataaatcaattagcggccctaagctgccgccacattccacatttccacatgccacaaagtacgtacgtacgtacatgtggcccggaaatgcgcttggcctggccaattggctgggtgtttggctggttcggtgtatggtggttcggtgggtggtccagtgggtggtatagtgggtggaccagtgggtggtatgacagtggcttaaggctctgtctgctgcttcttccactggccactttagctgaagttggcgcgcgtatttgggtcacttttattgattttccttgcggagtccgtgttcttgtactcgtactatatatgtatagttgtttcttttttggggcgattgcaatcgcagctgtcagttcgggaggtgcattaaaaatgttggggccttcgtattggtgcctccgcaactgtgtgccgaaaagctggccataaattattcaaccaccagtcgttttgtaaattgacttaaaacgttcctttttggcctagactgttttcacaacccaggtgaacgtaaattatgcatggccaacaaataaaagcagctgcgtgtgaggcaggaaaatggaataggtgatatggtgtcccgggtgtacatttagttagttggccacttcaattagctgctgacagcaaaaaataaaggaaaatagagaagataggggtgtgtatgtgcgtgagctggtgattattgcataatcgtcctaaccaccaacatcgatttggcattaaacccagcatttgaccaattttattgttcaatttcaagtaccacactcctgaatgtccttgaattttaattaactttcgagcacgctgcgaaaggccctcctctcacatagatacgatacatcgagtcacgcacacactaacacacactaggccttcatccacttcctgtttgcaatttgtttagcagcatgcccgaaattatgctacactttccatgcttcgcgcacacacacacacagttacataagttttcgttgcactctttcttgggcaacgtaattgaacactgcggcactgccattgaaggcacttcaaaaaaaaaggtaaacaaaatgcgatatttaagccatcgttgtggcccgcaaggatatacatttttttgggcttactttgcctcgtttcctgcgttttcgagcttcgccagccgttctgccgttcgccgttctgtgccgcttttcacgcgagcttgccactcggactgagtaacgggaactgagctgggaaaactcgggaaaacatgtagcagcgcaggtcagcccgggaaagtcgctggaagtcgcatgcccggagccactgcgcttgcgctagcaagctggaacttccgggggaaagcgccgagcgcttgtttatgtgcaggaaatgcaccaggaaaggcgggaggcgaaaggcgctggaggtgccacgaggccaggaagagcgccacaattaaccagacttggtcttttgcctgtctgcgaagcacgccctccatcgccattcctcaatctcttccagaacttcccccgataaacgtttaggggtgaatgacttacaacaggacgacgatggcacgcgcaagaaggcgcattacatggggccatatttaatggcaatatcgcaattggcaattgatactttgactgaatacgtttggcattctctattaagatatgattatagtaattggaactaccggaagaaaggactttgcataagcaattcatatttaacaaccaattgtgcaagcccaccaccccctttgcatttacacaacgcctacgtaacgtacatcatataatatttaaaatttgcttttcaatttcaggaaatactttatgtgcttttcttggctgtcgaccgtactcgtactcactttaaatggcgatcccgatgccacacggccaactgaagatactgtccagcggtctcctcgccactggaaatctggaagttgaatcgctgatcgaagtacgggcggcccgagtgccgatggacggcggtgcgttggtacccggaactcatgcttccccccgacgagtggccaccgtatccgggtggctgggctcctccggacagggccaccttgacgtaggcgttgatgctgccgtttccactgccatgggagcgctgcaagtcgcgacagcgaatcactgaaatgcagaaggacgaggtagacaggtgtaattaacaggtgagttcggccatgattctcgtgggctggcgggtcagtttgggtgattgggacctcaagactcaggcagacggctcccccgataatcctatttaccgaaattgagtgccgtgtgtctggcttatatagaaagtttctaaattgaattgaagtgcagttattgtacaatagaaaggtaagtggcaaatgatagacattgatagcagaaattattggaattttatgggaagttttgagttggattctttacgaattttaaatcaatgaatgcttgggctggggtctttggaactcaccatgtacattaagttgctgctccttggcatcgaatgcgatgctcacatcgatgctgccccgctgactggcctccatgtccgcaccaccattactgctgctgctgctgctgatgctgctggtggtggtggtgcagtgggagggaggtgtggtggtgggggaggccagcgaactcctcttggccacctgctgctcatcctcgtccaaatcactcgaggcggaactggatgagaagctcaggcagcgtttggtgctgggaaccaactgcagtggctccaacttcttggcttggtgactttgcgtttggttaatggtggtagtcttgtgtgggttcttgcgccgcaccacccgctgccgcttcaagtgggtgggcgtgcgcacctccatttcgtggacactggtctcgctccactcggcattatccgccaaaatggtggtcgaagtggtggcgccggcgcctggcagtgtcttcgtacacctcacctccttcctggccgactctatgatggcatccagcatgcggtccagtgtggtatcgcccattcgcgatgaggagagctgagaatcctccagagcaactgcaccaccggtggtgcgtggcaagcagcgcagtgccgccaattgtggcgtggcctgccgcggaccactgccctcgctgaaactcctgcgctgcggactctttccgtgcacgttgctcaaatcctgcagggcaatcaaactggcattgccgaagggactgctcatgaagtgcaccccgaaattctccttgttcgcgtctccgactcctggcacgcccactccacggcgccggccacgcgactcctccaccacggcactggaactggagtggcgatgcatccgtgtcatggttggcatgtccctactgcaagagaagaaataccaatgtaatctaggtagtctaggtaacggagtgccgggcttataatcccaatacatgtgccttttttcccactaagagctcttaacttggccaaaaattgaaatatttaagagtggcatacatttttaaactcctaattatacgtttaattgtgaggctttacaatttttttgatttgaaaaaaaaatttttttttcgaaattttaaatttttgtaaggggtaccatcacaaaaattttaaaatttcgaaaaaaatttttttttttaactttgttaatatttaaatacatgttttttgggttagtcaaaacgaccaaaaagaagtattcggttcacaatttgggcaagttttgggtgagatatggcacgctgagtgataaagcagacggaatatattgaatttaattaggtttttttttttgcgatttccaacagttaacagcttggtgccattatatatatatagaacagattagtctggatgatttttcggatctggttggcaaatcgggtatgcccggttaggtccttggtccttggcagctggctgccaaacaaggggatcagagcgacgcggcttccgatctggtttcgtttttttcccattcttctggtgtccttcggtttttgggaactcttccagacaatttcgaggcagaaaaacaacggcaacaaatgaaggggcgagctggcaaacaaagtgcaggacaaagcaggaaatttgcaaattgttcttgcggcaaacgagttcctcgccaggtccttcgtacgtcgctgtccttgcaaatttcaggtttgcatttaaattgaaattaaacatatgctaatttccctaacagatttctgcgctgcggttgctaaccataaaattgagcgggtcctttagacaaggagtcttaaaggatgctctatggctctacggtctgagatctgcgatttgcgttttcttctcggtgtgtgagtgtgagtttgtgt

SEQ ID NO: 33545 - DNA, 4602 bp, DROSOPHILA
atgccaaccatgacacggatgcatcgccactccagttccagtgccgtggtggaggagtcgcgtggccggcgccgtggagtgggcgtgccaggagtcggagacgcgaacaaggagaatttcggggtgcacttcatgagcagtcccttcggcaatgccagtttgattgccctgcaggatttgagcaacgtgcacggaaagagtccgcagcgcaggagtttcagcgagggcagtggtccgcggcaggccacgccacaattggcggcactgcgctgcttgccacgcaccaccggtggtgcagttgctctggaggattctcagctctcctcatcgcgaatgggcgataccacactggaccgcatgctggatgccatcatagagtcggccaggaaggaggtgaggtgtacgaagacactgccaggcgccggcgccaccacttcgaccaccattttggcggataatgccgagtggagcgagaccagtgtccacgaaatggaggtgcgcacgcccacccacttgaagcggcagcgggtggtgcggcgcaagaacccacacaagactaccaccattaaccaaacgcaaagtcaccaagccaagaagttggagccactgcagttggttcccagcaccaaacgctgcctgagcttctcatccagttccgcctcgagtgatttggacgaggatgagcagcaggtggccaagaggagttcgctggcctcccccaccaccacacctccctcccactgcaccaccaccaccagcagcatcagcagcagcagcagcagtaatggtggtgcggacatggaggccagtcagcggggcagcatcgatgtgagcatcgcattcgatgccaaggagcagcaacttaatgtacatgtgattcgctgtcgcgacttgcagcgctcccatggcagtggaaacggcagcatcaacgcctacgtcaaggtggccctgtccggaggagcccagccacccggatacggtggccactcgtcggggggaagcatgagttccgggtaccaacgcaccgccgtccatcggcactcgggccgcccgtacttcgatcagcgattcaacttccagatttccagtggcgaggagaccgctggacagtatcttcagttggccgtgtggcatcgggatcgccatttaaactcagttcccgttactcagtccgagtggcaagctcgcgtgaaaagcggcacagaacggcgaacggcagaacggctggcgaagctcgaaaacgcaggaaacgaggcaaaacgcagcgagttcctgggctgcagcacttttccactgaatgagttagtgcatccggattcgggcgtctcggcaggatcctacaagctgcatgcacaggcatgtcctccgcctactagccgccatagccaaccaaaagccaacgcaggccaggatcaaaagcaggaaacggaagcggcgaaggatcaggataaacagcaggacgattcccccgcagaaatggcagcagccgtcacagtcacgccccaaaaaccggttgccactggatccggttcgggatcgaattccgcagcgatggcactgaacgacgaggtgatcagcattagcatcgatagcatgggcaaagaggatcctctgctaccccagcagccccagcagcccatgaagctcagcaagaaggcactccaccagcgagatgccgacgagaatctctttttaagattcctggagctggatccgccagcggatggcaatgcaaacagtaccaccacccaggcacaagcgacgggctcccagtcctcggcgtcgaaggccaacgaaagcaatgccaaccacttgaacaatgggacatccggtggacgcagacagtccaccatgccaaatagcggaggatctagcgtaggaggcgctgtccgccagcagcagggacgtaccccattcaccatgacgaaaagacttacgcgaaccgaggaacggggctttggattctctattgtctggacgcatccgccacgggtggagaaaatcgaggcgggactctcggccgatcggtgtggcattttgcccggcgactatgtgatctttgtggacaagcataacgtcgtcacgatgcccgaggctgatgttctgaatttgatacgatcgcagggctcgtccttgacgttggagatattcagaaggtcaggcgcgggcgccacaacaatcacgtcgacggacttgggccagaacaatgtacacataagcaccagattgggcgcggcagtgggcttgggcagcgaggagcacaccctggccaccaccgcaacaggaacgaccaccgtaatgagtctgcaaaggaccaccagtacgaggatccagccattggcaaatagcatgagccggccggctaccgcatgctcgggaaccacctcctccatcgaggcggccaaaaggaggcttcacctgccacaggtcaccttcagcaaggagtcgattgtgcctgtcacggacaaccgtaggcgcttcctgctccagctgattagtcgggagcagaacttcacggctgccctgcacttcggagtggaccgctttgtgcagccgcttggcgaacgaaaggatctgatctcgccgaacgatcatcgcactttgttccagaacatcgacgagctgctcaggattgccgaggacatcctggagcagttgtgcagcagcgatcagcaggaccaggagccacaaatgaactttgcctcgcgggtctacctatcaaaaactacagcgatctgtgcggcatacaagaagtactgcaatggaattaagcgggccgactgtgttttggtcaataagtcccgacagactggctccgagtttatagccttcattacggaaccggccgttccacgtaaaagacccgatctcaccatgttcatccatcgaccactgcagcattttcgtgaaatccttaaactgatgcagttgctcgctggaaattgccatgtggatacggaggagcacaagaactttagcacggttatcaacgaactgcaggctgcctatcgggagatcactgtgagcagtggtctgatggaaccactgggagaaggtcgccccctgctcaccctccaggatctggagtcccggatggtctttaccaaatgcaagccttttacgttggccgttcaggggcgccagtggatctttggcggcgatttgtcccgggtcgaaggtcgctccgttaagccctattggacactactattcagtgatatcatcgtttttgccaaggtcagccgtgatcgagtcctgtttatcacagaggagcccattcccatcgccaatgtggttgactcttgtttccatatgcgcaagaaaaccaccgagtttcgtctcacagtggatcccaatggacgcctggcggagagtccgacgggttactgtgctcccgatctcacccgcactccaaagcgaggagcccgccgcaagagccttattttaagggcaccttcgctggaacttaaggccgtttggcagaatcttctccagcggcagatctttctagttaacgccgcccttggctccacgcccttgtccagtcccttggactcgccggatgttctcaacaccctggtgccgctgagtgatattggtctgaccaccgcctccatggggtcgatgaagttaccatcgctggacagcatccacctgaagcagcagcagaaacagcaggtgcgtctctttcgcagcaagcgtttggacagcggtgattcctacgagaatcttcagcgtctggccagtgcggttcgacaccactgtgccagcaccaccacgagcagcgccacccagacgcagtcccatccgcagccacctctctgcaccacctcgctgccctcgcgcaccaactcgcccgcccggaaccaacgccatccgaatggccaaggacatgtgggtgggtcggtgccgaacggagtgggtggtgtgagtttcggtggctgcaatacaaacagctcttgcttgagcagcagcgctagcttgactcaaacccagacgcaggtccacacccagactctaaaccattcacagacccactcgcagacccaaacctctgtgctgtccctctccagttgcaagtgcttaaccgtcattccggaggttactagtgaaccgccagtcaatcaacatgcctcgcagaaactcttggagtttagcttgagctcagtgggtcgatcgttcatcgatgagtctggcggtgtggttggtggtcaggtctccctgactacgccagagacacccacacccaacatttcacccaccacttcgcagccctgcaactcggacgccttttccaatgacttcgtggcaacatccacgaccgggaaaggaccgaatataccgctagctgaatttggtggctcctgggatctattggagctcgatctccagctgcacgaggtcaatttagatcccagctacgacacggatgtggaggagtgcatctttttgggcgacgaggaggacagagagggcactgagggacacggacacgacgaggacagtgacgaggacgatagcgtggtagtggacgatcccttcggcatgctaccaaccagaccaacgccaccggactcgctggacctgtgatttgacttctgg

SEQ ID NO: 33546 - protein, 1529 aa, DROSOPHILA
MPTMTRMHRHSSSSAVVEESRGRRRGVGVPGVGDANKENFGVHFMSSPFGNASLIALQDLSNVHGKSPQRRSFSEGSGPRQATPQLAALRCLPRTTGGAVALEDSQLSSSRMGDTTLDRMLDAIIESARKEVRCTKTLPGAGATTSTTILADNAEWSETSVHEMEVRTPTHLKRQRVVRRKNPHKTTTINQTQSHQAKKLEPLQLVPSTKRCLSFSSSSASSDLDEDEQQVAKRSSLASPTTTPPSHCTTTTSSISSSSSSNGGADMEASQRGSIDVSIAFDAKEQQLNVHVIRCRDLQRSHGSGNGSINAYVKVALSGGAQPPGYGGHSSGGSMSSGYQRTAVHRHSGRPYFDQRFNFQISSGEETAGQYLQLAVWHRDRHLNSVPVTQSEWQARVKSGTERRTAERLAKLENAGNEAKRSEFLGCSTFPLNELVHPDSGVSAGSYKLHAQACPPPTSRHSQPKANAGQDQKQETEAAKDQDKQQDDSPAEMAAAVTVTPQKPVATGSGSGSNSAAMALNDEVISISIDSMGKEDPLLPQQPQQPMKLSKKALHQRDADENLFLRFLELDPPADGNANSTTTQAQATGSQSSASKANESNANHLNNGTSGGRRQSTMPNSGGSSVGGAVRQQQGRTPFTMTKRLTRTEERGFGFSIVWTHPPRVEKIEAGLSADRCGILPGDYVIFVDKHNVVTMPEADVLNLIRSQGSSLTLEIFRRSGAGATTITSTDLGQNNVHISTRLGAAVGLGSEEHTLATTATGTTTVMSLQRTTSTRIQPLANSMSRPATACSGTTSSIEAAKRRLHLPQVTFSKESIVPVTDNRRRFLLQLISREQNFTAALHFGVDRFVQPLGERKDLISPNDHRTLFQNIDELLRIAEDILEQLCSSDQQDQEPQMNFASRVYLSKTTAICAAYKKYCNGIKRADCVLVNKSRQTGSEFIAFITEPAVPRKRPDLTMFIHRPLQHFREILKLMQLLAGNCHVDTEEHKNFSTVINELQAAYREITVSSGLMEPLGEGRPLLTLQDLESRMVFTKCKPFTLAVQGRQWIFGGDLSRVEGRSVKPYWTLLFSDIIVFAKVSRDRVLFITEEPIPIANVVDSCFHMRKKTTEFRLTVDPNGRLAESPTGYCAPDLTRTPKRGARRKSLILRAPSLELKAVWQNLLQRQIFLVNAALGSTPLSSPLDSPDVLNTLVPLSDIGLTTASMGSMKLPSLDSIHLKQQQKQQVRLFRSKRLDSGDSYENLQRLASAVRHHCASTTTSSATQTQSHPQPPLCTTSLPSRTNSPARNQRHPNGQGHVGGSVPNGVGGVSFGGCNTNSSCLSSSASLTQTQTQVHTQTLNHSQTHSQTQTSVLSLSSCKCLTVIPEVTSEPPVNQHASQKLLEFSLSSVGRSFIDESGGVVGGQVSLTTPETPTPNISPTTSQPCNSDAFSNDFVATSTTGKGPNIPLAEFGGSWDLLELDLQLHEVNLDPSYDTDVEECIFLGDEEDREGTEGHGHDEDSDEDDSVVVDDPFGMLPTRPTPPDSLDL

SEQ ID NO: 33547 - DNA, 9215 bp, DROSOPHILA
tccaattgcaattccaatatcaatttcaatgtgaaatgaactactaccaagactcgctatatatactcgtatatatatatatatttacacatatacatatacatatacataagagcaactgatgcaaaagttccgtttgtaaatagttgagaaaaacgtggaattgaagtacttaaacttttattacgaccaactactaacgactgactactacgaactgctgaggctgtaaattttatgtgtataaagactactacgttaagctacccatacaatagttcattggatacgtaaggcaaattcactgtctcaatcccgcaacataaacccaaaactgctaagctaagacataatcatgatctctaaaaaatagtcagtttacgaactcctctagatcctaattcatttggctggactgaagtgttatttgttatgtgttaagtttttttttttttgtttttgatgtctacaatgtctattttgaagtgagtgagtgagtgagtgtgcccagtactaccaacgttcgttgtctatatcatatttggctgggactcggttccttggctctgctggcaggagaatcgacttttatcatttctatcatttttatcgttttagtcgcttatcgcttatcgcttatcgtttttttggacgcaattggacgcctagagctgcccggtatcgttgcgatccgggggattcgctagctacaaagtcgtatcaaaattcttaacatactactaagtttttggtttagcttttgccagttctttcggtgggacagcccgtgaagatcaccgtgatatggttacagttgattactgcctatcgacgggctgtcccgtgcaaattgttgtctgccatcgctcgtcgattgctgctgctgctcagcggcaatcgcggatcgaggctaagatctagccacacaacacggttagtgaaagtaacagaggggacaagtgggggcgacggatcgacggatcaacgggtggtgactcccctagcctgcgactatttgggacacggagttggtgcgtctgcgtttggtgatttgcttccagaggcggcgattcagcgatggcttgtcctgcattcgaaatagaggttacacgattgaaagtctttgggaatttgatgggtatttacgttatccttgcgcggcgacatttgggccatttccactgagtcctgggcctgcgattgacccggcggcagcttctggagaagaagactgctctggctgtggctcggttggggctgctcgccaatggcgccgtcggagaagttgggggtgctgctggtgctactggcggttatctcggagttgcgacgctttataaagtttatcctgcggatgggttagacatttgacttgctccatgtctggtggtctggtgtgagtaatactcacaagcgcttagatctgcccacttcggtctcaaggaaggcctcctcagtcattgttgtggtggttgtggttgtggtactgatggctcccgctccgtccatcgaagtagaactcctcgtcctcgtcagagaggctgctgcagctgctcgtttgggccaggaagagtcgcgtttctccgaatccatccccgaacgcatctccgtagccatggccatcagagtggtcgtggacgtcgtctccctgactcgacagccactcctcgattgagacatggagtatatcttctcgcgtctcgctaagatttccagatcgcctaatttgctcccgcctctgttggagctgcaggcggtgctgttgccgccggcgcttccgctcccgccgcctactcgaccagcagatccaccacctgcttgaaccaccagctgctgttggcccactggctcgacgccggcacgggttaaaccaccgccgagcggactgttgccgtggctgctgctgctgcgactgttgttcggattgctgttgctggtggagccgcccaaggcgcccgctgagagggggcggggccggcggttcaccgtcggcgtgtccatctttgagttgcgttgttgagagtacgatatgacagcctcttttggctgcaccctgttcgtggctgaacgactcaataaatcgcgacccgtcagacgatgaaatgtggagaggtcgtgcctggaatagggacaccattttaatttaatactgaagctgatctaatgtgcgagtgggacaatctcaccccagaatagtcgttagatcgggaccaggctcgtagcagatcaagtcctcgtccccgagaatgtcgtggttgagggccagccgcatttccagccttgggcttaggccgcatccagcgtggggcattgggacagtgggtgcgtctggcgcagccgtcgatggtgctggcactgcagccgggcagctctgacccctcggctgcgactggtgctgggtgggtggactctggcggatcggctttgccattctcgaggctgttgctgatgaagtggctgaggcgggcctgggtgcccccagcaggcaggtctctattatcgttgatgacggtcgttttggggccaccgctgacgccaagctgctggtactcggtgttgatggcattgtccttgacccgatagcggttgggtccgaagcgctggcggcgtcgccgacagccaccgagcagccactgtcagcagtagcgccagatttttttcgaggtagctcctaaacagaaaccttcattatttcgaggatcaagtgcattaatgctacggtctttatctctaagactgtctgtctttctgtataaataaaatacaatgggaactcaccgttttggcctgaccagcgattagatcggtctgcgtgaggagcaagcgacgcggaggcggtggcggcggtacaaatctcggaggtctgccgctggctctgccgccggagctggtagtgtcgctcgcgctgctgattgttgaaatagtcgatgagggagctcgactcggcgtcatcatcgtggtcgtcgtcgtcttcgttgtcatcgtcgcattcatcccgatcggtgtcgctgctgccttcgccggagacagaggcgtcggccgagaggatgtcatcgtggtggtgcctatgctcccgccggcgagatcgcgtcctggtacgctcgaggggcgctgatcgagcagatactcgcaggatgaggccaccagtactgccggcggctgaggatcgatagccgtggtgggcagtagacgggtggtgagtaagggacgcggccccatcgcactcgtggccagattcggaagcagtcgctccacgctggagtgcaagtcctcctggtcctccatcgccagattctcctgctggccctccgctgacggatcctcctcccgatccggcaccactggccgaggaactagtggtggggctggtggcaccgactcgctgtcgcttgaacttccagccgaatcctctaggtagtggccattggtcgttgcttccccctaccaattgttgggaatagaattcaactaatcaattctggttgggatagagattcctgccagcggttggcgcagtttgatgtgaatgggggtgaggagttggatgcttggttcgtttacagtacggaatgtcgatagcaagatcgaatcgatgggtttagttcgcaggaggtggatggtggttgttttccggttgttcgtcaatcatgttcggacgtgtgatgttgatgagctcgcagtattgcagtatgggctaaagcttcactaattttactacgaccttctaaacaagtacaagtacatatttatatttgccaacacggtttacagcaacacattaagcagacaggcaataaaagtacagttttcatacaaagtcaaaatatgttagcatgattgattaattcattgtttgatggtggtgatgtttgatcgatgaagatgaagatgatgatggagatggagatggagatgagcaagttgcagacgatggtttatgaaaatacagacaaaatagaaagacaaatcaaggtcatttccgaggctagtttaatagtgtgactagggctacatgcaggaggattaaatctaaagaatcgttgcagattgagcagatttagctctccttcccgatcttttattgtgcttgggtacagttgcccactggtagtagtagttggccatgcagcggagtgtggacttgaaacgaaacgcgagcactgaacacggttgcattttcgtttggacccgggaccatgtttttgttttgttaaattttggggcgtgtgactgggatttgctgtaataacgacccacctttttgatgtcatcgctgtcctgttgcgtcttctcttcgtcgctctccgtctcctcctcaaaaaggggctcaaggcgacgtctacgtcgacaatacggatacgatttacgataacgatttcgaaaatacgtgtgtatggcgaatgcaaacgaatttcaattggaatttagcaacagtcgatcgatgtgttgattgtgtgtcgatggcataaatgatatatcaatttcgattgagcaaaacttagttgaggttatatgtaaatacgttggtaaatatatgtaagaatggagggatatgctacaaaggtatgatccctcgccttattatcaacctggctatgactatgactagatctaggactagcccgcaaatgagtgagcaatactaggtataaagttattgtttacagatagagatacaatgtatggcactgatttaaatcgaatttaggctcatgtgagatacgtgtgtgtgtgtgtgaaacgaatgataacaaaaggataaacacctgtaaaagctacgaaagaaagtttccaaaggagtacacgaaaaaaagaaagttcgtattcttattaacagtaggatcaatggaggcactagactaatctatactaagtatggtagatatagtatgtcgagatactcggtatggtgttcaacagttagagatcggctgcctagggtttctctaccggctgtgtgtgattattggtgggtgttttttggagatccaagtaccgaattaatctgaaattcctccccaagtcctacataccgtggcaacaatccccgaattgtgctggcagtcataggtggcgccattaacagctcgtccatcatcaactccgtgtcgtcgtcgtcattcaaggaggtgctcgacttggttggcgactgtatgtacgtaatcagatttattaacgattaaaaatattacaaacatcaaatgctcaccgaatgtgtgttttccgagttgatcagctgcaagtcctgatcatcgttatccccgccactggtgggtgtgccccagacctcttcaccactggtggctcccgaggtgcactcgtccatttgctcatccgtctccgaggcggttccctgctggtgctgctgttgtgcatcgccagcattccagcgacccaagtacttatcaatgaaagcgcgcgattcctcgaagaaggacatcttgtcggagacataggctcccgcccgatttgtccacgcaccactggccaggccctcgccattgacaatcactccggacgaactggaggcccccaggtcgttttgtaccaaagctcgttccgagtccgcatcctcgtcgtcttcctcgttttggggactgttgccgtcgtggccatttggcttaaatgaatccaaatcatcatctagctcatcggcctcatccattcgatcatcggaaggtagtttctctaagcttgacatggtgccgaatcggcgaagagcactgctcatgggtcgatagggtggttcctcatccaatggggactcgtcacacgagtcctctggaatattctcaataatggcctgccttggttgtttcgttgtagtggtagcggtgctggtggttgaggttcctccgccgtttgacgagcagccactgttgtcccaaacgtgagtgctggttttagtgagcaccgaatcgggagtgggcggcaccacggctatggtgggtgtactattctcctccttggggatcctttcctgcccacaaagtgtggcagctggagcaagctgcgccagaccaatgagcatcagggacaactgctcgtcttcctgtttctgctccagtgtggtggtcgtttgcttgggtgattccagtagcttgcaggtctggtgctccattttgtccggcgagagttgagcgtgggtaaagtcctctggagtacagcgacagtggcaggcggcatacttggctggggaaccacccaccgagcccgtgcccgttgccgatcccgaacccgagcctttcgttggactgctccgcattatcctggccgtctccgtaatggtcacaatggccttcacctgctggttggcctttggccttggtggctcctggcacatttgggccacaacgcgggtgcgacgtggtggtggcagcggttttggcgaaccaccaccgacgccagcggagcagtggccattgggcaaggatgaaactgagactggcggatctagatgacgtagtctggagccggtgataactgggtttccttctccggcacttctactgctattgggcatcgctccgacgctgtcatcggtggcctctgattgcgattgggaaatttcatcggttatcagttgggccacgtcgctctcggtgtcgccggtttcccgacgactgctactggccaccactttggaggacagttcccccgtaatagtgctgctggacatgctggtcacgcttcctgtcccagttccagttcgattgctgtttttcgggttagccatttccgtggctcccgcaataccattgctaagcttgcagcagcgatttggcgacgattggctgtgctgcactttcaacgaattgcagagcaggacgggcgtggaactggagttgttgactccgcctccgccgccaggacgcgctccacccggtccgctctgctggcaattcttgtggcaatgacggcaaacggccagcttgtccagcacaatgggactagagcgtacggtgatctggcagcgggtttcgaaacagcagcagggaaaatttgggaagaaagagcagggttagcatgaaagtctacaagtaagcggcgagggattgaagctggttggtttaaaaggatttacgactaatacattgttgctatgcttaatgaagcagtattctggacagaaaaaatcgcttctcacctggctgtcggatgtggtgctatgcgactgactgatcacactggtcacgccctccgcctccgacgtggagtagatatccgaggtggcgctcatgctcagttcctcgacgccactcagacgcttgcccccaaaattgggcctagccgatagcccgccattttccttggccagattgagctccttggtacgcttctccagctgctgacgcgtccagtaggtgatccgttcgtcctgctcgctatcgctgttgaaaatcagttgctcgtcctcggcactcacattctcctgggatcgcgcgatcgccgccagtcgagcctgctgctgctgcttgtccagctgacccttcatccagttggccagatgcaaggcgctcgacttgggagtgcctgtcttgttcagaatgcgacacttctcgtcgatcagcagctcgatctgttccacatgaccaccgtggatgccatggttgtggccgtgcgagcgatccgcagttcgatcggttgccactcctgtggcggaatggacgtgtccgtgggaattgttggtacgctgctggaaaagctcggttaagtaagtaaaatacgttacctggacccggggaccatgaccttgagcctcaaccaccacaccaccagcaccacccactgccgcctgtcgtttggcaaattaaaaatttgtgatgggctcatttgctttttgctttttgtttttagctttagcttagcacgggtcttgccctgtgtttgcttttgctttgctttttggctttgcctttgggtcagagaactctttttgcgaagcggtgaaacggaacggaaacaataatctcagtccatctttgattaaaaacgcttgcttttggctaacaacggaaattggctcaaatgggacattaggactttacggatctataaatatatatatatatatatgtatatatatatgacacaagacaacggcttacgatagcgagtacaatcacacaacaaacaactaataagcaatggaagttgaagtaggtttggagaatagaaagaagcaattcgaacttaaaactaaaattgagtccatcacaatttttaatttatcaattttggtttttgattggtttcatctttttttttcacggcttaaaaaagatttttgcatatattttcttcggatcacaggatctggttttgcggagctatatggttatccagtgagtgctcggtgggtttctacttggtttaattttcacttattttgttttttgtatttttttttttttggtttttgaaatgaaataaaaagatcatcacaagcgtttttagtcaaagaatcatttggttttattattatttgaattcatcgtttctcttcgcattcttaatctcaatcgcaatcgactcgatcgatatatcgatagtcgattctcgatcctctcgttttatgtaaaatgtcgaaaaaccataaatggaaaatatctagacgtacataaagtttacagaatatgaatatgaatctaaatagtttgtatgtatatatatatactgtgtatagaagtttcttgtttactgctcaaggcacactcaaaaccgaaccgcaaaagacaaagcggcgtatgcttgatatttcacaatcagtttcaatttgcaatagttgtctgtgtgcgtagagtgagtgggtgtttattggtgtgtgtgtgtctgtttgtatgctaaactgtctgtttaaacttctggctgggtggaaatttgaccaaactgaatccgcactgagggaccaaatcttagaagtttagcatttaatcaatttaacttcctttagaattttgtaccactgtgcaaaggcagactagtgctgggtaatacatttatgtaagtggttagcgtgaagatatatttttaaggcaacaaattgcttgtcatagctaattgacatcgatggctagatcagatacatatatgtatatagcacgtgtattttgccatccagccaaaagtcattcgactgagcaacattttattacagatgataaaaacgcatactgaatcatgttaataggaaagtagtatatatacaactaaga

SEQ ID NO: 33548 - DNA, 4158 bp, DROSOPHILA
atggactcaattttagcggcagtgggtggtgctggtggtgtggtggttgaggctcaaggtcatggtccccgggtccaggtaacgtattttacttacttaaccgagcttttccagcagcgtaccaacaattcccacggacacgtccattccgccacaggagtggcaaccgatcgaactgcggatcgctcgcacggccacaaccatggcatccacggtggtcatgtggaacagatcgagctgctgatcgacgagaagtgtcgcattctgaacaagacaggcactcccaagtcgagcgccttgcatctggccaactggatgaagggtcagctggacaagcagcagcagcaggctcgactggcggcgatcgcgcgatcccaggagaatgtgagtgccgaggacgagcaactgattttcaacagcgatagcgagcaggacgaacggatcacctactggacgcgtcagcagctggagaagcgtaccaaggagctcaatctggccaaggaaaatggcgggctatcggctaggcccaattttgggggcaagcgtctgagtggcgtcgaggaactgagcatgagcgccacctcggatatctactccacgtcggaggcggagggcgtgaccagtgtgatcaaggccaccgatgacagcgtcggagcgatgcccaatagcagtagaagtgccggagaaggaaacccagttatcaccggctccagactacgtcatctagatccgccagtctcagtttcatccttgcccaatggccactgctccgctggcgtcggtggtggttcgccaaaaccgctgccaccaccacgtcgcacccgcgttgtggcccaaatgtgccaggagccaccaaggccaaaggccaaccagcaggtgaaggccattgtgaccattacggagacggccaggataatgcggagcagtccaacgaaaggctcgggttcgggatcggcaacgggcacgggctcggtgggtggttccccagccaagtatgccgcctgccactgtcgctgtactccagaggactttacccacgctcaactctcgccggacaaaatggagcaccagacctgcaagctactggaatcacccaagcaaacgaccaccacactggagcagaaacaggaagacgagcagttgtccctgatgctcattggtctggcgcagcttgctccagctgccacactttgtgggcaggaaaggatccccaaggaggagaatagtacacccaccatagccgtggtgccgcccactcccgattcggtgctcactaaaaccagcactcacgtttgggacaacagtggctgctcgtcaaacggcggaggaacctcaaccaccagcaccgctaccactacaacgaaacaaccaaggcaggccattattgagaatattccagaggactcgtgtgacgagtccccattggatgaggaaccaccctatcgacccatgagcagtgctcttcgccgattcggcaccatgtcaagcttagagaaactaccttccgatgatcgaatggatgaggccgatgagctagatgatgatttggattcatttaagccaaatggccacgacggcaacagtccccaaaacgaggaagacgacgaggatgcggactcggaacgagctttggtacaaaacgacctgggggcctccagttcgtccggagtgattgtcaatggcgagggcctggccagtggtgcgtggacaaatcgggcgggagcctatgtctccgacaagatgtccttcttcgaggaatcgcgcgctttcattgataagtacttgggtcgctggaatgctggcgatgcacaacagcagcaccagcagggaaccgcctcggagacggatgagcaaatggacgagtgcacctcgggagccaccagtggtgaagaggtctggggcacacccaccagtggcggggataacgatgatcaggacttgcagctgatcaactcggaaaacacacattcgtcgccaaccaagtcgagcacctccttgaatgacgacgacgacacggagttgatgatggacgagctgttaatggcgccacctatgactgccagcacaattcggggattgttgccacgacgtcgccttgagcccctttttgaggaggagacggagagcgacgaagagaagacgcaacaggacagcgatgacatcaaaaagggggaagcaacgaccaatggccactacctagaggattcggctggaagttcaagcgacagcgagtcggtgccaccagccccaccactagttcctcggccagtggtgccggatcgggaggaggatccgtcagcggagggccagcaggagaatctggcgatggaggaccaggaggacttgcactccagcgtggagcgactgcttccgaatctggccacgagtgcgatggggccgcgtcccttactcaccacccgtctactgcccaccacggctatcgatcctcagccgccggcagtactggtggcctcatcctgcgagtatctgctcgatcagcgcccctcgagcgtaccaggacgcgatctcgccggcgggagcataggcaccaccacgatgacatcctctcggccgacgcctctgtctccggcgaaggcagcagcgacaccgatcgggatgaatgcgacgatgacaacgaagacgacgacgaccacgatgatgacgccgagtcgagctccctcatcgactatttcaacaatcagcagcgcgagcgacactaccagctccggcggcagagccagcggcagacctccgagatttgtaccgccgccaccgcctccgcgtcgcttgctcctcacgcagaccgatctaatcgctggtcaggccaaaacgtggctgctcggtggctgtcggcgacgccgccagcgcttcggacccaaccgctatcgggtcaaggacaatgccatcaacaccgagtaccagcagcttggcgtcagcggtggccccaaaacgaccgtcatcaacgataatagagacctgcctgctgggggcacccaggcccgcctcagccacttcatcagcaacagcctcgagaatggcaaagccgatccgccagagtccacccacccagcaccagtcgcagccgaggggtcagagctgcccggctgcagtgccagcaccatcgacggctgcgccagacgcacccactgtcccaatgccccacgctggatgcggcctaagcccaaggctggaaatgcggctggccctcaaccacgacattctcggggacgaggacttgatctgctacgagcctggtcccgatctaacgactattctgggatggacacgccgacggtgaaccgccggccccgccccctctcagcgggcgccttgggcggctccaccagcaacagcaatccgaacaacagtcgcagcagcagcagccacggcaacagtccgctcggcggtggtttaacccgtgccggcgtcgagccagtgggccaacagcagctggtggttcaagcaggtggtggatctgctggtcgagtaggcggcgggagcggaagcgccggcggcaacagcaccgcctgcagctccaacagaggcgggagcaaattaggcgatctggaaatcttagcgagacgcgagaagatatactccatgtctcaatcgaggagtggctgtcgagtcagggagacgacgtccacgaccactctgatggccatggctacggagatgcgttcggggatggattcggagaaacgcgactcttcctggcccaaacgagcagctgcagcagcctctctgacgaggacgaggagttctacttcgatggacggagcgggagccatcagtaccacaaccacaaccaccacaacaatgactgaggaggccttccttgagaccgaagtgggcagatctaagcgcttgataaactttataaagcgtcgcaactccgagataaccgccagtagcaccagcagcacccccaacttctccgacggcgccattggcgagcagccccaaccgagccacagccagagcagtcttcttctccagaagctgccgccgggtcaatcgcaggcccaggactcagtggaaatggcccaaatgtcgccgcgcaaggataacgacaagccatcgctgaatcgccgcctctggaagcaaatcaccaaacgcagacgcaccaactccgtgtcccaaatagtcgcaggctag

SEQ ID NO: 33549 - protein, 1385 aa, DROSOPHILA
MDSILAAVGGAGGVVVEAQGHGPRVQVTYFTYLTELFQQRTNNSHGHVHSATGVATDRTADRSHGHNHGIHGGHVEQIELLIDEKCRILNKTGTPKSSALHLANWMKGQLDKQQQQARLAAIARSQENVSAEDEQLIFNSDSEQDERITYWTRQQLEKRTKELNLAKENGGLSARPNFGGKRLSGVEELSMSATSDIYSTSEAEGVTSVIKATDDSVGAMPNSSRSAGEGNPVITGSRLRHLDPPVSVSSLPNGHCSAGVGGGSPKPLPPPRRTRVVAQMCQEPPRPKANQQVKAIVTITETARIMRSSPTKGSGSGSATGTGSVGGSPAKYAACHCRCTPEDFTHAQLSPDKMEHQTCKLLESPKQTTTTLEQKQEDEQLSLMLIGLAQLAPAATLCGQERIPKEENSTPTIAVVPPTPDSVLTKTSTHVWDNSGCSSNGGGTSTTSTATTTTKQPRQAIIENIPEDSCDESPLDEEPPYRPMSSALRRFGTMSSLEKLPSDDRMDEADELDDDLDSFKPNGHDGNSPQNEEDDEDADSERALVQNDLGASSSSGVIVNGEGLASGAWTNRAGAYVSDKMSFFEESRAFIDKYLGRWNAGDAQQQHQQGTASETDEQMDECTSGATSGEEVWGTPTSGGDNDDQDLQLINSENTHSSPTKSSTSLNDDDDTELMMDELLMAPPMTASTIRGLLPRRRLEPLFEEETESDEEKTQQDSDDIKKGEATTNGHYLEDSAGSSSDSESVPPAPPLVPRPVVPDREEDPSAEGQQENLAMEDQEDLHSSVERLLPNLATSAMGPRPLLTTRLLPTTAIDPQPPAVLVASSCEYLLDQRPSSVPGRDLAGGSIGTTTMTSSRPTPLSPAKAAATPIGMNATMTTKTTTTTMMTPSRAPSSTISTISSASDTTSSGGRASGRPPRFVPPPPPPRRLLLTQTDLIAGQAKTWLLGGCRRRRQRFGPNRYRVKDNAINTEYQQLGVSGGPKTTVINDNRDLPAGGTQARLSHFISNSLENGKADPPESTHPAPVAAEGSELPGCSASTIDGCARRTHCPNAPRWMRPKPKAGNAAGPQPRHSRGRGLDLLRAWSRSNDYSGMDTPTVNRRPRPLSAGALGGSTSNSNPNNSRSSSSHGNSPLGGGLTRAGVEPVGQQQLVVQAGGGSAGRVGGGSGSAGGNSTACSSNRGGSKLGDLEILARREKIYSMSQSRSGCRVRETTSTTTLMAMATEMRSGMDSEKRDSSWPKRAAAAASLTRTRSSTSMDGAGAISTTTTTTTTMTEEAFLETEVGRSKRLINFIKRRNSEITASSTSSTPNFSDGAIGEQPQPSHSQSSLLLQKLPPGQSQAQDSVEMAQMSPRKDNDKPSLNRRLWKQITKRRRTNSVSQIVAG

SEQ ID NO: 33550 - DNA, 2486 bp, DROSOPHILA
ctttggtatcgtgatgtacgaactgttggcggagtgcttgccctacggtcatattagcaacaaggatcagatcctgtttatggtggggcgaggacttctgcgtccggacatgagtcaagtgcgctcggatgcgccgcaggcattgaagcgcttggccgaggattgcattaagtatacccccaaggatcgaccgctctttaggccgctgctcaatatgctggagaacatgctgcgcactttgcccaaaattcatcgcagtgccagtgaaccaaacttgacgcaatcgcagctgcagaacgatgagtttctgtatctgcccagcccgaaaacgccggtgaacttcaacaactttcagttcttcggcagcgctgggaatatctagacagcgacctgtacctgtacttacatatatcctgcgtgatcaacgtgatcctacatctatatactttttgttcttgtccctctgtacataagcgattcgcgaaggggacggctttggttgtccaccaaagtgaaagagagagagagagagagaaagagagagagatgggttgcctgccgacccgggagcgaaacttgcttctttccttggaactgacaaagtgcatttctgttaccacacacaaaacgactacaaactgtaaactaaactgcaacgcccatgtgtacataactgcatcataacttatatacgttaggcaagactactgaaactaaactaaactaaactaaactagctgatcgcaattacattatacacattatacttatactacaagagatggtgttgtttctggagtcgagcacgatgaagaacatttaattcaggtattatttgttattcattgtcattaactacttcttggtttatgtttacacacaaggttctaggaatttttaagtatggaaccacccagccgtatattcaattagaaacaccactcattcagttggataaactttattcatttagcaacagaaaggcgtgatccggaggatcctaaacatatctgctggcgatggccagaaccttggtgtaatcggctcctttggccagcgtcttctccttgaggatggttcgcaggatcgtgggaatgggcacatggatgcgagtgcccagcggactgccattgtcgtcgatgagcaccaggttgttgctatcgaatttcggctgtttgggcttctggttctgcttgagtcccacgagaatgcccttcttcatctgtcccttgatggccaccagcaccttatcgccaatgaagccgactccgcgtttgttgtagacatggatgcacctcggtggtcgcccctcggccatcgctttctttcccaaatcgctgttgtccaccacccgtaaccgggccaatttccggatttcgcagcacgccggcgttgtgtgaatcaattgctgtgtttgctggccgcccagggttaccgccagtggttgggccacttgtctaactgttttcaggatgcgcagcgccattattcgcaggtattattgtagttcctattttatttaattcattaaactcaagggaaacgcacaacaaaaataaattatacaattccttttaatcgtacgacagcgttgccacatcgcggcgaaaataccatatgatttagctacagcgcagttatcgatgttacgacctaacagagcaagcagctgttaagagcggactatttgaacagtactgttaaaaggcaagttttattttaattcaaattattcctcgtttcgttttttaattgaaaattggcttgttgagaataattcaggtcagtcgatcgtctttcaacaacgatcacagtcattagcaaaaccaaccgttattctcgtcaccctcactttttaaacatccaagtgcgaggtacaaagaaacacacatttaacttctgtttttatttttttattttattcagtttaatacaatgccatatatatatatacacatcagcgcattaactgcagttgtttaaaaataatttattagcattagtaactctcggtattgggctagtttgtttcgctaccgtttgcttttatttatttgacacgactaagtagaccagtcccattggttagaaaattggttactatatttcactatgacgtaagaaatattatatcggcataataacatacatatatatatatagatatatatttatatagataaattttgcgcttttcgttttcttgttaattttttgggttctcttgtgacctaatgactaaaacaaacttttaaaaaactacatagttcataacaaaaactaagattagttaaaaaaatgtggggggggggggcactttaaaagcacggggatgaggtgaaaataagttttactaaatcttggctttatcgaaattatatacaaactcaacacaaaatgtattgttaacggtttaaaaaatatataacttgtgcgctgcttcaataatttttgcccgactctcctcagttcactttcaaaaactt

SEQ ID NO: 33551 - DNA, 486 bp, DROSOPHILA
atggcgctgcgcatcctgaaaacagttagacaagtggcccaaccactggcggtaaccctgggcggccagcaaacacagcaattgattcacacaacgccggcgtgctgcgaaatccggaaattggcccggttacgggtggtggacaacagcgatttgggaaagaaagcgatggccgaggggcgaccaccgaggtgcatccatgtctacaacaaacgcggagtcggcttcattggcgataaggtgctggtggccatcaagggacagatgaagaagggcattctcgtgggactcaagcagaaccagaagcccaaacagccgaaattcgatagcaacaacctggtgctcatcgacgacaatggcagtccgctgggcactcgcatccatgtgcccattcccacgatcctgcgaaccatcctcaaggagaagacgctggccaaaggagccgattacaccaaggttctggccatcgccagcagatatgtttag

SEQ ID NO: 33552 - protein, 161 aa, DROSOPHILA
MALRILKTVRQVAQPLAVTLGGQQTQQLIHTTPACCEIRKLARLRVVDNSDLGKKAMAEGRPPRCIHVYNKRGVGFIGDKVLVAIKGQMKKGILVGLKQNQKPKQPKFDSNNLVLIDDNGSPLGTRIHVPIPTILRTILKEKTLAKGADYTKVLAIASRYV

SEQ ID NO: 33553 - DNA, 2402 bp, DROSOPHILA
ttcttgaactttaacaaatcatcagcagtgaaataagcatgtgcaacatttggtctaaaatcaatcaatcaataaacatttgtacctttttttctcttttttttttttactaaatataagccagcggatgcaggatacaaatccaaatgcgaactcatccgaactacaagtgctatatactcgatttttcatttggccgaaccagagaagaggcgagcacttcttgtccccatagagatttgcagctgaagtggggtttgaggtacacactcgccactcccatgtgtgcctgatttgcaccatcattaaaatcatcatcgtcagcgtttgtaatctaatttgcagtcatctcatcaccatttgaccccatatactgtgggtgctcgcactcgcactcagcttgcgagtatcctttgcaaaagttttacgcccggcattcaatttaaatggggtgggtggcctggccaatggccattcgaagggtggtggtgtgcttgttgaatgaaacaaacccaaacccgaaactcgaaatgcgaaacccaaacccaaatccgaaaccctaactcaaaaccatgacaatctcttcgagtgtcgccatgaatagatttcgcccacaatagatgggtctaatgaaaggggtgtgcccagtggcatgggcacgacttggaaagatctcaaaattggagcggaaaattgcataatactatgtggtcctactacatactacatttggatacctacgctacatgctcgcgctcacttcaaatttcttttattgtacagaatttagttagtgtatagttaaattagtaaatatacttagtatactctaggggacactgctgcttgcgcttcatatcttagggattacgaatgatgggagtggtgtaaattgatttgcagtggatgggtgtggcggagtggtggagtggtggagtggcggagtggcggaattggcggagtggtttgtggctgctcgggccaccgtgtgaatccttcactatcctttgcagtactgcaagagctccctgtaggtgcagccacccgacttgcagcacaaatcggttacgttctgcaagtcgcgcttcctgcgcttcccgaaactgttggctgtgtagggtggagggggacgggatttgtttgagattagagttcgtcgaaatgtcaagaatcatgggacacacttacgaaatacatcgccaagggccaccgttccgcttacgcatatcttctgtatcacatcgctgaggccggtggagcacatcatgcgtctctgttcgtattccgtgggtgcgagcggactggccgccacctggggcatccagctgctgatcatcgccgccacggcgaacaaggtggccaggactagcaggactttggacgtcggcactttgagaaccatctgcaatgggcacagattgttagattgcttaacaacgctctgaatcgctgaggcagtgtgcccatggatatgactgatgtcactgtcatccccccgcatagcccccacccccccccccccaaaaaaaaaaaaaaacctgtgtggcttcagcatggccatggatcgtcaaaggacacggttcttcggagccggccagataactaccccatctctcttccgcctcgcgcacgcgcctgatcccctggtccctggtctctggtctctggtttctggctgggttgccttatcagcaacaacgctcaaatattattgtattttccattcgattctgttattgtttgtgtctgggctggccaggaaatatatttacataaacttcagtgtttaaaaataacccaccgatttgccgccttgctgggctccccacttatcatttggaacatgagttctttttatacacaatcagaaagtcgtagtgactcgaatgaaagggggatggagcgggattgggtgttcgtggggcatatgccccatgtggcttgtttggttttttttttgtttttgatattgcttgcttttatgactctcctttggaaactcggttttcaaccacactccatatatagtaatgtggttcaatgtttttccacttctgtcgctttcgttttcacagcgatatagacgagtacatgggtgtatatttagatgtcgcacaccacttggctgatttcggctggttggtgggttggttggttggtttgtttgtttgtttgtttgtttggtttggtttcatttccttgggaagaaccgatctcggctcgagttttgttttcatcgtgataagaatcgagaagaggttaaggctgtctttgtgtcaatctctagtgattggatggttcaaggggctggaggtcttacacttctcacatccttgaagggcttcaatttttttaatcttgtgcgactttgatttaaaataaagattatggcggattccatg

SEQ ID NO: 33554 - DNA, 324 bp, DROSOPHILA
atggttctcaaagtgccgacgtccaaagtcctgctagtcctggccaccttgttcgccgtggcggcgatgatcagcagctggatgccccaggtggcggccagtccgctcgcacccacggaatacgaacagagacgcatgatgtgctccaccggcctcagcgatgtgatacagaagatatgcgtaagcggaacggtggcccttggcgatgtatttcccaacagtttcgggaagcgcaggaagcgcgacttgcagaacgtaaccgatttgtgctgcaagtcgggtggctgcacctacagggagctcttgcagtactgcaaaggatag

SEQ ID NO: 33555 - protein, 107 aa, DROSOPHILA
MVLKVPTSKVLLVLATLFAVAAMISSWMPQVAASPLAPTEYEQRRMMCSTGLSDVIQKICVSGTVALGDVFPNSFGKRRKRDLQNVTDLCCKSGGCTYRELLQYCKG

SEQ ID NO: 33556 - DNA, 2257 bp, DROSOPHILA
tttattgtgtcgagtaataaatattgcccatggacaaaaagaaaaaagctatttgtggagtaaaacgaatgaggacatgcttatgagctatgaaatgcctggatggatggatggatgggtcttcttttgggggataaatctaacgtgttgtaacatcttgaacaagcgagctgcaatcacttcattaaaagtttatgggatttaaattatgataattgaaaccacgaggtgttactaacgaccaatcaaaaaaaaaaaaaataccttgccaccccttaatctgacttgcaacccctaaagtttgttggttttttaggtgtttgacaactcgtgagataatttttatttacagcaaaagcgttaagaaacatatgtaccatagcatagagacgctacggggaggcgtagtcgtcatcgcccatcctggaatctgtttcctcaaagtgacccatgtccgccttgtacagtatgcgattaatgtgaaactggactgtgttccttgtgcgggcagagtatttgcctaatttgctgcccagatagcggaggaagtagtcctcgtcgcttggagattggtctaaagcagccgcagaagatgcggctcgagctggagacttggcacgagcagtggtggaagtgggagccacacagacgctggattcgttagtagtctgggccacagaaacatcgacggccttcagttccatatttgcagagtttttccactgatactcctcgtcaggtatctccgattttccaataaaaacgccctcgaactgactgactgtagcgttgttcttgttatctacgtccccggtctcttcaccattcaacgtcaccatggtttccatgccactgtgctgggagtcgtcgtcctgaaaaaaacagtggctattttagtttggtctatgcgattcttgagctgtagaagctcggaatttgagttgattgtttatgcacctcggtaatgaaagactgctttcgtgtcgttggatatagaggatacttagaggccaagactttcttcgtcggattgactgcatctttgttggcctgctgctgggcaagtgccgcacggatttctcgcttctcgtccagaacacttttgtaggcatcctcatgcttacgtttcaaatgccgcatcagattctcggagtggcgacctgccatatcgaagtggcaccttttgcaggtactttttcgcgtcctttcgctatagacgaagtgcttggtcaccgggttcggatactttttcgacattgttccggactatgggaacgtgcggttcagctttcgattctgggttgcaccgtactcaagttacggctggttactaacttacattcattctcgcgctcgagccacaatcacaagcaaaaaccgtttaaaccgttctctgaaccagagagcgtgagagcggttcggagaggagcggttcagagagctgcggttttacgggcaagcacaccgatacgccgaaccggttgcaaacggttttgttcgttagcttgattataatattaatttagtgtttggattgcggttcaacagctgagagtggttcgtttatgcggcagaaagttatcacgttctctcgcacagttttatgatcagtacatatgtttgaaataataattttcagtactcatcgccactctggggttaaatagtggcgtgtgtgaaaaggcaaaggcaacggcaaacagaaacaaaaaaaaaacacatgcaaaaagtcattttcaactgcatcgtgcgagtgagagggtgtccgatcgtgctaaaaagagaggggacgagtgagtgcgtgccgcagcagcgctactaaatgttccgcagctgccggagatgcaatatttaacccttgttacttgcgcctttgagtggcggtctggtggttattactgctacagtcaaacgggccccaagagtgattagcattcgatctggcttggttatgaattcaatgccatacagtcgatgaaaaaaatgtcgaagatacgtttgaggaacatccaaaagaattgatgtacatatatatatatactggaatattaggtgtttgtatcggatgatttaggagcgcttagttatcaggtcaaaatttcaacgcttaaaatgcatttaaatacatacttaacagattggtgattatcctaaaattcgacactagcatatgtggccaggattgtgtctgaaatgacattacttccggccaaatagcagcatgtatgacaaagggaaaagcatacatctattctta

SEQ ID NO: 33557 - DNA, 780 bp, DROSOPHILA
atgtcgaaaaagtatccgaacccggtgaccaagcacttcgtctatagcgaaaggacgcgaaaaagtacctgcaaaaggtgccacttcgatatggcaggtcgccactccgagaatctgatgcggcatttgaaacgtaagcatgaggatgcctacaaaagtgttctggacgagaagcgagaaatccgtgcggcacttgcccagcagcaggccaacaaagatgcagtcaatccgacgaagaaagtcttggcctctaagtatcctctatatccaacgacacgaaagcagtctttcattaccgaggacgacgactcccagcacagtggcatggaaaccatggtgacgttgaatggtgaagagaccggggacgtagataacaagaacaacgctacagtcagtcagttcgagggcgtttttattggaaaatcggagatacctgacgaggagtatcagtggaaaaactctgcaaatatggaactgaaggccgtcgatgtttctgtggcccagactactaacgaatccagcgtctgtgtggctcccacttccaccactgctcgtgccaagtctccagctcgagccgcatcttctgcggctgctttagaccaatctccaagcgacgaggactacttcctccgctatctgggcagcaaattaggcaaatactctgcccgcacaaggaacacagtccagtttcacattaatcgcatactgtacaaggcggacatgggtcactttgaggaaacagattccaggatgggcgatgacgactacgcctccccgtag

SEQ ID NO: 33558 - protein, 259 aa, DROSOPHILA
MSKKYPNPVTKHFVYSERTRKSTCKRCHFDMAGRHSENLMRHLKRKHEDAYKSVLDEKREIRAALAQQQANKDAVNPTKKVLASKYPLYPTTRKQSFITEDDDSQHSGMETMVTLNGEETGDVDNKNNATVSQFEGVFIGKSEIPDEEYQWKNSANMELKAVDVSVAQTTNESSVCVAPTSTTARAKSPARAASSAAALDQSPSDEDYFLRYLGSKLGKYSARTRNTVQFHINRILYKADMGHFEETDSRMGDDDYASP

SEQ ID NO: 33559 - DNA, 3785 bp, DROSOPHILA
atgcgatctatttgtaacgtatttctctatttctcgcgttacgtgccatgtactcaagttagccggggagtcgggcgggggcttaataaataaatccaggggctgagcgaccatgcaacatatctttgtgagtattaaacacacgctgcactcctgctatttacgttgactgagtttgggtcttcggtgtggggctccggctcctagctattgagtgcagttttccgtgccttccgtctgcgtgagctgctgaaaaaaggcatagctttagaagaagttcacacacagccgaaacaaaacggaaaaacaaagaaaataaacaatggtaaaaacccatcaatggggacggagctctcatgccctgcaaattgggggaaaaccgaagtcaggggttacattaattcggtgaattgggcaaccaataaaggtggctttagaagatccgagctttttatctgataggtaattgcaaagtctaggtctaatgtaacgcaaaaattagtagctaatacaggtgcaaactccatactttcgttgtgggcttttatatacataatatacacgcgtgatttcttcttatttttaacagtgcaaattccacaatttggggctagcctccgtctcggtagagagtagtcctcctctggctgaaaaccacccacaatccatgacacgatgatcgctgccatccgaaatgaatggaaattgcaggtttttcactgagcagccaactccgctgtttcgcggcgcgtgcgcagaagctccaccaagtgtggctccaccaaagcagagcgaggcccatggctctgcccatatcgttggtggtggactgcgtcacggaagcgcagaagccgccaactggcgtcggggtattcgtattccaccgcattccgtgtgcctgcgcctgtataaataaaatggtcgcagtggggcagcaatcaaagcagccgcttcgtcggagccttcaacacctcagcacctgggtctcaagccaagcgatatggataaccgcagtttggtgagtggcgaccgggtattgcaactacacaaggattacacccgatatccgtgctccctctattcgcagctcctgaggctctcaattgtggtggcgctggtgttgcttctcgtctgcgtgccggaaacggatgcggggtatggattatcatggggactactgggccagatagaggatacatcgcggcacaggccccttaacttaaagcgtcattcagattaacgaacattttacaacttcaaatcatagaaagccaatcactctcgctaaataatttcaaacgaacttagctaaaatatttaacttaagctatattaataatcttccaaacgaaaagtgtatggaatcaaataatttattaggttaaaaatgtatttgctatccttttcaggggccaccagaaaaaaaagaaaatcgtgatccacgtgcccattcacaagaaaatcgaaacgcacatacacaccgtggtgaaacacgtgcaccaccaccacaagccactcgtcctaaaggaggagaagaaggtgatccacgaggaccaccgacccatccagattcaccagaccaaggaacacattcaccaccacgagaagcacgatcaccatgatcaccacgaccaccacgaccatcatgaccaccacgagcaccaccacccacttccgcctccggtggcgcctccagcgctgccggaactcgaagaggaggaggagcacatccaccaccaccacaactatgagcacaggggcggactgcgagacgacttcattggcggtgacgggagcagcagtgaggagcgctgactatgcagcgcccatgtgggggcgcagactgaccggatgcggcagacgtggaccgatcgatcggatcatcccggattcttgtgattccctagatacgtacgcactctttttgttttttttttttttctagcctaatggaaatgtgaacggaaataaagttaaatcggaggaaggacttagttttagagaagtgttaagggcaaccaaagacaaggttattcatattagttttttagccttgccattatttactaagttaggctctacgtaatgttagtaacggggtttggtagttttagcccttaaaacatttatttcttttgaataaaattgtacattcatggatatataatttactattaataaatatgttttatattacactcaattaatcgctgttaaaacgtataaaaagtttacgaaaattgaaggtaatttcataagaaattattaagttaacaaatttaattaatggtaatgtaaaaaagtgtgtaaaagaaagaaaattttaaatttaaataccagactgcagtgttaccatttttcctagtaatatcgaagtgcgatagggcccgataggttcgggccaataatcgatgacaggacaggctctaaacaaaagaaaaaaattaaaattacagcaggattgcgagcgatattcgttttatcccattgcagcatcattgagatcccggaaaacaaacaacggcgtaacgccagtccggagttggagtgtttccagaggagccgcagcattgtctcctgtcccacagctttccctcaaaaaaaccagcgactctgcctttgccttcccctccgcccccgttcaccacccacgctaccaccgcctcccaaggcctcgcccgcagaccacgccccccgcctgcagcttggcaggcttactcagcaaataaacaaacggaagagtgacgaagtgcagcggcagcagaagcagcaactcctactgtgagtaatccggaagctggagcagcaaaagcgtggatcctcatccattcggcggctaagcgatgcagtataggccaccatgggttcacagaccttggagattctgcgccagggcgtgtgggcctcgctgaccggcggttacttttacgatccgcatcagggtgtcttctgcaacgtggtgcacctttacctgtggctctacctgctctgctcgcccttcgtggcctacctggtaagtagtgaccgagtgtagtcctaagtagtccgttcatagatcttcttgcagtactttccgagcacttggttgacatggtgcctgtattgcgtgataacgagcttaaccatactgatggtaaagctggccaatctggcgctgcacaggctctacgatcgcgcacagaccatgtccgaggggaacctaaaggggcagttcgtgaaggtcaccaaggaaacggaaccgcgccacgacgacgagggcggcatcgagatgaaggtcatccgaccgggcggctcacgcatttccggcgagcaggccattaatgaagcaagcgaggagaacagcatcatgtccatcgacaacgtgaacagcattattggtgagtggtgcttcttgtgcacacgtgctatagcctaagaactcctcttcgcagatctcaaggtcgatgtgcatcgcaagaacagctcggagtccattgaactgatgttctacgccccatccatgctatccggcggtagccaacaggatcaacaatcgctggctggttccgccagcgttagcaagtccattcggagtacaggaccgggcggaaactcgtccaccagcgccgccgctcaagcagacatgttcaacaagtacctcactgtctatccggaggttgtcgaggcggctggaagcagtgcgggtagcgcagatggaggaagtagtggtggcgacagtagatcaggcgcagcagtgagtacactgggacatacaggagcgggaacagcaccagcccagcacgtac

SEQ ID NO: 33560 - DNA, 873 bp, DROSOPHILA
atggataaccgcagtttggtgagtggcgaccgggtattgcaactacacaaggattacacccgatatccgtgctccctctattcgcagctcctgaggctctcaattgtggtggcgctggtgttgcttctcgtctgcgtgccggaaacggatgcggggggccaccagaaaaaaaagaaaatcgtgatccacgtgcccattcacaagaaaatcgaaacgcacatacacaccgtggtgaaacacgtgcaccaccaccacaagccactcgtcctaaaggaggagaagaaggtgatccacgaggaccaccgacccatccagattcaccagaccaaggaacacattcaccaccacgagaagcacgatcaccatgatcaccacgaccaccacgaccatcatgaccaccacgagcaccaccacccacttccgcctccggtggcgcctccagcgctgccggaactcgaagaggaggaggagcacatccaccaccaccacaactatgagcacaggggcggactgcgagacgacttcattggcggtgacgggagcagcagattgcgagcgatattcgttttatcccattgcagcatcattgagatcccggaaaacaaacaacggcgtaacgccagtccggagttggagtgtttccagaggagccgcagcattgtctcctgtcccacagctttccctcaaaaaaaccagcgactctgcctttgccttcccctccgcccccgttcaccacccacgctaccaccgcctcccaaggcctcgcccgcagaccacgccccccgcctgcagcttggcaggcttactcagcaaataaacaaacggaagagtgacgaagtgcagcggcagcagaagcagcaactcctactgtga

SEQ ID NO: 33561 - protein, 290 aa, DROSOPHILA
MDNRSLVSGDRVLQLHKDYTRYPCSLYSQLLRLSIVVALVLLLVCVPETDAGGHQKKKKIVIHVPIHKKIETHIHTVVKHVHHHHKPLVLKEEKKVIHEDHRPIQIHQTKEHIHHHEKHDHHDHHDHHDHHDHHEHHHPLPPPVAPPALPELEEEEEHIHHHHNYEHRGGLRDDFIGGDGSSRLRAIFVLSHCSIIEIPENKQRRNASPELECFQRSRSIVSCPTAFPQKNQRLCLCLPLRPRSPPTLPPPPKASPADHAPRLQLGRLTQQINKRKSDEVQRQQKQQLLL

SEQ ID NO: 33562 - DNA, 2693 bp, DROSOPHILA
aattttcgatttttaatttttgaacatttttcgcaaattttaatgatgttaccccttctaaaaaaatccgaaaattggcaaaaaaattttttttcccaaaaccatttaaaaagtgataaggatcgttggctttggccattagcttcacaaaacagtaattataattgatttttggccgtttttggccgagttatgccagaattcccttaaagcactagacattcttggacaggttttctttcccaatttttcgacaaaaaaaaaacatttttgccatacaaataaaactaattgaatgaattcgtatccaaattttcaaactattggattttatgtaattgttaaatatctaaaaagagatcgtttcgagtcatacataaaagagcttttttggttagttaagaactaaatgcctttcacgacgaccccagcaattgccaggtgtgatcagatagtagcagtgcccagagagatgacgctagtcgggatcgagttccgtttcgcctggggaggaggcgagtgaatgcacctattaggcgacaatgggcgaaaggtgcttggttccgataaggcgattcgggatcattgtcccacggatgcgcggattaggtggtgtagcataaccagcgccatggaatattttaggcagggcacaagggagagcgagaaatttcgatttgaactggagactcagcttggcgtttatttggctatggatcggtgagctattgaccgagattcgtgttgattccgacgcttatcgctgggccggatagttgttgttgtcccgggtacacaacaacagaaatccgtattttcgggcagtccgtgttactcgtaatctctaacgccgccggcaacgagaacaacagcaaacagtggtcgtcgacggcgaaggaatcgactggaacagcaactggtgccataggcgtaaaaatagcgggatgggtttataaataaccaagctgaaactaacaaagtccgacagccaggagcggacttagttcaagcgggctcgcaggctagccaatttagcttcaacacttcgccaaatgctctcgggcagcgaagcacgcgtctccctgatcgatgtagtccgaggcggtggcatattcacagaagatgactgccatacgcggttcttgaaggcctcaaagccgatcgtccacagaacataaagggcgttcaccacggacagtgccacgaccgcctttagcaacatgccaaaaaacgaaaagcgacttggttgatgctcggagttcccacgtggttccggttcagtttcgctttctacaaatattgtaattgatacttcatcatcagatgcggcatgacatgggcatgctgtcgcatcttcaggtattgatattttcagatctgttggttccaccgccagtgcgttgtctgcatactcctgcgaaacttctggctgcgacacatctgtctgactaccgagcgttacaagaagctttccgctgtaaacactgcagtccagttcgacgtcatttgtctccagcaaatcgaagtagaaactggggggcggtgtctcgtcctccagctgggccacatccaaagacgctatccaatggaacacctgaaggggatctctcacggtgcgcgatgactgatggacagtctccctttccctctccactccgcattcgtataggtcgtccgattgggagatgtccattactagaaaatatatactttttttagttttttttttttagttttacggatagaaggaaatatattccgggcttccgtagtgtgtgaaatatgcttgcttgaatgaacatggagcttgaggcgcctgacacttggcaaccgggtatatatgtacataggttcctgttccagttcctgctgcggcgccaattcgctccttgcggcaagtcaagcctgcagcagcgctccatttcatccggcctggactccactatcttatcaactagaaatggggcgtggcatgaccaccctcggacgaactatgcggaattgattcccaccaccattcccgttcccggtccccctcccgcaatcacccctcccagcgagggcgttatcaatggcctggcataatcggctatcaatattgtcgcattacgacaaccataaacgcggagcgggaaagggtttgggagggcaggagccgacgggcgtgtatataggatcacgggttggtcgaccaactcacctgggatggcctacctgtgaccgaaggcccagtctagtcagcctggtcagcctggtcttgggtctggtgtgtatttttagcattagaaatcactatttgtacagcaaattatgcgatcagtgcgaagcgcggtcaagtctgacttcccatgctcgctgactgcgtgactcctcacgaggccgagctgtatgtaccgttccaccaagcccgtgtagagcatcagacattcgctgtggcccgcggggaactcgccgtctcatcgccgaccttgataatgcacttcttttggctgcagcttggatggcacgcgagcctaatcgatttgtaatttgagctgcagtaaggctgcatgggcaaagttcgattgcgattgcaggggaaatacaaaaatgatgggctgactggatgaatattgcagaatttgaataggtaaaaacaaaaaaaatgttttgaaaacataaaaagtaatagggtttgccatactgtgctgcaa

SEQ ID NO: 33563 - DNA, 693 bp, DROSOPHILA
atggacatctcccaatcggacgacctatacgaatgcggagtggagagggaaagggagactgtccatcagtcatcgcgcaccgtgagagatccccttcaggtgttccattggatagcgtctttggatgtggcccagctggaggacgagacaccgccccccagtttctacttcgatttgctggagacaaatgacgtcgaactggactgcagtgtttacagcggaaagcttcttgtaacgctcggtagtcagacagatgtgtcgcagccagaagtttcgcaggagtatgcagacaacgcactggcggtggaaccaacagatctgaaaatatcaatacctgaagatgcgacagcatgcccatgtcatgccgcatctgatgatgaagtatcaattacaatatttgtagaaagcgaaactgaaccggaaccacgtgggaactccgagcatcaaccaagtcgcttttcgttttttggcatgttgctaaaggcggtcgtggcactgtccgtggtgaacgccctttatgttctgtggacgatcggctttgaggccttcaagaaccgcgtatggcagtcatcttctgtgaatatgccaccgcctcggactacatcgatcagggagacgcgtgcttcgctgcccgagagcatttggcgaagtgttgaagctaaattggctagcctgcgagcccgcttgaactaa

SEQ ID NO: 33564 - protein, 230 aa, DROSOPHILA
MDISQSDDLYECGVERERETVHQSSRTVRDPLQVFHWIASLDVAQLEDETPPPSFYFDLLETNDVELDCSVYSGKLLVTLGSQTDVSQPEVSQEYADNALAVEPTDLKISIPEDATACPCHAASDDEVSITIFVESETEPEPRGNSEHQPSRFSFFGMLLKAVVALSVVNALYVLWTIGFEAFKNRVWQSSSVNMPPPRTTSIRETRASLPESIWRSVEAKLASLRARLN

SEQ ID NO: 33565 - DNA, 2291 bp, DROSOPHILA
actttgcattggaaatgatctggcagagatctcagctgtctggcagcttaattaaaatgccaaaacgctgccaaacgtgcaattgtttgtaatttgtgtataatgctggcgcgcatatgcgattcccacggggccagtggcatcccagcatttggccagcttctgaacgagcttaggtaatagtgcgccttttgggcgctgctggccatccgatctggcagtgaaagtgttacacgatatgcataccgtgtacgagaggggcacttggtgattgtggaacgcgtcgagtgtctcgtgttgcacgttgcttgtggatcgcgttgctgccccacttcggttacccaacgagcctgggatcttagaatttcgactacgctggcaattataaccgatatcgttagtttccacgcccactccacctcactccccccactgcaatcctccgccaagttctcctccgccggatgagcggatggatgaccttttggctccgcagcataaacaatattcggtttcaagtcctcaacccgtcatgcattcaattcagctgcaacaatcgctgctgctgctgctgctgccgccgttattgtcagtttgcataattgcaactgtagcagcaactggcaacaataagccaagccgggtgactataaaagcgtcgggccactggcagccatcaacaaacctcgcctggcgccctacccatcaagtcaaccagccaacagccactagcaacatctgcagcagcaacatgaagttcttggtaagcagcaacaccaggacattaggataccaggataccaggacaccggtcaagcaaacgagtggacttttttttgagtgacagtttatccaacaaaatacaagttatttaaaattgctggaagtgctctggctacaatttgaaacaaatcatttgttaacatcgtttcaaatgtttcatataccgaacctttttttctctgtgcagtgcgtgttcgtcatcctggccatttgcttcatgagcacctgggcagcagtttcggagcctgctcctgaagctctggagccggagccatccgccgtggatgagaagaagacggagaagagaggcatctacgggttcggccacggctatggcggctacggcggatacggcggatacggtgcctatggacacggtcactacggcggctacggtggactgagcagtccctactacggcggctacggatacgtccatgcggcgccctactacggcggacaccacggctactatccgtaccaccatggccactacggcttctactaggaccactacctatccccaagatcgtaatgcatactgttttttttttctcgatcgctccatgctcatcactgcaccatcattcgtatatgtatatgtactggttttcccccatcattcaccgcaatataaatgtactgcaaatagcgaatacattactcgcatgtctttgaatttgggttggatgtagtacaaatatgatatatgtacatatgtaaacaaagttaaatcctactcaacaataaagaatcgattacattgcatatgtatgacagtaaaagtgattttcggtcactctatgggggccagtgaaggtataaagccgctattggcccagtgactgttatacaaaagtcactgttctaattgcgatcggcgcgtgaccaccagtctttcggatcatcagcaaaaatcaggaattcgacttcgagatgctgaagcgcgatctgcagaaaatcacactcaagctgtccgatctcaaggactatgaggttgcccgccaaaagaacaagttaaagggcgccccgcgacctaggctttctcaggacgccctccccggagacgacgcctccacttcgggaacaacggcaagttgcagttccaacacggaaacggccacggaaaccgcatcgggatccggatcagggtctggatcgggctcgggttctgggtccgggtcgtacattacgggaatgggctaccgttcggagacaccctcctccgcatcgtacaccacgtcgacgaccccgactccggccactcaggaggagatactgagaccctcgtccgccgtcacggccaccacaaccactggcaccactaattccggctccacggatgacgtgagcgtggcggccgtagtggatgacacggataccattgacgaaatcagcgatgacaactgggtggacctgaatgcggacaccaacgataccgttgatacccagccggaggagcaggaccaactgcaagaggtggaggaggaggatggggctaggggagg

SEQ ID NO: 33566 - DNA, 291 bp, DROSOPHILA
atgagcacctgggcagcagtttcggagcctgctcctgaagctctggagccggagccatccgccgtggatgagaagaagacggagaagagaggcatctacgggttcggccacggctatggcggctacggcggatacggcggatacggtgcctatggacacggtcactacggcggctacggtggactgagcagtccctactacggcggctacggatacgtccatgcggcgccctactacggcggacaccacggctactatccgtaccaccatggccactacggcttctactag

SEQ ID NO: 33567 - protein, 96 aa, DROSOPHILA
MSTWAAVSEPAPEALEPEPSAVDEKKTEKRGIYGFGHGYGGYGGYGGYGAYGHGHYGGYGGLSSPYYGGYGYVHAAPYYGGHHGYYPYHHGHYGFY

SEQ ID NO: 33568 - DNA, 2213 bp, DROSOPHILA
cgtgggctttgtgcttaaggatcagctgttccagatagtaaaaggttttcttgttctcggcccgctgacgaacctgcacgaggcagcgccagaagtccttggcctcggtccgatggcagtcgttgcacatctggttctgcacagtgaactccaccacgaatacctgctggagcatcgttcccccgatgatctccccatgcacagtcagcttcacctttatgcgcttggagtgctgttctgtccagatgaagccggcatccaccaacttcacttccttcaggccttttagcttcttaaggcaaatggccaagagttcgcgggactccaaggcggcctgtatccactcgttcggcggttgcagatagcgctcgcaattacgacagaagtggagcacggcctgctttgggatgttctccgtgatgtcgacatggttgcgcaggcaggtgacgcacatgttggccggattcggctggatggccactccgcactcgcagcacaggatgacggcgttcgatccggcgcccttgccgtccgctgcgcccagcgggctaaccccaacgtattcgtgatccatgaatcctccggaggtctattcggtccagctatttcacaatggcgttgtagaatacgatgaaatattcccacgaagtacacaaatttgtaaacacgtgcgtataggtgtatatcgattggccagagatcagcgatattattaatcggcgatttaagttaagccttttccagctagagtagctaaaagtgagattaacgataaaacgacgttaaacgagtgagactcaaagctaaatgggacatttggaacgatttcctaaaattcacttaaaaatatagtactcattcgactgtcttcatctttattttggctagtaaatgtacgcccaattatcgatacattcgccgccgtcatcactgacagaccagctgaggcgacggactcgactgccggaaacttttatggacttggaagggatttgccgccatgcagaagaagccgattaacaccaacacgctgctggacaagctgcaccgcggcgcggtgtatgcctgcattggagtcaccctgtacggcacctacatcctgggaatgcgctactaccactactgcacggtcatccgaccggagaagcagcaggcggagctgaagctcctggacgagggagcccacgacaaggccaaggaactgaagtactaggcgcgccctcctccgcccctttaattgttaaatgtctgttaagcgcaataaactgtaaggaaatgtaagcattttcagctgaaaacggccaacgccggttgttgttgtgtaacctcggacagctggccaaagtggaggaccgtcggcaggcccggtgggattgtaagattccagattcaagatctaaccctggaaccaagccaacaatgcgcaattagccgtctgggccgtaaatcaaactggtcggctacaatgggaaatcaatcaatcgacagcgacatggacatcgacccgttcggcggactagacttagtcaagaattataatttagctggcaatcaaatatgttgtcatctccggatcgtgaccaggtcccagtccatagaccaaaccccttggctgcttggtcttccgcttgcccaacgcgtctcgcgtgcattcacctccaatgggcagagcataaatattaaacgatgtggatacgaaaacaaccgcggggagaaggagacaatggcggtgccacccacttttggccagagatggcgagacgtcgtcgattgggaaaatcttttgcatgcttcattcaacaatgttgcctccggcgttgcttcattcatgacttgggaactcggagcagcaaaagcaacagccgcagcagactgcaattgcgatttgcaattgccactgcggtcaaggtcgtcctttattgtgtgggcacggcactgggtactgggtagcaagtacccccggcagacggaagtgatcgagaataatggaacgcgcagaacagagtcgtctgcccaaatggctatcaaattgttttaaaactttagtatattaagcaaaagctgtgctcctctgaatagaagatctcttcaacctagtttcaagcccattaaaactaatgaccattgacctggtcaccgatccttgtcccaatataccccttaagccagaggtctccgtcaaagtcgtgcactttggatattctgtcgataag

SEQ ID NO: 33569 - DNA, 213 bp, DROSOPHILA
atgcagaagaagccgattaacaccaacacgctgctggacaagctgcaccgcggcgcggtgtatgcctgcattggagtcaccctgtacggcacctacatcctgggaatgcgctactaccactactgcacggtcatccgaccggagaagcagcaggcggagctgaagctcctggacgagggagcccacgacaaggccaaggaactgaagtactag

SEQ ID NO: 33570 - protein, 70 aa, DROSOPHILA
MQKKPINTNTLLDKLHRGAVYACIGVTLYGTYILGMRYYHYCTVIRPEKQQAELKLLDEGAHDKAKELKY

SEQ ID NO: 33571 - DNA, 2399 bp, DROSOPHILA
tcttgcgtttccttcgcgagttgggcttgtagaatctgtgggtgtgtcaacgataaggttggggaccaccatgaggagcattaaccattttacctggctggactgaaggtggtctcgttaagcgagtcggactccagggcacccatgcgtataggcaaggtcagtggcagacgcagaggcagcatcgcctccgccttttcgtcagagtcgctggctggcaacttaaggttgtgtgtgtccagtccgtccacgttggcacttgtgtggtggtgatggtggtggtggccatgatgcccgtgatggtgcccctggtttagcgcatccgtgggactgctcgaggagtcctccgtgggctgaggggcgcaggctaagcagaggggggttaccgcgagcaggagtcggcgtgcgatggctacttacgcagattgcccgtggaacgtgtcctgcggcgggagccccacctaccgacgccgccactagccctgtccatcagcgtcaggtccagagccaacgtcagatcgtgcgagaattgatccatggccgcccgctatccgctgtcctcctgtccgctcgcattgactcaggctcggcgcatttatttgcgttctgcacgtgcacaaacaagaaacaaaaatgcaccagaaatcacttcggtatgcgatttgcgatagtgtcttcgaaaaccatcggttgttcaaacagttcgataggtaacttcgaaagttatcgcaacagtagatatggcgatatgttgtttcgaaaataatcgctaaagctttacgatattatgcacaaaaaaaaactagtcgcagaatggttaaacacgtaataaaaaagttttatgactacattctacatttcagtgtcggtattctatagtgatttacaatggtttaaagtaactttttcccgactcgattagccgattactgtcgataactcggcggtgctcgataaccagtgtttaaaatactaaagggccaggacaaggcggaacatgtcagaagcccgccacgaagagattgagggcatccattttatccattttgctctctgcctcgaagacgggacgggccccgcaggacacaagcgccaggcagtccacacagttccataggaaacaaagtctgtgccagacgtgcatcaggatcgggggcagctggtgttccagtgcttcttgcagtttctgtatctcgtggcagaggagccggagacgctggatgcgtcgcagctttacgtccaggatgcgactgtggaagaacagactagatagcccaactagacgactgcggtcagtacaataccttcgaagttcagtgcaggcgttctccacgtcgttaatcctcatcctggttacgaacagttcctgactgatgtcgaaagctcgggagcacagcatggcagttcgtgactcgaagaggtcagatttatccagcgcctgaggaggaactgcttttactacaaacagtggtcggacgaatctttacaaaccagattcctgagctggcggttccgctcctcaagaaattgggtgcgcttctggacatccgccagctgctgggacatcccagtcggtacagtattctgatgatgtaggtcgacaccatgcagcgaggataaatcactcagcggaagctattcgccgacaaagtggtaagttagtacaccccacatgaccattttcaaaagccataccgtgtgctgggtcctacccagctttgtggtaaacaattggaggcctgcgttaagcagggatcgctgggaactccgactaggtgaggccatcgattctagagttacgttcctaatttggaatttcggtttgaacgcgaacaattagttagactgtgtaaaaataagcaagtgtggaaagtacggaaatactcacggataaaaccgtttgtaagttaacgggtgaagcgaggagctaacgaccttgtttgaaattcatcaataggaaaaaagccaaaactattgttttaaatacgaaacgttaaaattctttatttagcaaaagtaaaccaatacgccattgtgtggcaagggaatgaaacgcttacatctttgatctcttgggccaaaagtggcaaccgcggcgggaactcaaggaagtccccacaactacaattataaatatacacagatatagttacacgtttatagagttttgcatacgagtacccataataaatactcaacgattgcatgaaaatataacaacaaatctcagcggtaatacacattaagttgattatttagcgaacttggggcaacggctggccaagcttctttgtccagtcctcacgggtggccgggtcttcgatctggccacgaccgaggcacttgccctgcgagattagctcggcaaactgggccacaatcggatcccggccgcacga

SEQ ID NO: 33572 - DNA, 399 bp, DROSOPHILA
atgctgtgctcccgagctttcgacatcagtcaggaactgttcgtaaccaggatgaggattaacgacgtggagaacgcctgcactgaacttcgaaggtattgtactgaccgcagtcgtctagttgggctatctagtctgttcttccacagtcgcatcctggacgtaaagctgcgacgcatccagcgtctccggctcctctgccacgagatacagaaactgcaagaagcactggaacaccagctgcccccgatcctgatgcacgtctggcacagactttgtttcctatggaactgtgtggactgcctggcgcttgtgtcctgcggggcccgtcccgtcttcgaggcagagagcaaaatggataaaatggatgccctcaatctcttcgtggcgggcttctga

SEQ ID NO: 33573 - protein, 132 aa, DROSOPHILA
MLCSRAFDISQELFVTRMRINDVENACTELRRYCTDRSRLVGLSSLFFHSRILDVKLRRIQRLRLLCHEIQKLQEALEHQLPPILMHVWHRLCFLWNCVDCLALVSCGARPVFEAESKMDKMDALNLFVAGF

SEQ ID NO: 33574 - DNA, 2649 bp, DROSOPHILA
taaatccagtgtaacattagcctaagttgcaacagtggaaggatgatatatgtacaggaatcgtaccgtcgtcagagtccttcgatgcccaagatgaacgaacgagacagagaatgagatgcagatggtcaaaagggcggagaaatggccaagaaattgatgggaatgtgccaagaatgcggaaacggaagtgactccaggccgaagcaaaattaatgcaaattttttgattaacatctaatagctgtcaaccttccttatattctccccttcagttgtagtgtttatctagcccacatacttatagttttcagtgtttagttccgatttgtattatctctctcctatgttttcctaattaattagttgcggtgcggggcaatggcctggagatatggagcatttttgtagaaatgcacaacggcaggccttagaattgcccccactgaagagtttattttatatatatttagccaaattattcaaatttataatcctagcatagatactaaatgtcttagatcataactgcgtacatatatattaagtgtttagaattgtgtaaacgaacaaatgtaactctatatataaatctatataaacatagctcaaatcaaggctgttaatgcagaaaataacaaaaatggcgcggaatttattccacccactagttatgcactggatacaaaaaatcgagtgcaatctcaaaaaacatttcttagaactcgaaacaaacatatataactagtatatagcggcagttccttagttgccacacacacttacataactagaactctaagtacacattacgattacgtatagtaaagcagtcgctcatatttacactctataacaattagtcctgatataatctcgatactcttttgtttgaactcattagctatgatataatcgtgtgagtgtcagtaattatctgttttatgcctttctttctgtgctctctcttgttttccatgcgactcccttagataacatcatgtggggactggggacattgcccgaaggtgagatatgcccatgattcttaattaatatgatatggaatcctaatgcattctttttctatactttttcgattaggttttccggcagctgcctatgctgcttatgccgctggtcgcggatactcgggctatcccagttttggactgccctatccaactggtaagtgcggctcattgccaaatagacacaaccacaatcacatccacaatttaagttgtgtgtatacacactcacctaagcctgcacacacagactcgtactcagaccctgttgttcatttgtatgtgagtgagagtgtgaagcaatccccagtgaacaaaactaaacatataacccattgaaaccccaccgttccaaacagtcagtgccgcttgatatgacgaaggacctcgcgttataccgataaccatcataagcattactaactcagatagtatttgtgacgacttgttggtactcagtgtaatcatcaccagatacagtcaaacatccatgtttctttccgtttcgcttgccacactctttattatttctcttctgtctttatgtttgcttttgcagcgagtgttatgggcgtagtgccggagaaccgaatactaattggcgactacatggcgtaggacgatcccaggccatatgataataatctatcgagtattactcagatatcataatcattaatgaaataaatcacagttctcttaaaaccaaaaatagcaacgcgttcgtcatatcaatgcacaaatagctgaagatcggaagcaatcgaaaaactcacaacatatgccactacacgatacatctagaaccccctagaattgtgtcctgcgcatcctgcggatatatgttattaacgctgcttggccttgagtctaacatttgcccccaccaccgaacactgtgacccaacactagctactagggcttttacatagctgatgtgaatcgataccctgtcaccataaaactccccgtctaagctggaactgtaaaaatatcgatacggttatcgaaaaaatccaaagttacaaatagtttacttgataactgtaattggttttatttattagtacatgttccctttcatacatgtgttcaaagcatttcggatcataactaaaataaatcatgtaaaatctttggaccacatattctatatcacgttttcttgtcgtcttccaatcaatttcatttgaatgaaaaatgttcaaatcgttacttttataaaagccattatattatccctttagttaaggactttttaagagtcgtttaactagtgagtccgtatcgatagttttacagatctggtccctagtgcagactgtacctttttgtttgccccccttttctctctctatctctctctcttcatctatcttgtatctcgtatgattttgtaggcttgacaatttgcggaatcggtagaagttatggtaccgcttgtagcgctaccccgggccgcagcagaggtgcgaccgctggcgccgcctctggtgttgcggcgacaggtgtcgccccctccggtggcgccccaagccacgcccagtcggcgtaccaccaacaggcgttgaccctgccgctggccacggcactcacagctcgatccgcggccatcaa

SEQ ID NO: 33575 - DNA, 172 bp, DROSOPHILA
atgtggggactggggacattgcccgaagggttttccggcagctgcctatgctgcttatgccgctggtcgcggatactcgggctatcccagttttggactgccctatccaactgcgagtgttatgggcgtagtgccggagaaccgaatactaattggcgactacatggcgtag

SEQ ID NO: 33576 - protein, 57 aa, DROSOPHILA
MWGLGTLPEGFSGSCLCCLCRWSRILGLSQFWTALSNCECYGRSAGEPNTNWRLHGV

SEQ ID NO: 33577 - DNA, 2315 bp, DROSOPHILA
tgtttgcttcctcggcacaccgatataacagagctatagccacatgtattacaatcgcatactcgaatactctctcactccatacccccactttaatatagacatatatatatatatatactcgattcctgctcctattcctaccagtaccacagcccatttatccttagagctcagccttgattactttcgtatactcttgtgtcgcgggcacctcctatatgtgcccggcttttactcgactagttacttacgatccgccttagccagcccgcccccactaatgacacgcctctcgccctcttttgccacttacagttgatctaaccaatgggcagctgacacccaacaacaatacaccgctgctgacccaggcgctgtcaggtgagtgaccccattttccattccaggtgctagattccattcgctcggaaaaacagaggttacggtgtcgctgtggcagggcagttcattttaatagttaatcaccgaaacatgaaccagaagcaataagtctttatcaaaagtcagcatctgtgactatttgctagtggcaaatactatgagctagataaacaaatgtccgttcatgtggcgaaagttaatagcattcttattaggcaaacatttttgatctattcattttaatgggcttacccaactgttgctgagattaagtttactacaaagtagtgactatttattttaaagccttaagacaatcgtaaaatatatcgtttcaattatgagctctagaaagggtgacaacactgcgtatgtggattatacgagaacacattactcatccgtactgttgcctaatatatttgttagtgttatgtaactaatacgtttttattttacaacatgttttaataacactttgttaaatgtatagcttttcctacacgagtaactttgtttttccagagtaattcagccggacttttgaaactttcatatctaacgaatgtcccttctgtgccctcttattgcagtgatgaacaactatcaggcggctgctgccgctgcccacagctatgggccgtcggcatcgccgcatgccgccgccgccaacacggccacccggcagggattcccctccaccaactcacctggccccaccatcgacatgtacagctcggcggccgccgacaatgtgggctatgtgcaggccaccagtccgcagccgtccggcttccccatcgccgtcagccgcgccccgttgaactacagcccggtgagttgtccttttggtcctgcggcaagcagaaccaagttccggaatccccacgatccctggacttgggcctagagctagagagtaagccagcgatacgaaacacccacatgagacgcaagtgtcgcgtttggagattcgatcccgaatccttcacacacacactcacacacacacacacacactgactcacaccgaacccatattatagagataaggagagactgccgatgtagagctaaactattgcgttatccttctatatatcgtatgtatttctctttcatttcgtacagatttattcgttgaactttgcgatggctaatatataaaagactgataacccaaaaatataaatgcaagagaacaaaacaaaacaaaagatatgcaaaaagtaaaagaaacccattatatatttaaatcgaaaaaatatatgaaaaatacaaataaaataaagctaaacgaaagcaaacaaaagaaataagagtataaaacaaacgcagttgcacaaggtaggcacaccaacaaaactacagcgtgttctcttcttttttcaactaaacgatttcaattattaacaatccaattcttttaactacaactagtcaaacaaaaatttacaaaaaaaaaatcttaaataaataaacgtaaaaatatgtatgcacgtcacaagcacagttttctaggccgtttcaattaaactattattatttatttaaattgtatacaccgtatatgtattatatatgaacatttttgtacttcaatatttcaatattcccatgcctcgctgcaaactaaaataaatcatatcgaaatttatttattatccatggctgtcggcgaggtttgataaaggacttgacaatcacggcgagtgtctggaaaaatgcaattttatttttataaatttccacctacaatcaaattaagtgctcttctattttagcgaaaacagcattagaaaaaagagcaagtgaattggtatttaatgaatttcatgcaaaataagcctctaaatgtgtttccattctttgcaaaaagaaaaatcatgaatttttatattaaaatactt

SEQ ID NO: 33578 - DNA, 315 bp, DROSOPHILA
atgaacaactatcaggcggctgctgccgctgcccacagctatgggccgtcggcatcgccgcatgccgccgccgccaacacggccacccggcagggattcccctccaccaactcacctggccccaccatcgacatgtacagctcggcggccgccgacaatgtgggctatgtgcaggccaccagtccgcagccgtccggcttccccatcgccgtcagccgcgccccgttgaactacagcccggtgagttgtccttttggtcctgcggcaagcagaaccaagttccggaatccccacgatccctggacttgggcctag

SEQ ID NO: 33579 - protein, 104 aa, DROSOPHILA
MNNYQAAAAAAHSYGPSASPHAAAANTATRQGFPSTNSPGPTIDMYSSAAADNVGYVQATSPQPSGFPIAVSRAPLNYSPVSCPFGPAASRTKFRNPHDPWTWA

SEQ ID NO: 33580 - DNA, 2546 bp, DROSOPHILA
cgccgctgcccgaattttattgttttttagaaatgactgtaaagtgcgatgggaaaaagcaaaaataaaacgcgatcggagcgtatcccgccgcattcgctgccccggagactgaacacgagccgtatagtggttttccacggccaccgatcgctcgttggatggagcacatcccatccagtggagcggcatggggagccgtcgacggggcagccacgatatctgcatatgtgcgccagccagctataatgcgatgcgttgcgctgagatccccgcatccccaagtctgcgaatatatatctatatattatatagatatgtgtttagattcaacgaacagatggagaaatccccactggcactggagcaatgccccccattccgtttgtcgccggagagcgaaacgtgggcagcggcagtgaggaatgttctgcccacatccatgaattggtcgacaagttgccagtttctctgtccgattccccgaatccattgttcaattgtcaaaatacaagtgaatgggtggaaaacaatgtatgtccatgcatttattttcaatacatcaaactcgaacaaaagactttctaaaaagtaaaaggttgatttttcgattgaaaatatacaccaaataagaaattctaagttctcacgctatataaacatattgaacatacaaggtcattatctattcaagcgttccaaataaattacaagacttttggatttggaaaaaaatttgaattttttagagagaatatcggatatgcaaataaggataaagatatataaatagtcttttccagctaacgtttatttaaatacagctgaatcctttattgaggaatatttttttcatccgtatacaataagacaacatttatttatcacataaaaaaccgaacagctatttccggaattttgaaaaccgatacgttatcggtagttgaagcgaatttggtctggcaactatctgcgacgttgccatattgatgacacagcgatggttcgcataaagaataggtaaatattgaccgcgttttccttaacgatcattaattaaaccatccataaacaggtatatagcggtgcagattgtgccctacacgccaacacaatctctgcgactcaacgaccacagcctgaccaagatcctgcttcagaatgtggagaagtattacggagtctatggcctcgccgtgatcgagcagggatttcgagtgaaatacatcaacgatcgcacgaaaatggcaatcatacgctgtctccatcgaggccaacgcttcgtgtccagcgtattgccattgattactttggttggtctcattgccatgtccttaaaccagctataaaaccacatttctttcagatcggagatgtacgggccaagtttaggacgctgtacattggtgccaccatcatccaatgcaacaagttcatagtcaagcaccaaaaacagttcctggaccgcaccatgggtcagataacctccgccaaggagcgccaggatctcttcaagcgcgtaatggagttcgacatggacagatagcacatagtttgtttagaatgtaattaagtaattatatttaatggttttcttatagaaaacccatgcttccaattcaactaaaatgtgagtgtttttggtatcgttctaaacttcgatgaggaatttgcgactcggtgagcgggcaaccttggctccaaattgctttattctctgccggacgtcggccaacgtcagcttgttcctcttgctgtagacattgagatatatgcccaggacaacgatgaggcccgaccacagatatctgaaagtttgggataggtataatagagctttgtctttagaaatacacagaatagtacttactgtaaggtaaagggcttgctgaaaagcacaaaggagaaggctatagtcacagccttgcgggcggtggtcactgtggcagctatgggggcaccactactcctcaccagagccagcacaaactgaatgcccagatagccggacaaactaaagaggaagccatagccgaaggtctcaacgggatgctaaatggataatacactttagatctcttacatcataaacctcaaatgttacccacctccaaacagaatgcaaagccgctgaagaagttgccggtaaccagcataatcacaaataggtacacaaaacccaagccgtatgagtagaacaccacctcactgctgggcgccttgaattcccgcatcgccttctcctggacattgccaatggctgcgtcgcagagcagcgctcccgaaatcatggccacaccaagcagattgaaattgggcgtcatctgggagtcggccagcgtgaaccaggccaatccgatgcacatgcaggtggctgccgcaaagtccagcagtccgtagcgtttgccctgtatgaggatgctgcccaccagcacgggaatgagcttgcagcacttgaaaatcacctgggtgggatagttcaggtagccgagacttgagttggacagacccatggtacccagcgtgagagcagccagaattaggta

SEQ ID NO: 33581 - DNA, 438 bp, DROSOPHILA
atggttcgcataaagaataggtatatagcggtgcagattgtgccctacacgccaacacaatctctgcgactcaacgaccacagcctgaccaagatcctgcttcagaatgtggagaagtattacggagtctatggcctcgccgtgatcgagcagggatttcgagtgaaatacatcaacgatcgcacgaaaatggcaatcatacgctgtctccatcgaggccaacgcttcgtgtccagcgtattgccattgattactttgatcggagatgtacgggccaagtttaggacgctgtacattggtgccaccatcatccaatgcaacaagttcatagtcaagcaccaaaaacagttcctggaccgcaccatgggtcagataacctccgccaaggagcgccaggatctcttcaagcgcgtaatggagttcgacatggacagatag

SEQ ID NO: 33582 - protein, 145 aa, DROSOPHILA
MVRIKNRYIAVQIVPYTPTQSLRLNDHSLTKILLQNVEKYYGVYGLAVIEQGFRVKYINDRTKMAIIRCLHRGQRFVSSVLPLITLIGDVRAKFRTLYIGATIIQCNKFIVKHQKQFLDRTMGQITSAKERQDLFKRVMEFDMDR

SEQ ID NO: 33583 - DNA, 2266 bp, DROSOPHILA
attggaagatggccagcaaccacagaaattggtcgacggagaatctggagaacctgttgtgatcggagagccacaaatacccacagcgccttactacgacctgccagcgggcctcatggtgccgctcattcgtctggaggattacaactacaaagccctcgatccggcggacattcgactgccagctccagcgccacaaagcgagcgattaacaaatgcattgaacgccttctattccgcaccctcacacgatcgtccaagggataagtaagtatttcaatttgatgttattgagcgttccttataaatgggcttatcttgcagtgagggttgggagaagcttggtctctatgagtactataaggtgaagaatgcggcgcgaaagcaaaaagaagaggaaatcaaggacggcattcgagaaaagtcgcggtcgccaagtccgattgtgctcgagaaacccctacccaaaaagagcaacaagcgagtttatcggtgagtgttggttttccatcaaaaattttcacacaaaaactagaaatatttgcacttattttcttgcgcagatccaagagtcgcagtcgctcccgctcaaaaacgccgccccatcgagatagatcgttgtctcgctcccgatcccgctcgcgatccatggagcgctctttaacgccgccaccgatgaatcggagcaggttgggcggtggtaacaaccgcaagggtcgcaatcgatctcctcgccacgaacgggacaacaacagcggcagcacaaataccagagagggccgtggtgatcgtggcaattccaatagccgagacaatggcaacagcaccaacctaagacgagtggaccgcgacagatctctaacacctccgagctttctgtaaatcatggctatagtacaatttcatgacagtcggaccaatgagctatctttgtttttccaggggaagcacatttgccaagccagcggatttcatcgaggaatcgaacaagggccaccaaatgctcatgaaaatgggttgggcgggcacgggaactggactgggctcaaagaatcaaggcatcgacacgcccatttcgggaggcgaggtgcgcgatcgtcgagagatgtacaaggtgaagtggcaagagtgcgcaagaaaggacaacttataattttctatccacagggagtgggcgctaatatgcacgatcccttcgagagctttcggaagaacaaaggagctgccttcgcgcaccggatgcgatcgcgagacgacaagagttaggatctgccaacggtcataacttcccagttttttgtttcctttagcccagaaaatatacatttttataaaagcgaactgaatttttatacaagattaggctataacattaaagctggattgagcggccttggcatttactttttccaggacctggaccaggcccttgccaggaccgcattcgaaggtgcgtggaaagtcgacgccctgcttgcgctcgtacatctcgtggagagtctgctcccacttgacgggcctcacgatttgcttgggcagctgcgttaggatgtgcttggcatggcgatagggtttgccatccacattggagtacactctaatgacggggtcctgaagtcgcaccgttttcagggctttggtaaatggctccacggcgctttgcattagaggagtgtgaaaggcgccactgacagccaatctcttcatccgccggattttgaaggacttggcattttgttccaggaactccagggcctctacgttgccggccactaccttgcagtgcggatacatgtagttggcgatgccacagtagggcgactccactcctttgtccagacaccattgctgcgcacgagcgcaggcctctcccagattggtatccggtccgtagagagtcatcgccatggctccggctgcctggtcacatgccgcctgcatggcggtggcccgcacctgcaccaatcgcaatgccttgtcgaaaggcagggcatccgcgtacaccaatgcggtaatctcgcccaaactaaagcctgcggcagctacacacgtttcaatggccttgggtcgctcctcacgcaactgctccagtgctgccagcgaggataccatcacagccagctgagcgtgctccgtgcgattcagtttctcacgtggtccctccaggcagatcttgagcagatcgtatttcagcacctcgttggccagctcgaagatgcgacgggcgcccgggaaccggagcaggtctttggccatgcccacgtac

SEQ ID NO: 33584 - DNA, 213 bp, DROSOPHILA
atgctcatgaaaatgggttgggcgggcacgggaactggactgggctcaaagaatcaaggcatcgacacgcccatttcgggaggcgaggtgcgcgatcgtcgagagatgtacaagggagtgggcgctaatatgcacgatcccttcgagagctttcggaagaacaaaggagctgccttcgcgcaccggatgcgatcgcgagacgacaagagttag

SEQ ID NO: 33585 - protein, 70 aa, DROSOPHILA
MLMKMGWAGTGTGLGSKNQGIDTPISGGEVRDRREMYKGVGANMHDPFESFRKNKGAAFAHRMRSRDDKS

SEQ ID NO: 33586 - DNA, 3161 bp, DROSOPHILA
attgaaaagtgaagagcggctgtctgagcggcaaactgagccgatccgaagcgccgatcctcgatttttgaggcgcgtataaaagcttggctacgtcggcaacgaaagctcattgtgcgctcgccgctcgtgattatcaggtaacgtcgatcggacggacgggttaaccattcagcaagttagctctgcagcaagtttgcccgccaaaagaaaacacgtatacgtagtgttgcagccagaaaggtgatcgacgtgcctactgatctattgatctattgagaattgtgatcctagaacgccactaaaatgagttcaaaggtgagttcgagttgaagttaaactcttatttttgttttttaactattacactagcataactaattcgtgtagctctttagcattatagttggttagttgctcagcaccaaagcattaaacatcaaacattcagttctcagaatgatttcatacaccaaattatgcattccttgaaatcattgtactgaacttaaacatttccagtacaaggtggacttttccaaattgagtccagaaattttccaaacaaataactgtcttctaagaacactccactttaattacttaaattagcttcgcgccacaaaaaaagtgggtgtgtgcaattaacaggctgtcagctaaaaatatcaatatccaatataaacaaatgcgcttttgttctccgcgggcaagagcataatgcccgcatcgattccgaatcggattcatatggcggactggagtgctaaacagactggagtgtcaccgcaaggtgcgatatacgaaatgcgaaatgcaaaatgcggaaatgcctacctgcggggcgcattacataatttccacttcagctccagatcgccgtaatgtcggggaagtttcggtcattaaaagcggcaattaaaattcaccatttggccgcgtcgacttgcaaatgcgctccagtttatgtttcgatcttgatgcgatattgacccagttaatgggcggcatactccggtgcgtgggagtcggcgacgtcatccagacatcccggcatcccgacacccggctgtcgtcatccgaagtggttaatccagatgtgtccagagcggcgatccagattcacattgaaatgccaaagcagggcagagtgcagccggttagaggatcgttgtaacacttatgcgataaattctgaacgtcagcgatttataattaggagccggaggccggttgggtgtttaatttggaatatactcatactcacttgttgtttcgcccgctcctccattgcagttgcatatgtgccgctggatgctgctggtcatcggagtctgttgcctgatgggcagctcgtcgggcagcttctgctccctggagcggatgaagaagttcgcgatggaggcgtgcgagcacctctttcaggcggacgagggtgcccgccgcgacagaaggtccatcgagttcgcgcaccaccatctgaatcgacttggatgtaagtatctagatctagatcttagattttagagcatagtgtggcactaggaaaaaaaatgtttaaaaatatttcggataaatttaaagatcaaattattataatgcttcgttatgactttaccatttttaaattttgtttccaactataatacttacgttttaaaatctcaattaaacaatatccactgaacatcgataaggaaaagattaaaatattggattagcgagctaataaggtcagagtgtcagtcaacccgacaattgcattcggaactgcatatcgaaaacacgtttttttttaagtgtgtagattgcaattaatacggcatttgcataaagcagttccgatgcaaaagttaaccgacttcaaggcgcaggttcaagatcaatttgctcactggcaacgttttcccccttttcagccggcaaaacgcacaacaagcatcactacatcagccgaagcagctatccaatgggtggctacctgaaggtgacccgggagcacttcaatcgcctcagcgaactggacatctttccgcgctacaagcccatcaagccgcaccacgaaaagaagcatcgcttcaagagggatcactcgagcaggtcctacaacaacattccctactgctgtctaaaccagtgcgaggaggagttcttctgctaagagagctccagtgtcatgctccatgccccacgctccaagtcggtgccatctggtcagaatcttctgaatccgtccatagttatagttaggctattcatgtacattctacaagtcgcgctcactcttatagagtaccttatttgtgcccactcccagggacacagatccatttacagtatttatacacttagatcgattttgaataaacaatcgaatacggcaactgatcggaattaaagtgttttttataaaaattggtggacagttaaaactaaacaaacattcagagaatttaacagcatattaggtttagaagacgcatataaaggcttaaaagattattacaatcctagtacaaatgagtcacgatggctaacaaatctttgttgtatcacaatctattaatcactaaatcacttaataaaccgacagctcgaaccatggaatcagcttatatggaactaatatagtaggcgcctttgcaaacgttgcatttgtacttgcggcagttttgttcgccaactggctccagtgatcgaaagtacttggataccaccatcaaaatatcctcacgttgtctctgaaggaaatcttcgccgaagtcatcaaaggttttaacgcaatgcattagaatgcgatagaggaccgcttcagttgatacgaacgtattcagcgagcgatcaatgtaatccacgttctcctctacgaatgtgcgggtcatctgcattagaagctgtacagcctgatcgctgaagtatctggccatggcctccaaaacgtccgtaaagctagccagattgccgatatgctcaacgaattttccgccgaacttctgtgcgagcatgtccatattgatcaccatctgcccgccaatgccgtaactcagtatttggggcaataaagtggtggccactgtaagtccctgacttaggtgtgagttcatattgtgaagactgaggagtacctccttaaaagggatttcgttgagggttctcacaat

SEQ ID NO: 33587 - DNA, 600 bp, DROSOPHILA
atgggcggcatactccggtgcgtgggagtcggcgacgtcatccagacatcccggcatcccgacacccggctgtcgtcatccgaagtggttaatccagatgtgtccagagcggcgatccagattcacattgaaatgccaaagcagggcagagtgcagccgttgcatatgtgccgctggatgctgctggtcatcggagtctgttgcctgatgggcagctcgtcgggcagcttctgctccctggagcggatgaagaagttcgcgatggaggcgtgcgagcacctctttcaggcggacgagggtgcccgccgcgacagaaggtccatcgagttcgcgcaccaccatctgaatcgacttggatccggcaaaacgcacaacaagcatcactacatcagccgaagcagctatccaatgggtggctacctgaaggtgacccgggagcacttcaatcgcctcagcgaactggacatctttccgcgctacaagcccatcaagccgcaccacgaaaagaagcatcgcttcaagagggatcactcgagcaggtcctacaacaacattccctactgctgtctaaaccagtgcgaggaggagttcttctgctaa

SEQ ID NO: 33588 - protein, 199 aa, DROSOPHILA
MGGILRCVGVGDVIQTSRHPDTRLSSSEVVNPDVSRAAIQIHIEMPKQGRVQPLHMCRWMLLVIGVCCLMGSSSGSFCSLERMKKFAMEACEHLFQADEGARRDRRSIEFAHHHLNRLGSGKTHNKHHYISRSSYPMGGYLKVTREHFNRLSELDIFPRYKPIKPHHEKKHRFKRDHSSRSYNNIPYCCLNQCEEEFFC

SEQ ID NO: 33589 - DNA, 5180 bp, DROSOPHILA
acgatgccgcatgtgaggcagaagaaattgtttcgactttatgtaatcgctcattataattggcatttgtgtgtgacaaaaaagcacgtgaacgcggggggtggtgggcggcggtgggcgactggagctgtggggcggtaaacaattgtcaggtgtgaagaggcggtaagacagtattgtggcctggctttttgtgcaatgccatatactcacagtcggccaacatcgatcgtcgcatggcgataagccagcgcattcataacgtatcaagcatacgcaatgttgtacaccgcactgatttctcgcttgcccaagttttggtttctttcggcttccttgaaaattgtatagaaataatgtcaattcaccatttcgtcaggtaatatgagtcaaaaatcataaaagaggcttaaaatgcttttgcagattacacgattttgtcaccgacttgggtgctgtgggtagcagtatttttaacaatgaaaagaacatgtgttttgattgttaatagagaatcggaaaatgttttattgatgtttaaaactaataaaacagcagtttaattttagaaacttcttgagagcatttattgttttcactctgatgtaacagatataggtttgatggttctttagttgcttttggatggttaaacattaataatattctgttgagctatcataccttattcacctatactgaaagtcatgtttaaaatctggaactccttgacaaaccagcttataacccataattacagcaatcgggcacgccttcaaatataatggctgtcacccaatttacatttgcatgaacaagattttcacgagctttctcttccactctctgttttttttttttttgtgttccaggcccggaggcaacagcaacataatcatcatcggcagcagcagcagcaacatcttggccggctgcatcttggatagccgagaacgtgatcgctttctggccaagatcggagcaagccaacgccatggcgatgtcacctgtcttggatgcggctgccaaagccgctggccgtgatctcaatggtaatagtaatgcagcaagtgcaacagcagcatcaacagcaacaccaactgcagcagcagccgcagcagcaaccacaccgcgcaaaacgaaaaagacaattatcaattggctggtgaatagtgacagtgagaacaacaatcgggcgacgtgcgataaagccggcaaagataatccaaatccaaatcaaaatccgaatagccaagcaaatccgaatcaaaactgcagctgtgagtcgcgggcatttcgcgatttccgtggcgtgcaaactttgcgattattgtggagcaggcgcatcaaaagtgccagcgaggatcaatgtcactccccagtccactgccacacctcctcctcttcattgggcacattaaaaaagttaaataaaagcgttagctgtctggttaacgcctttaacaactcgcgtgattgcgccacgccggaaaaaacgctggcaaaacgcgctgccagtttgcacaatttgcaggattcgcaagcgaagcataagcaattgcatagggaaaaagataatttctacaagtacaaaaacgccgagcaggccaaaatgcaggccaagttaagaagcagcgccgacgaggcgattttaaacgccagcgaaacgcgcgcgaaacgtgacgacagcggttgtttacctggcgtcaaatcgtataattcgaaagccttatcagccgcagataaggttgcaaaagtggcaaagggggaagctaagacgcagcggagggcggaggagccggtgggagaggcagaggtggaggtggaggtagagttccgagccaaacgggagcacaatcggcttgagggtctcagtctcagcgcggcgagcgcccaaagtgggggcagcagcgaatcgcttcaaaccaccaccacctcctcctccacgcccaccacccacagcagcgtgacgtcatcgacgggtcggtcgggcggacgtcgcaagtatagctttaaaacccatgccggcaagtcatatcatcagcaccatcatccgtcgcgcaggactagcaacatggattcctcaaatggtggcattagtatggtggccaaacttacccatcagttcaacgagattattcaaaaggatgcgaaactcctggaacaggtcaagcggaacaatggcgtctggatatcccggggcactcatgtctacaagatcgtggagaaaccaacgtcagagggaaagggattacctaacgccgacgataatcgcatctcgaccgttcagcggaatattaaaaagttcgagaggctggagaagccgagtgtgcccttgaagagtgaacagttgatgcggaaacatctcgaactgatgaggggcagtagtctttcgcggggtccgcgaatcaaaaggaatctcaagctaccaccgggcagtgtgggcattccagaactggcaatagtcagcgaggaactgaagactcctacttccgaagagcaagctaagaaaccaaagtcagtgcaaaatgaatcacagcccaatcatcccgaagaattgaatcagtcgaatgacaaacccagtgatgagctggatttaattatgggggaggaaggcgacgaggaggagctgcgccagaagcagcggaagcacaagtatgcctccatatacgagaaactccgattcaccttcgcgaaaggtcggaaatcagcgagtccctcacccacgaaggcccaaatccgggaggaagtatcaatagatgaggagtccatcaaggatagcacatccgaagatatggttactcggaaagaagatttcacattggatcttcccaaagaggtaatacccagagcagaagacctagaagattcctcacacgccctgcttgtatctccgtgctttgaagccgatgccaaaatcctcgacgcccttgaggcagtggatctaaaactcaaggtgctcaaccccctcaacgatgtgaccaccgcagacggtgagcgggagctcctcctggccgccaacgatgacttcgagcagcgcatcctgcccaatagctcctttgtttaccaggcggccaacaagcagtactcgaataatcaaattctgctgaaccaggcggttaatgttaccctagttaatgccatcgagggtgagcagatgatcatggagcaaaagcaactgatgaaagtcagagatttggagctcacggagagggacatagatcaacctctcaaacgggcggaaaaatcgccagagaaggacgataccctggaacccgagtccctctacgaacccatcacacctgttatggatgaaaccaagactgaagcccagacatccagcctctttaaaatatacaccaagaaatcagagctggtggaggacatataccaaactgttgaggaggcatccactgtcgaggtgaagccgaataactggctggagggctacgaatcaatcgctggatcccaggaggcatgtcccttgacgtacgatggctacgagtccttcgccccagaagaggtggtaacaacacccacgactccatctgccactggcacattgggccggaatacccgcgatgagctgccggaactgccgaagcccaagagagtactcaacaaatcacccattcccttgcgaccagcacctccaaagccacaagccaaagagtcggaagaggatgagaatatatacgacaccatcaagggctgctacgagtccatgcactgcaaggcaacatcctcctcgtccagtggagaagccacactcaccacggacaccatttccctgagttccaactgctacgagagtatctcccacatccggagaagccgagtggcaactactcaaaatcagggccacggttcggcgggcagttgcatccaactctcgagcagcggctccacattgacaatctcctcggatcacaagaccaacagcctgtatgaatcctctctggcggccgccggatgcgtggtctacggaagtgccagtgtgggatgcaggtcgtccttgggcagtagtgccggaagcagagacagcggaaagcctggcgataagagatcctcaatagccggctccagtgacaacagcgatgcgtgggtggacatttcggatggggagattggccaggcgacgaccgatgcgaccgccaacgaggcccagttcattgtgtaagtactatatctcacaatgaatgtgcttatcttttaatacttttaaaaagagctaatcaaaaaataagtaaggaaagtgtagataaatgataaatgagattggaattttgtttataaaaagaaaatatttaagtaatgcgttattttttcagtgcatttttttttttattttacttaaagtatataaatattgttcaacgtttcatgagtctgtaggtcaggttgatatgaataatgttttaagtatacacacattgcaaaccgggagaaaatatcgcaatgttattattatttattcactgcccgttacgcaaaaccaattgcgagtgaaaaacgattggaattgcaatcttcctacagctgggctatataaattctgcgtagattgcttatcagtttgtttgggtttgcttatctaatcagttgataaaggacaggataccgcaggggtttttagtgtctgaaattttatttgccgccaatgaatggtgcataatgggttgcaacatatacatgtatataatagtcattcatttcggtgtagaggttgaccccaaaactatactaatatgcaggtcaaggtaaatttggctttgatatcaagattatatagcgtagcaggattaaagtcgaaagattcgtcgagcaccaatgtgaagtgtattacgcaaacgaaattaatatattattaagaaaaatgttcatatttggtattagtattagtattatttttgcacatacttaatctcctttaggggtaaacaactggcgcagattttttaactacgtaatgatagcaaaataaatgacgtttatgttttcctacatacgctttttatagcttatctaagttgttcagcaacaataatacacacaatgaaacaatttaaaacagttgctgactgcaacaggcatttaacgatcttttaatagttcttctgatcaactgataattatcaccaccagaacttattgttagcacttaattagtacaaagtcat

SEQ ID NO: 33590 - DNA, 3180 bp, DROSOPHILA
atgtcacctgtcttggatgcggctgccaaagccgctggccgtgatctcaatggtaatagtaatgcagcaagtgcaacagcagcatcaacagcaacaccaactgcagcagcagccgcagcagcaaccacaccgcgcaaaacgaaaaagacaattatcaattggctggtgaatagtgacagtgagaacaacaatcgggcgacgtgcgataaagccggcaaagataatccaaatccaaatcaaaatccgaatagccaagcaaatccgaatcaaaactgcagctgtgagtcgcgggcatttcgcgatttccgtggcgtgcaaactttgcgattattgtggagcaggcgcatcaaaagtgccagcgaggatcaatgtcactccccagtccactgccacacctcctcctcttcattgggcacattaaaaaagttaaataaaagcgttagctgtctggttaacgcctttaacaactcgcgtgattgcgccacgccggaaaaaacgctggcaaaacgcgctgccagtttgcacaatttgcaggattcgcaagcgaagcataagcaattgcatagggaaaaagataatttctacaagtacaaaaacgccgagcaggccaaaatgcaggccaagttaagaagcagcgccgacgaggcgattttaaacgccagcgaaacgcgcgcgaaacgtgacgacagcggttgtttacctggcgtcaaatcgtataattcgaaagccttatcagccgcagataaggttgcaaaagtggcaaagggggaagctaagacgcagcggagggcggaggagccggtgggagaggcagaggtggaggtggaggtagagttccgagccaaacgggagcacaatcggcttgagggtctcagtctcagcgcggcgagcgcccaaagtgggggcagcagcgaatcgcttcaaaccaccaccacctcctcctccacgcccaccacccacagcagcgtgacgtcatcgacgggtcggtcgggcggacgtcgcaagtatagctttaaaacccatgccggcaagtcatatcatcagcaccatcatccgtcgcgcaggactagcaacatggattcctcaaatggtggcattagtatggtggccaaacttacccatcagttcaacgagattattcaaaaggatgcgaaactcctggaacaggtcaagcggaacaatggcgtctggatatcccggggcactcatgtctacaagatcgtggagaaaccaacgtcagagggaaagggattacctaacgccgacgataatcgcatctcgaccgttcagcggaatattaaaaagttcgagaggctggagaagccgagtgtgcccttgaagagtgaacagttgatgcggaaacatctcgaactgatgaggggcagtagtctttcgcggggtccgcgaatcaaaaggaatctcaagctaccaccgggcagtgtgggcattccagaactggcaatagtcagcgaggaactgaagactcctacttccgaagagcaagctaagaaaccaaagtcagtgcaaaatgaatcacagcccaatcatcccgaagaattgaatcagtcgaatgacaaacccagtgatgagctggatttaattatgggggaggaaggcgacgaggaggagctgcgccagaagcagcggaagcacaagtatgcctccatatacgagaaactccgattcaccttcgcgaaaggtcggaaatcagcgagtccctcacccacgaaggcccaaatccgggaggaagtatcaatagatgaggagtccatcaaggatagcacatccgaagatatggttactcggaaagaagatttcacattggatcttcccaaagaggtaatacccagagcagaagacctagaagattcctcacacgccctgcttgtatctccgtgctttgaagccgatgccaaaatcctcgacgcccttgaggcagtggatctaaaactcaaggtgctcaaccccctcaacgatgtgaccaccgcagacggtgagcgggagctcctcctggccgccaacgatgacttcgagcagcgcatcctgcccaatagctcctttgtttaccaggcggccaacaagcagtactcgaataatcaaattctgctgaaccaggcggttaatgttaccctagttaatgccatcgagggtgagcagatgatcatggagcaaaagcaactgatgaaagtcagagatttggagctcacggagagggacatagatcaacctctcaaacgggcggaaaaatcgccagagaaggacgataccctggaacccgagtccctctacgaacccatcacacctgttatggatgaaaccaagactgaagcccagacatccagcctctttaaaatatacaccaagaaatcagagctggtggaggacatataccaaactgttgaggaggcatccactgtcgaggtgaagccgaataactggctggagggctacgaatcaatcgctggatcccaggaggcatgtcccttgacgtacgatggctacgagtccttcgccccagaagaggtggtaacaacacccacgactccatctgccactggcacattgggccggaatacccgcgatgagctgccggaactgccgaagcccaagagagtactcaacaaatcacccattcccttgcgaccagcacctccaaagccacaagccaaagagtcggaagaggatgagaatatatacgacaccatcaagggctgctacgagtccatgcactgcaaggcaacatcctcctcgtccagtggagaagccacactcaccacggacaccatttccctgagttccaactgctacgagagtatctcccacatccggagaagccgagtggcaactactcaaaatcagggccacggttcggcgggcagttgcatccaactctcgagcagcggctccacattgacaatctcctcggatcacaagaccaacagcctgtatgaatcctctctggcggccgccggatgcgtggtctacggaagtgccagtgtgggatgcaggtcgtccttgggcagtagtgccggaagcagagacagcggaaagcctggcgataagagatcctcaatagccggctccagtgacaacagcgatgcgtgggtggacatttcggatggggagattggccaggcgacgaccgatgcgaccgccaacgaggcccagttcattgtgtaa

SEQ ID NO: 33591 - protein, 1059 aa, DROSOPHILA
MSPVLDAAAKAAGRDLNGNSNAASATAASTATPTAAAAAAATTPRKTKKTIINWLVNSDSENNNRATCDKAGKDNPNPNQNPNSQANPNQNCSCESRAFRDFRGVQTLRLLWSRRIKSASEDQCHSPVHCHTSSSSLGTLKKLNKSVSCLVNAFNNSRDCATPEKTLAKRAASLHNLQDSQAKHKQLHREKDNFYKYKNAEQAKMQAKLRSSADEAILNASETRAKRDDSGCLPGVKSYNSKALSAADKVAKVAKGEAKTQRRAEEPVGEAEVEVEVEFRAKREHNRLEGLSLSAASAQSGGSSESLQTTTTSSSTPTTHSSVTSSTGRSGGRRKYSFKTHAGKSYHQHHHPSRRTSNMDSSNGGISMVAKLTHQFNEIIQKDAKLLEQVKRNNGVWISRGTHVYKIVEKPTSEGKGLPNADDNRISTVQRNIKKFERLEKPSVPLKSEQLMRKHLELMRGSSLSRGPRIKRNLKLPPGSVGIPELAIVSEELKTPTSEEQAKKPKSVQNESQPNHPEELNQSNDKPSDELDLIMGEEGDEEELRQKQRKHKYASIYEKLRFTFAKGRKSASPSPTKAQIREEVSIDEESIKDSTSEDMVTRKEDFTLDLPKEVIPRAEDLEDSSHALLVSPCFEADAKILDALEAVDLKLKVLNPLNDVTTADGERELLLAANDDFEQRILPNSSFVYQAANKQYSNNQILLNQAVNVTLVNAIEGEQMIMEQKQLMKVRDLELTERDIDQPLKRAEKSPEKDDTLEPESLYEPITPVMDETKTEAQTSSLFKIYTKKSELVEDIYQTVEEASTVEVKPNNWLEGYESIAGSQEACPLTYDGYESFAPEEVVTTPTTPSATGTLGRNTRDELPELPKPKRVLNKSPIPLRPAPPKPQAKESEEDENIYDTIKGCYESMHCKATSSSSSGEATLTTDTISLSSNCYESISHIRRSRVATTQNQGHGSAGSCIQLSSSGSTLTISSDHKTNSLYESSLAAAGCVVYGSASVGCRSSLGSSAGSRDSGKPGDKRSSIAGSSDNSDAWVDISDGEIGQATTDATANEAQFIV

SEQ ID NO: 33592 - DNA, 2378 bp, DROSOPHILA
ttcgtcgtgaacgaggggattacccatggccaactggcactgggccgtatacttcatgttcttcacgcagatcatagtgtcggtggcgaccatcgcttcgggatccctcatgcggagtcggcacgcctgcatcggtatgatgtacgttgtctgcgagtgaatactgtggcgactcctgatccacagtggcagctcgatgggctcgtatatttctagctccgaatcgcacagcttcacggtgtcaccagtcactttggaattctttggggacttggttagttgaatagcaaccagcatgggatccgctcctttaaggtaggtctggttgagagcgactcttttcccttcgaggacttcgtcatcgtacatcttcatcgtgaccacttcactgctggccaaattaaaacaagtgctagtggtaatcactagcatctcggatatcaccgtgcccatgcagatatatttgttttgctgatagagtctcaccatcagctcgtgcagcggcaccttcttgtccgaattggtcaaggtaactacaggctccttggaatgtccatactgtactgtgtcattattcggattatttggattattgagattattgggattatcgggactatcggaattatttggattattgggattatttggattattgggatcgatagccatttcgtgatcgctccttacagtacggcgtcgtttgtagttcatttgggtttttcgattgtgctgcggcttataggtgtccagcatatagcgatggagatgagtgttcgaggattccgactcgttcgccaggaaagcgagcaaaaggatctgaataatgcacagtggtcgcagcatcgttactcaataagtctctggtactaagcatatcttattattgacttgaccatagtgcttacaaaatcaatttgtgacgccttataatttgacatttacactaattgcaaccataacataatatttttttacactgattaaaatttgaataaaactaataataatcgagaacgctttcaacatgattctcaatggaattcttgacttcccgatctggtcctccattaagaggatcatcgaatgctaattcctctgggggaccaccaacataaacattgggcgacttcttcactatggcctcaagcaggggtgacaatgtagttggatacgattcattgtatggacccgatccagtgaaagccctcagggcatccgtggccgtctggatgaagggtatgaccggcctaatgggtaggtatatgtccatgttggtggagtcgtcatcctcgtcgcagtgctctccatatatattaatggccgccagtttgttgtcaatcagtaagggatcaccaggccgggtgctgcatgtggtcttcttcgagtgtcgcttgtttcgtacgcagataaagtccggctcaaaggtggaaacatggaatacctcctttaggccgtagtggattttgcagcgatctatgtccataacccgcgtgttgtacagtctgatctggaacttgggtggaccatagtaggccatctttacgtcatcccccgcctgtggcttcttacgatgcaggggaatatatcggtatttgtctctgtcgagcttgttagagagggcgagcagagccacgtagttggtaaagcgttcattcttattaaccggcatgaaaaatccgatcacctgatgtggttccggattgtcgtccaattccacgccagtcaatatggacagatgtttggccgtgtactcgtatatcaaatcgaatctccgcggctggaagcagtgcgtcgaggtcacgaccattctgcgggagattagcgcccccgcacagatgacggatccctcgttcaacacgtttacgtagtatgtcaagtcccgcgtagcatcgaaaggaagtcgcttttggacctccaccggcttcggtttgtcccgttcctcgagagcttctcgattgtaatccacgtggtccttggttctgtgggctcgattgtagtaagtgggtcggtggtagttctccgagtacttttttatccacagggaggcactgtagtccatcccaaggatggacaaaatgcatgtgaataggagtcgcatgtcgaaaaggaactggcactttaatcagattccagcacgccgaacgagatttagttagctaacttaattagtttcactttgagtaaaagaaaattaagtcactcagtgttcacacatgaacacgaatatatttaaagacttacaattttgggctccgttcatatcttatgtaaatgaatcgagagcgataaattatatttaggattttgttatctaaggcgacatgggtgcattgctcaaaaacatgtaatttaagtgcacactacatgagtcagtc

SEQ ID NO: 33593 - DNA, 810 bp, DROSOPHILA
atggtcgtgacctcgacgcactgcttccagccgcggagattcgatttgatatacgagtacacggccaaacatctgtccatattgactggcgtggaattggacgacaatccggaaccacatcaggtgatcggatttttcatgccggttaataagaatgaacgctttaccaactacgtggctctgctcgccctctctaacaagctcgacagagacaaataccgatatattcccctgcatcgtaagaagccacaggcgggggatgacgtaaagatggcctactatggtccacccaagttccagatcagactgtacaacacgcgggttatggacatagatcgctgcaaaatccactacggcctaaaggaggtattccatgtttccacctttgagccggactttatctgcgtacgaaacaagcgacactcgaagaagaccacatgcagcacccggcctggtgatcccttactgattgacaacaaactggcggccattaatatatatggagagcactgcgacgaggatgacgactccaccaacatggacatatacctacccattaggccggtcatacccttcatccagacggccacggatgccctgagggctttcactggatcgggtccatacaatgaatcgtatccaactacattgtcacccctgcttgaggccatagtgaagaagtcgcccaatgtttatgttggtggtcccccagaggaattagcattcgatgatcctcttaatggaggaccagatcgggaagtcaagaattccattgagaatcatgttgaaagcgttctcgattattattag

SEQ ID NO: 33594 - protein, 269 aa, DROSOPHILA
MVVTSTHCFQPRRFDLIYEYTAKHLSILTGVELDDNPEPHQVIGFFMPVNKNERFTNYVALLALSNKLDRDKYRYIPLHRKKPQAGDDVKMAYYGPPKFQIRLYNTRVMDIDRCKIHYGLKEVFHVSTFEPDFICVRNKRHSKKTTCSTRPGDPLLIDNKLAAINIYGEHCDEDDDSTNMDIYLPIRPVIPFIQTATDALRAFTGSGPYNESYPTTLSPLLEAIVKKSPNVYVGGPPEELAFDDPLNGGPDREVKNSIENHVESVLDYY

SEQ ID NO: 33595 - DNA, 3012 bp, DROSOPHILA
gcgtaacgcaatttccactgcttacgagcaatttggcgctatttgggcacttttaatgcatgctcacaggggcgaaccgaattatgccatataaaatttgtgactcaaatcgtgcggttgtagaattgtaatggtcaataaaaatagaaataaaagtaaaaggggcagcaaaatcaacaagccggccacaaaacggggcataaattaaattgtgccgcagtgcagaatggatgcatagagatggtcagaatgtgggtgctcggcatgttgggtggtgcaagtgctcagcccattcacaacgccattgagttgcgtgtttacagcacaattacaactgttaggttttatgagagcccagttgaacgcatgtccgggttgctaaatttattctgcacttttatgagctcccagtgtccccggccctttggctccattatccatccaggatatccatcagctccattccggcagaacacgcacaaaacaatttcgcaggcgtgcgtatttaaaagcagcacagacacaaacagccatgccctgctgaataatttatttaatgtctacttttaggcgcaacccccggccaagcaattgccatggccgcctgcctttattgcactcgcacgcattgaaaagcgtttgccctccgccacaatcgcagcttgaatttaaatgggccaaaagcgggtggcagtggcagtgtggtggcccgggggggataaatttatgagaagccgctgaatgaccattaaaactgacgtctcgagtccattccgaatgagccatgaattcgaagtgttcgcacgcgttttaaactgccacgcaagcatttacgatttatgaaaatgaaaattgatttgcgatctaaagccaaaataatatacttttaatttcagtttaaattattgtttaaattattaccatgtttgaattttgttatattaaaaacctcacatttttgtaaggctgacaggtttttcttattgagaaaggcatccaattagggcctgaaagtggcggggttgcaacagaacgaaaagccagcctgtgccgtgttgaccaatgccactgggcaattcacgggctgacaaaagttgggagcagctggacgttgacgtgcgtagatgttgttcagggtgaggaaggccacgatgggctggttgttggcgttccgcactatcttgtacatccactggggcaccgggttcctgttgccacttaggaagacattcttgggtctattgcccgatggcagcgagagtacgcccctggccccggtgcgcacattcacaaagttgtttccggtcaccgaattacgaacgaatcgctcgatggtctcccagttgccatcgttgatgctcttgaactgcggcactgcattcacatacttgaaggtggcgcacaattggtcaccaaagaagaagtcggccgaggcggccagatgtccgcgattgatgatcacatcgcggttgttcggtatatagttctgattgttgccaaacagcctcctaaaggtgccgtggatatttcggaccgtatagctagcttcatccgcgccactgatcactccatccgaactaaattggacacagggtcgggtgatatctgagtatttgtaagtttgatattcattttataattaagatttaacttacacttttgtatatgtacttacagaagggctttccatacacccggtgttccacgaagatagccctcacagctctggtatcgaagcaggcgcgatagagctccaggaactggttgttgcccacgttgtagcccacccggtacatggtggccggacatctgcgatcttggaccggtgtggtgatggccgccggagcagcgcggcaggtcatgggcaagggtggctggaaggctggaacccttcccgcctggcaggtggtggccactatgtcccggggattgcaccacatctgcagggtttcgccaaccgccgaactggctgttcgcttaagggacagctggcggttctgaccacgcaccataaagatccgattggtcccttgcacttgagctctggtgaatcggcactgtccatgtgcttaagaatataaactttacatccagcaatagccgagaatatatttttatttattacccaaggcacagaatgccagtagcagaagtagaattcgcaacatatccgaaagattcaactcggcagttaatcgcttgcaggtctatttatattgtacggaaatcggagaagtgtgtgcacaactgtttcaaaaatacgtgcaattcattgtcgaattttattgtttgcatcgacttgcacgagcgatccaaaattaattatattattacatcattattgcttaaactggataacgaattaaaggtgaaaaagagtggcctacattatcacctggctggcttaattacttccagatcaggggccccaggtaatgtttaaaagcgggggcctcatgcggatattgtcaacttttgtgtgcatatgctgccatttgccgattgcaaatgtgcctggcagattaaatgaaattagttattggcccgatgccacaacctgaccagaaccaaccgaatcactttccatttacccagcgccccatgattttattatcgttgtttgttccacaaataacattagttcggtttggctgggttgggttcgatttggtttggtttagcattgattttgtccatgtccagctttacgtccagtgggcaagaacaactcgttttgcggctgagattgtgtttgttgccccatctatatggctgcatggctggaggtatagctgtagctctaaccaagccaaaacggtgtgatcttttggtttgtttgcggaaaggtgcaatagcagtagccaccatagacgggcatctcgcacatccttgcgaatatttcataaatttatatttgcctgctaaatcccttaacgactgtaagcttttccgtttgtatggcatgcagaaatggcggccaaaactaatacatgcgcatatataacgtcgact

SEQ ID NO: 33596 - DNA, 942 bp, DROSOPHILA
atggtgcgtggtcagaaccgccagctgtcccttaagcgaacagccagttcggcggttggcgaaaccctgcagatgtggtgcaatccccgggacatagtggccaccacctgccaggcgggaagggttccagccttccagccacccttgcccatgacctgccgcgctgctccggcggccatcaccacaccggtccaagatcgcagatgtccggccaccatgtaccgggtgggctacaacgtgggcaacaaccagttcctggagctctatcgcgcctgcttcgataccagagctgtgagggctatcttcgtggaacaccgggtgtatggaaagcccttctatatcacccgaccctgtgtccaatttagttcggatggagtgatcagtggcgcggatgaagctagctatacggtccgaaatatccacggcacctttaggaggctgtttggcaacaatcagaactatataccgaacaaccgcgatgtgatcatcaatcgcggacatctggccgcctcggccgacttcttctttggtgaccaattgtgcgccaccttcaagtatgtgaatgcagtgccgcagttcaagagcatcaacgatggcaactgggagaccatcgagcgattcgttcgtaattcggtgaccggaaacaactttgtgaatgtgcgcaccggggccaggggcgtactctcgctgccatcgggcaatagacccaagaatgtcttcctaagtggcaacaggaacccggtgccccagtggatgtacaagatagtgcggaacgccaacaaccagcccatcgtggccttcctcaccctgaacaacatctacgcacgtcaacgtccagctgctcccaacttttgtcagcccgtgaattgcccagtggcattggtcaacacggcacaggctggcttttcgttctgttgcaaccccgccactttcaggccctaa

SEQ ID NO: 33597 - protein, 313 aa, DROSOPHILA
MVRGQNRQLSLKRTASSAVGETLQMWCNPRDIVATTCQAGRVPAFQPPLPMTCRAAPAAITTPVQDRRCPATMYRVGYNVGNNQFLELYRACFDTRAVRAIFVEHRVYGKPFYITRPCVQFSSDGVISGADEASYTVRNIHGTFRRLFGNNQNYIPNNRDVIINRGHLAASADFFFGDQLCATFKYVNAVPQFKSINDGNWETIERFVRNSVTGNNFVNVRTGARGVLSLPSGNRPKNVFLSGNRNPVPQWMYKIVRNANNQPIVAFLTLNNIYARQRPAAPNFCQPVNCPVALVNTAQAGFSFCCNPATFRP

SEQ ID NO: 33598 - DNA, 2620 bp, DROSOPHILA
ttagcactctttcaatacaatatttgaacaagccgcacagttgtttctgtacggggacaatagaattgaatttagcattatcttctaactggtgataaggctcctaatgatgcgtcgtttcttttaattatacatgctgtgcgctaagctgttatgttggatttgccagggatgtgacgatggggatgggataggatggatcgaccccaaatgaccttcgacttgacggtcgtttttgtggcgtgtgaaagtcgctttcttctcggaaattcaccatggaagtgcagacaaattggctacaaatgaggggcatgttctccttcttcctccgcacaggacacaacgcaacaaacagataacgcccctatcctgggtcctgttttggcaaaagggacaaaaggacccggcctggacacaatcaactaccgggtaattagagttgaatgcgagagtcaaaaagtcgtgtaatgcgatttgtatggcccagcgggagatcccagcaggatgccagtctattgcatcaagacacattgcacggcccattaggggaatgggagtcctgctccgagtcctggtcctggttccaacacacatttgccaaataggtgaaatttatgagccgaaatggcacaacaatgacaaattcgttttggttttcgatttatcctggcacctcatttccttcttcctatctcttggcttggccaaatatttataaattgttgaaatcgcctgacagttttttgtgccttcctcttttttactttttcattataattgtgacagattggttctcggcgtgatttggccagcagatgctttgggtgctgctactcctgctcctgatccagatcctgccgacgacatcctgcggctatttgctgctgcacttgtcacggcctctctggctgcttgtcgtcttagggctgcctcaaattgtgttagggttaggcctagccctggatttccgctgcaggccatagaccatctgaccatcgtgttacagctcctgctcctgatcctgttcgtgcttatgctcctgcttttgctgctggttgctgctcttcgtcctggtcacgcttattatggccgcgggcactggttcctttgccggcgcctcttctcctgtgtttgcccaaatgcttgactgccgcggctgcagctgtgcaccgagagaaagatgtggtataaaatctcagctaacagaattgattgctttctagcgttgttattctcagaagaatctttcaattgctagtattatccgatcatctttacgaattttgataaaacaactaagaaggatctttcttatgtacaaatgctatatagtaaaatatctcaatgttgtttggaggttgtaaatggctgttataatgatttattaatgaaaaatttaaacagtttgtgctagtattttgccagagtgtagggggctctactacttttcactgctaaacatcggcacaatatccgtcgtacgttgtgcaaacagagcttcaggtcctgctccgctaactcctcctcctcctcttggttctcctgctcctgctgctgctgctgctgcgtcctgtcgctgccatctttgtgctgatgatgtttgcttagctgtctttgcatctttttgccgagcagcgaaggaccgagggggaccctgccatccagccaggcagctctaaaacggaaatgatggcggctgcaggaacatcggcgaccgctgcagaaagctgtatttgccctccccgctcgccagacaatgcaggacaatgaaatgaatttttaagaacaccctgccctatatgcgttgccacttcaaagtcattcgccaggcatcccagcagcatcttcagcatccctgcattccggattccggcattccggcggtgcagtttcgagttgcctttgctgcgatatgcagttagcagttgcagttgctgccagattcccgggcacggaacgaagggaggcgactgcgttttgtttgcatttgcatgcaggtgcagttcagatgcagttgcccctccttttttgtatttttttttcttttttcggccccgtaaatttgcagtcgaccgtcggaggatgctggctgcacggctatttgccaagcgtttcgtgtgtgcatgtcaaattcaaacgtttgcatattttgcaagattgtcgggcacaattaaccggcatcatcagcagcgttgacaaaaaattataattttctgtgctaatgaacgccgggccacgacgactacgcaacttggccagaaaacggggcaattgcacttgaaaacggaatgttaatcaggcgataatcttgttgtcgatgcgataatgaagagctgtctaaattacaacccaaaaggaggataaatgaggtcatatttcttaaaatatatatggtgttgtgtgcttttgcacttaaagttgttaagagaatttcatggaaaataaatccagttaaataaattcaaggaaaatctgcataattaacgatgtcaacgcacggagtctgaagtttgtgtccttttaagtttaaatcatcacatttatcctactagcgaaactttcactaaaaagtgtgtctaatttaactgtattttttcaccgatctaacatatccttgatg

SEQ ID NO: 33599 - DNA, 300 bp, DROSOPHILA
atgcaaagacagctaagcaaacatcatcagcacaaagatggcagcgacaggacgcagcagcagcagcagcaggagcaggagaaccaagaggaggaggaggagttagcggagcaggacctgaagctctgtttgcacaacctgcagccgcggcagtcaagcatttgggcaaacacaggagaagaggcgccggcaaaggaaccagtgcccgcggccataataagcgtgaccaggacgaagagcagcaaccagcagcaaaagcaggagcataagcacgaacaggatcaggagcaggagctgtaa

SEQ ID NO: 33600 - protein, 99 aa, DROSOPHILA
MQRQLSKHHQHKDGSDRTQQQQQQEQENQEEEEELAEQDLKLCLHNLQPRQSSIWANTGEEAPAKEPVPAAIISVTRTKSSNQQQKQEHKHEQDQEQEL

SEQ ID NO: 33601 - DNA, 3145 bp, DROSOPHILA
tgaaatgaaaacaaatccaattaaactgaatttggccaatatccattttgactgttccgatttcattgatttttcataaggacttaattagttttgtatttaactttttctccacacattttgctctagctttaattaatgtttgcccatgtgagggtttcgtatttattaatttattatttactgttttttctttagttctttacagtaattatttacataacttatgtgcctaggctgtggtagttggagggtagggtgtacttagtagttaaatgtgtgtcgcttatgcttattaattgttgttttcttttgttatgtaatttgtttgcaagtgttgtttgcaagtgcatgtgttaatttatttaaatttatggattcgtttcttttttctatactctggttgtctgcaggcagttttgtagtttttttttttcgaagagttaaacaccacgccttcatccacaacatgcaattacgtgtgttacgtattaaatttatgctatatatttacttttactattattattttaaccttcttttcgatctatgcccgagcttgtgtggaaattcagccccggctgacttatgtttaatgtattgttattatcagaattttgtatgtagccatcgcaaattaattaatgcattgaaaatattccttcgctttgaacttatggactgcgacccagtttttttgtttgtttggcgaatgaggcaaataaaaaataaatacgaaatacaaggacatgctattaggcgttgacaatccagggacgctgtcgccaacacttttccccactcccaaacccataatacgtttttttttttgttttttccttttgatttttgcatatcctttgctgtttttctgccatcaagcactcgttctgttttgttattttttaattacacagctcgcgctgttgtttcatccttggaggtgacttgtccggctgcatttgcgttttccatggcggatttaagcggtccgctgcggtcacagatgcgccatggccagtgtgaaaatcgccagcgaaacagcgccaaaggctccacagcaaatgcagcagcgctgcgaggcgcctgtcagcgccgagttgtccggatctccgttggcataccgcttggatccctcgagtcccagcagattcggcgatatggtcgtcggcggcgcagcattcagcccgatccgctgcgccacgactttgtggtacatgtgccggatggtcaccacgcactgcaggttcacgctgtgctgatacttcgtctcgaagaagccctgcagcgcctggctgttggggtagatatccagcgaggagtacgtagtggagccctcgtaggtgtcctgcgagatgcgctgcagcggcgtcctgcggatctgcaagggatgagtgggaaataagtcagtatactggcttaatgcagtcgaggacaatgttaatgtttttaagttgtctatatatgctatgagtattaatttcttaataaaataatatcctaaactaaactaaactaaactatatcgagtttggaaaggtgtaattgtcaggcgtgtgtacttgttcttgtttcgagtgtgcttgagtgtcctgcaactcacctggtttccgttgatgctccaggtgatgttggccggcggatacgaagggcccaccgtgcacacagccttgaagttgtcgttcacgccaatcaccttcttgtccacctgcatcaccggatcgtctttgggcagctcaatcacctgcatgtgggccgatcgaatctcggtgtggaagagcggtgcgtcctcggagacctcgcactgatagctgccgctcagctcccgggtgacacccttcaacgtcaccgacgtggcatccgagttggcgagctgaaagtgggcaaatggaatagggatttaaagcaccttgcaagcaaaaggtataaaatacttttcgaactgataacaattcgctttaactgacttttgcactagactggatttgactgatttgggaacctcaaataatgtctatttttaaagtgcgattgcaatggaaatgcgtctctgtcactgtcaatatccaaaacgaattaaactccatctttgaacagattcctctttccgatcgccactcccgaaaaacccacatcagatggcatgaaatgcgcaggcaacgcatttgttggtaatcagcagagcatgagtaagtaccagaagcgaaatttcgattcgtttgggtatgccgaaccctaagagctagctggcaaagggaaaccaccctttggatatccattgacacggtattcccgcttcgagaccacttggtttttgaatcgcactcgttgtcgcagtttagcatattctgttaattgccagcaagcgcttgccacttggcaaacagttgtgcaatatcctactcaaaatccacttcagcagcgaaccactcgcgattacctaccagcctgtatgagtgggtgtgtgtgagggaggtccttttatcgcagtcctggccttttgtatttaagttcagccaggaacgagtacaacccattcgcattcgagttttgcatatgccaccaaagccagagcgcgaacgttgccatcgctttgttcatttgcatctgtcctaatcccggcatggctgccgttgttggtcggtcggtgggtcctattgctattggcatatactcgcatcagcatagaggagcatccacccacaacacaatacaccatgccccatcctttattccttctagtgccccgcggcaaacaacagctttttacgattgtttcaacactttggcgcattgctcggcttggcctggcttttcctatttagtttgttgttttctttccagctagttgtgccagttcattcgcagataacgccgtcgataagggccgccaggcacctacaaccttctggtatttaccccgttaccctccccttctcggaaccccttcgcggaatccctgtgctctgcggcggttgccaattggcatattggccatggaatggctgcttcgtggcccctggcgagctgtggttttagtggctttcggatttgtcgatgctgatctcgttacgcaatcgtaaaatgaaaacaaatgcgaatcgtattgataaggttctctatatgcaaaggggggtgtgcctgg

SEQ ID NO: 33602 - DNA, 663 bp, DROSOPHILA
atgccatctgatctcgccaactcggatgccacgtcggtgacgttgaagggtgtcacccgggagctgagcggcagctatcagtgcgaggtctccgaggacgcaccgctcttccacaccgagattcgatcggcccacatgcaggtgattgagctgcccaaagacgatccggtgatgcaggtggacaagaaggtgattggcgtgaacgacaacttcaaggctgtgtgcacggtgggcccttcgtatccgccggccaacatcacctggagcatcaacggaaaccagatccgcaggacgccgctgcagcgcatctcgcaggacacctacgagggctccactacgtactcctcgctggatatctaccccaacagccaggcgctgcagggcttcttcgagacgaagtatcagcacagcgtgaacctgcagtgcgtggtgaccatccggcacatgtaccacaaagtcgtggcgcagcggatcgggctgaatgctgcgccgccgacgaccatatcgccgaatctgctgggactcgagggatccaagcggtatgccaacggagatccggacaactcggcgctgacaggcgcctcgcagcgctgctgcatttgctgtggagcctttggcgctgtttcgctggcgattttcacactggccatggcgcatctgtga

SEQ ID NO: 33603 - protein, 220 aa, DROSOPHILA
MPSDLANSDATSVTLKGVTRELSGSYQCEVSEDAPLFHTEIRSAHMQVIELPKDDPVMQVDKKVIGVNDNFKAVCTVGPSYPPANITWSINGNQIRRTPLQRISQDTYEGSTTYSSLDIYPNSQALQGFFETKYQHSVNLQCVVTIRHMYHKVVAQRIGLNAAPPTTISPNLLGLEGSKRYANGDPDNSALTGASQRCCICCGAFGAVSLAIFTLAMAHL

SEQ ID NO: 33604 - DNA, 2123 bp, DROSOPHILA
acaaatacatatgctgtgtgcggtgcggcattgcaaaaacagttgcggaattgctttttaaacccacagagcggcgcataaaaaaccagcacagccgcctctgggggcgtggcccagaagggttgggttaagcctttaaaacgtgaaacttttgagccgcttcaagttttagccaagcgtatttgcctttgtggtcgctccgttcccagctgacatacaggcaaagatccaactcgaccccatatgtatatacatatgtacatatatgggaatatggcgttcttggctgcaatgttgaagtttgcactgcatgcctgcgtgggggtttcgggtcaacctgttgccaggtcaggacctctgggcatggaaagcagatgtaaacattagacaggctatcaatgcgggctgcgataccggcctgaataagcaggcggccttgaaacgatagttggcgcggttcgctgggctgtaatgggtggcagtgcgccctgcagcgggtgggggtcaatgggtggcaatacccggcattgtttgcattggcgcacgcaaatatgtttggcagctccagctgggaccatggcacgcgccggagtgcgacattcgtgacgtcgcattcaagacccagttcgctggtccacctactgcgctacttctcatccaggctcatccctggccagctttgatttattgattttagccacggcacacagcataccaaatgagacaatatttactagactcgccgctggcccacatgtggcaccaacatggtgtgcacttgaaaatatattttccaaatccaagtcaaattcaatatgaaggtgttcaaaagtttgttgcgattaaatattttcaagcttcaaaataagatatcgatatttttaaaggagctgttcaaaaacccctggaattgatacacttgattgcttcttgattttttgaagtgtagcatagaatcaggatcccagcgagcacgcctgatatcagtgtcagacttccattagccgaactcaatggaccccgttcgtctcctgcccgctggatgtttaataagcccccgtattttaaatatggagcagatgcacagttcccggatccggattcgagtgcggccgggctccatttggggggaaaatgacgcaagttcaattaaatcaaagcctcaacatatttcttacccgctagacagttccggcgccagacgccgtctgctggcggcagagtctgcaaatagaaatggaagacgaattaaattacatttaaagcgcaagctgcaaaaaaaagacgaaaatacaaaaaccctaagaagaatggaaggaaaaataaattggccagcaaagagggaaaaaatgaaaatcatgaaattgatgtggagaagccaagaaagaagcaaaagataaagcccatattcgaatgaaaaatacactgatttcggcatagaaacaggttaattttcaattcgcaacaagtgcgtgataccatcattaagacctgcgtttaatatttgtatatccaattatttgtccgcttgcaggttataaatcgaacttctctccataatcccgctgctcaattgttgaaatgcttatctgcttaagtggcaaacgaatatgccattcattcgctcgtatcgtgattacagagcgcataaaaagaagccgacaaagtgtaagaaatggtgccaatgaaacgaaataaaatcggaaaaaaggcggaggaaacgaaaagaatgggataaaaagctggaaaagctcctcctgcatatataggatggcaaaaaaatgggcgaccatgtgggcggcggcggtgaagccgaatcaaaggcacagcgccagtcccggagataagtaaagagagcaaaattaaattggacatttatcaagagatgcttattgatgcccgaagtgccaggcatccagccagccagcacaaacacaaacacaaacacaaacacattcgcagccccactcacaccatcacacacccaagtcaagtggcccggcaatgtcgctcaattattgttttgagtgaaaaacttttattgcccgacaactggagaaaaagtcgaggaggctccactgttaaatcgtgtaatttaaatgttgccccaggcagaccaacaa

SEQ ID NO: 33605 - DNA, 123 bp, DROSOPHILA
atggagcccggccgcactcgaatccggatccgggaactgtgcatctgctccatatttaaaatacgggggcttattaaacatccagcgggcaggagacgaacggggtccattgagttcggctaa

SEQ ID NO: 33606 - protein, 40 aa, DROSOPHILA
MEPGRTRIRIRELCICSIFKIRGLIKHPAGRRRTGSIEFG

SEQ ID NO: 33607 - DNA, 2846 bp, DROSOPHILA
tctcgattcacgattggtcgtgcctcgcaacggattttctccgctcgcccaaactgcagtatataatcgtgcaaaatccgtggcagtaaattcaattcgccgaggagcgtgacagctgaggaaaatcgagaaaacggccgctgggagaggcttttccgatggccagttcctaaaaaatcaccgcactcctcgggaggctcttctgcagtcccacaagaatagtaatccccattgcgaaagccccaagttcaaagtgcagtgtatgtgcgtatgtgtgtgtgctgtaatagttgcattaagtaaagatgtaaatattattgcagaagggcgaacttgagattaatcgccgtaattgagcaacaaacacctcgcgttcgcccaactcgcaatcttgttggaaaatcctagtaggcacagtaaagctgggcttagatggccattctttagttttagtaaagaggttttagtttccattccactctttctttgcattggtatcagtttaatttcaaaagtctatttttctacggccaataaggccattaaaactcgagatgttgacttgaatttattagctcacttaaaagtttaagttaatgcaaattactatacaaattgcattagtattgaccgcagaattgccctgaatagttctatatgtaaatgacccaaaacagtcaagcttagctatagtaacactgcgtggaaaagttataaaatgacgtaattgtagtctttggcctggattttcctcttgttcctaccaaacaggcctgtgaaaactaatccttctattgccaaccatttcagtttggaagcctatctctggagccaccacatcccgttgagcaggcaaggaagcagacaagagtttccccaacccgacaacgaggatcagccgctgacgtagccggagcaggagcagcgagtgtgctgcccactctggagaggaaaccggagtcaaagaaacagcaggagtagcagcccgcaactgaggagcatgtccagcaaggaggagacgccatccacgggaggtgccgctcctgtggccactgtcgccgcctcgggcagcgccaccacttcctacgccaatgtggtgcagaacctggagaccaagaagtccggcaccagcaacaccaccaccaccaccgccagagccaccgtggacaacaaagagaaccagcccaatctgaagagcttcaagtcgtggagcgaggaagccgctgccgccgaggcagccggcgaatcgccaatcgtcggcagcgttagcctagcccagacgggtgagaagcgtgccgctgcctccggtggagataacaccgccgagaactcatcggaattggacgacaacaacgacttcgtgccggtactatcgcatcaccgccgcgatcgcaaaaaggcgcgcaaagagaagccgcgcgatcagcagccggccggaggacgtggcgatggtcagaaaccccagcaggctggtggccgccgcgtccccggatcctccgacaccgaacgcaagtcagtgcgcccacgtgcgccgcgcggcggtagtccccgcaaatcggcagctggagctgctggcgcagccggatccaatgctggagctgtgtcctccgccgttcctggtggaccgaaagtacacaaggatcgcaaggatacctcgcccagtgccagcatcgagggagccggcagcagcggcaacgaggccaagtccgccgacggggatcagcaggcgggcgagaaaggcgccgctggagcagctccgccgcccaagcgattcattgccgccccaccgcccaaggtcaacgcatggaaggtgagtgatcaaatgattgaatctttaagtgattgattgtattttggggtatcttgaatggtaggttcattaggataggttttcattagagttgttcaggcattgattggtattctttggatattcctaattggaaatcttaatatattcaaaaatccagaagatttagaagtgcaccggaatagaattaggtacatttgcattgacaaaaattagttactcgaacaaaacattggaaaatgcaaatgaaaagctttgctaaaatataatctagtcaaaagtcaatgcaaatatgccttaaactaataataacgacaactttttgtgagttctccgaagtggaaattgtaatgatggtgaagggtttgaagtaaagttgagaaaatactaagaaaaatctagataagcagtgctccaatatgaacagtaatcagtaaaatagtgaagaatgcgatatgaaatagtactaatatagtacgcgagtatccactgtacatggcgataaggcagttttttgaaaacccccttcaaattgaagttcacattctttgttgttactcgtttttcggcttcaccttcattttgttttatccaaattgcgtcttaaaaatgatggaaaaacatatctatgcatgtgctgggtgtgcgtgcgtgtgtgtgtgtggttgttggtaaacaaatgtgcgtggaatggaaaacaagagagggagcaaagcggggcggccaataaagcagagtgcgaggcgcagcaacaacaagcacacgcggtgcagtggaaacacgttttccgctatttgttgtggtttttcatgcccttatcaccgttatgcgaatgctgcgtaaaccgaaaacccgattacgattgcaaaattgtatctcacagatacacaactgcaggttgcataatgtctggcgagcagtgtgtcatcaaaaacaaaacaaaatcgagggaaacaaacacacaattgtgtttatttctatttattcttggctgtttcttattacgcaatgtcagcgcgaattgccggcggtattt

SEQ ID NO: 33608 - DNA, 846 bp, DROSOPHILA
atgtccagcaaggaggagacgccatccacgggaggtgccgctcctgtggccactgtcgccgcctcgggcagcgccaccacttcctacgccaatgtggtgcagaacctggagaccaagaagtccggcaccagcaacaccaccaccaccaccgccagagccaccgtggacaacaaagagaaccagcccaatctgaagagcttcaagtcgtggagcgaggaagccgctgccgccgaggcagccggcgaatcgccaatcgtcggcagcgttagcctagcccagacgggtgagaagcgtgccgctgcctccggtggagataacaccgccgagaactcatcggaattggacgacaacaacgacttcgtgccggtactatcgcatcaccgccgcgatcgcaaaaaggcgcgcaaagagaagccgcgcgatcagcagccggccggaggacgtggcgatggtcagaaaccccagcaggctggtggccgccgcgtccccggatcctccgacaccgaacgcaagtcagtgcgcccacgtgcgccgcgcggcggtagtccccgcaaatcggcagctggagctgctggcgcagccggatccaatgctggagctgtgtcctccgccgttcctggtggaccgaaagtacacaaggatcgcaaggatacctcgcccagtgccagcatcgagggagccggcagcagcggcaacgaggccaagtccgccgacggggatcagcaggcgggcgagaaaggcgccgctggagcagctccgccgcccaagcgattcattgccgccccaccgcccaaggtcaacgcatggaaggtgagtgatcaaatgattgaatctttaagtgattga

SEQ ID NO: 33609 - protein, 281 aa, DROSOPHILA
MSSKEETPSTGGAAPVATVAASGSATTSYANVVQNLETKKSGTSNTTTTTARATVDNKENQPNLKSFKSWSEEAAAAEAAGESPIVGSVSLAQTGEKRAAASGGDNTAENSSELDDNNDFVPVLSHHRRDRKKARKEKPRDQQPAGGRGDGQKPQQAGGRRVPGSSDTERKSVRPRAPRGGSPRKSAAGAAGAAGSNAGAVSSAVPGGPKVHKDRKDTSPSASIEGAGSSGNEAKSADGDQQAGEKGAAGAAPPPKRFIAAPPPKVNAWKVSDQMIESLSD

SEQ ID NO: 33610 - DNA, 7424 bp, DROSOPHILA
aggtcaaaactaaataacaacactatacaacataacccctgttttttaatttctgttgtcacttcagaagcaaatttaaaaatgtatctttttttgtgcacttttatctgcgtgtaatattttttataggattatttaagcatctccacgattttcgttctctctctttgttttgaagtttttccaccacgtttctccattttcggctctccttcggatggcctacgtgccgaaaatcacatgttgttttgttttgcctctttgtatgctccgttactgttacatcgtgcgcgagcgagatagcaaatgtttatgtttataattgttaggcttttgtttgtttgaagatatgcgtatcacctgttttcgatctatgatcgattcgttgtgggtgtgtgaactttaaagcggatcaaaacaacatttgtagaaaatgcgtacaaaaacaaaacgataaaacaagcgcacgtacgcacactgagcgaaaacctgtatccatcgcatacacattaagatacagatacagggtgccctgcgctcacgctctcgccggcaaaactctccggttctccgcttcctcctctctcacgcatccatgaaccggcgcatcggctgttttctgttttgtttttgttttggatctgaagccacagtgggacttcttcgggtggatgttatatcatgtgtcaatagtaaagcttttaaagtctagaagtcattctatggactgaatttgtttaataaactctggttcgaaaagaaagctgagaaaacacttctttgggtcgcattttaataaagagcgacagtcgaagcttcactgtatcctttttttatgttgcgttgtaaaaccagttgttgttatgccctcgcctctgcctttgttgttgtgccatcgtcttcgtcgtttttgctcacgtagccaacgcgtggacagcgaaaagtggaaggagagagcggtagccaaagagagcgggagaggaagaaagggcagaggcggatgagcgaaacagaggcggaggcatattcgaatcaaaaaattgtcgctatcgcacagaactcattcaacgtttcgagaaaacggacgcatcagttcttccgaactagcaagcaattgtttaaacaaaatatagttgtgccagcaacaacaacaactgtgccaattgctagtttagcaaaggtgttgtaatgtaagcaaagcaaacaaagataagcgaaaaacccgcagtgacaactgattagaagtgaaacaaggcaaagcgacaaaaagttcttgcacaaaaacgaggtaattttccagtggccaaaacgagaaattagccgctctccaaagtgcatacatatatacgctatagaagtggatatagaagttagccaccctcgtcgtgaactaaatctgggttaggggcactgcgcatagggagtggagctggagttgcattgatttttacccgtttttcggggctacctactgtgcgaaatgtaactcatattcttgaattccattctgctacttcaacagatatcggccaaacaatccggcagcccaaaggcaggaacttctccattggacaaacgtgttttgcagccaaaggcacagcagcagcagcagcaaactaaacaaactgccagccaaaacaacaacgcacagaacaccgccagcaacaaaaagacacaacagcaacaacaaccccaacagggagcaacaacaaccacacagacaacaacagcagcagcagcagcagcaaccgcagcagcagcagcaacagcagcaaccacatcagcagcagcagcaacatcatccgcagcagcagtaccagcagcaacaactgaaaccgcaacaacaaccactggtgagtgccccttggaggatggaaaattttctatacttaactcaattgatctgaagtgaactggggaaagtaaactataaatataactaagtggttgtatgtttacatgcaaaaatttatgaatagcaatctatttttattatgctgtttttcatcaaacattatcacaatgcgaatagctcgatagttcagccatctcaaagaatttcacataatcatagggcaagattattaagatttagcacaatattctctatctagttgtgtgtgtcaaggcaatgcttagaaataaaatagatttgtgtatttctgtaaattcctatatatttatatatatatattatctaccccctgcggagttgttttgatgcaagagacggatgagagaacctggacccgaccaccatcaccatgtgactgctctggttctcgttctctgccgcacttgctcacgtgtctcccgctctctggcactccgactctctctgttgacccgatgctccgagagaaggtgccattttttggcgacgcatatggcctgatttcttatttttaaaacactgttcttgtactacgatatactcagcccagaactgcttgtttcattacagttgatgccagccaggcggatgctcttgccaaagtcgtggtaaaggacaaaaagaaggtcaatcaaaaggttggtatctaactctagccaacaagatggtatattaccatgtctcatgtaaatatatcattgaaataatcgtcatacatttaaatgggacctctttgatatggtctttgtaatgtgcccatacctaccatgttctaaacagcgaatgcatctctttcaggccagcgactttagcaacgttggtgactggccgacgctaattggcggaacttctggcagtggcaaagccaccagcaacgaacccaagcgcaacccaacgaaaaaacagcagtcagccaaaacagcagccgcagtagcagccagcagcaataccacttcaagtgaagttgccacagagtctaacgtcgcaggcacaaccagcagcagcaacagcaatcccagcagcagcaccaccaccacaaacaccactaccaacagccaagccacaactgcacctgttgccagcacgagtcatgatgccaaagcccagcgagacgctgagccagcggccaattctgctgcaggaactactggcaccgctgccgggcctgccctcaccaagaagatacccaagcacaagtggcgtccgctgcccatcgatctggctaagtccagtcgccccaagccgattggcggccggccaaatcggcgcttcagcgacgatattgccgaccagcgccgtccgccgcgcgtctaccacgaccgtcagcccggtgctggaggagcgggagtcgagtcgcggcatccacacgctggccggcatccgtacgggtcacgcccagcgactgctacgtccgagcgcgtggattcctggcgtagcagcagcagcaccaccaccgcagcgttcgatgagcagcgctctggagcagcgggtggtgccggggcagcgggaacgggagttgggtcagccacgcgcgggccgcgtcgctaccggacgccgtaccgtggcgggcggcaaggccggggcggattctcccgacagggaccaggtcgcccgacttatcgcataccacgccatctgctagcttcgggcgagtatgccaactatctgccggcggacgccgccggcgccgactcgcagtcctcgtatgtgctcatgggcacccactactttggcaacgtgcccgccgcctacatcgaattggacgctaacagcatcaaggaggccatcaagaagcaagtgtaagtacatatcgatacatttcgcctaatgccttttgctggataaatatatattctgtatgtatacttaaaaatataaactctgcagctaaaggcattacatccaatgttactaagaatctctttgttgacttccaaactatttccatttgccccccatagtgaatactatttcagcgtcgataatcttaccggcgacttctttttgcgccgcaaaatggaccccgagggctatatcccagttactctgatcgcctcgttccatcgcgttctcgcactgaccaccgatgtggctgtgatcgtaaacgccattaaggaatcggataaactggagctctttgagggctataaggtgcgcaccaagacgacaccgaccacctggcccatcacggaagtgccggaggtcaacgaaggggaaccgaaggctattggcacactggagcaggagcagttggagcagaatgatggtcaggaaaagctggaggagcagactgaggcggattccccgccgcccattctcacatcggcgatggccacaaagccgctgaacagcattccgccgccgccaatgccgcgaaacccccagaatctggtgcccaaaatgttgcaggataagcaacagtcgagatcctcgaccattgcggctctaaactctgtgaatgcgatcagtgcgctgacccagcaagtggagggtggtgccgctgagctggctggacatttgagtggactggctgagagtgtgaagcccaagtcgacatcgacgccagacaagagaaatgctgcttcagcgggcaatggagctgggtcagcagctgctttggtggcggagccggagggcatatggaaagaggtaaagagacgctccaaaacaaatgctatcaaagaaaacgctactacaccaccacaacaacaacagccaccgctttcacaaacgctcaacaacaataacgataatgtcaaaacgaacaacacctcgtccaagtccaagtcctcgtccaacaacgccccatccaacgcctcatcatcagccactgtgtgtgtaaccacgaacaatgcttcctcagccaccaaagcaaccaccaaaaccacaaccacctccaccgccactaccaccacgaacaacaacattaaatctggcaatgctgcttactccaaaacccactccaaatcctcatccaaaacagctgctccgccatccgctcagtgccatgccgaaaaggaagaactagacttccagtttgacgaggagctaatggaccccctaccccctggaaccggacgcatcaacaacttcaccgaaaacttctccgacgacgacgaatccgactacgagtttgccgatcgtgacattaacaagctactgattgtggcccaagtgggccgcgcacctaagcacgagggctacgaccgcaccgccgactttacgtcgcgtacgaaaatcacccaggatctggagaacatcatcaacgatggactggttaactacgaagaggatctgtggaccaccaccaatgtggttgccgattacaagactgtcaatgtgatttcccaggcagacttcgaaaaactggctggtggtcgaaacaaatcggtgttgccgccgcaggtggtgccaccaccgccaccatttgaggaagatctggatgaaaccctggtgggtgacaccactctcaactccacgctgaacaacactctcaagtcccgacgtgcccgcttctatgctgctcccaactcgcactcgattgatccccgaacgccaagaaagaggaaactccgtcacaccgccaatcctccagtggaggcccacgtcggttggctgcttgacactgtggagcatcgtcctcgcaccacctcgatgggttcctcggcgggcacatcgcctaccgcctcgtcgtacggatcgttcggatcgtcggtgccacagtcgctgcccgtattccagcatccatcacatgctcttctcaaggagaacaacttcacccaacaggcctaccacaagtaccattcgcgctgcctcaaggagcgccggcgcttgggctacggtcagtcgcaggagatgaacaccctgtaccgcttctggtcgttcttcctgcgcgagaacttcaacaagagcatgtacaacgagttccgatcgttggcgctggaggatgccggcaatggtttccgctacggtcttgaatgcctcttccggttcttctcgtacggcttggagaagaagttcagaccgaatatctatcaggatttccaggacgagacgattgccgattatgaaacaggtaagaatttgttgtgcaaatataaaaattattataacttcttacaacattcattattaaacattcattactaatattaaacattttcttcaggtcaactgtacggcctcgagaagttctgggccttcctgaaatactacaagaatggtgagaagttggaggtgcagcccaagctggccgagtacctgaagagcttcaagaacattgaggacttccgcgtggtggagccggagatcaacgagatgctgcaaggagtgggcagcctgaatccaggccgccagctcaatcgccaccgcagtgtgtcggagagcgatggcacagctgtaattgcggccggcggtcgtcgcctcaacacgaccatcaccaaccgcagcgactacgtgggcaggttgctgcagcaacagcaccaacaacagcagcagcagcagcatcaccagtatcagcagggatacggcggctacaatcagcagcaaaaccgcaggcgcacaggctccttcggcagcaccacagtgcgcattcgcagcggctccctgggcaacaagccgcaggtggccaatcgcaatcagggatcgcagcacgagttgcgacgcggcggcagcaattctggcctggcgccacacaagcgacagcagcaacagaagccgaagccaggagcaggatcacagacaggctcaacacgtgccaccacatcagcggcagctacagcaacaacagccgcatcagcagcaacatcaacagcagcgacgccagcggtaacggtatcttcggggtcatcgtcgtcgaagaagtagttacacgataatgcagagacactttttggattaggcttaagttaatatctaccgcttagttttcagggggcactcgcatttgatggctccacactcttttgtttattcattcttattattcttttgtagtattcgagtcaaacgtaaagtgggaagagttgttagcgtttagcataattaagtgaaatttttgaaatttgtttattgcaatttgcctagcgctcgttggtttagtagttacgattccaaatgtttgtttctcgcataccctcgacaaaaaactaaaacaatggttgcttacaaaatgctcaatgctcacacaaaacacacacacacacataccaattacacacagcggggtctgtctgctttgtaccagtgccaaccagccatgatcttggaaaataacgaaacgattgcccttattttttttttttgttctgttaattattctccttattttttatgcgatgcaaaaatcaaggcaaagattttcctacttagagcagcgttaatagttgacgtaatgccatgaactgttgtactatacgattaaagttaaagctaataaccataacaataacgataacgatataacctatgcaaatattacctaacgaaaactgaaaaccaatcaatcgaaattgatacgcaagcaacaaca

SEQ ID NO: 33611 - DNA, 4140 bp, DROSOPHILA
atgagcgaaacagaggcggaggcatattcgaatcaaaaaattatatcggccaaacaatccggcagcccaaaggcaggaacttctccattggacaaacgtgttttgcagccaaaggcacagcagcagcagcagcaaactaaacaaactgccagccaaaacaacaacgcacagaacaccgccagcaacaaaaagacacaacagcaacaacaaccccaacagggagcaacaacaaccacacagacaacaacagcagcagcagcagcagcaaccgcagcagcagcagcaacagcagcaaccacatcagcagcagcagcaacatcatccgcagcagcagtaccagcagcaacaactgaaaccgcaacaacaaccactgttgatgccagccaggcggatgctcttgccaaagtcgtggtaaaggacaaaaagaaggtcaatcaaaaggccagcgactttagcaacgttggtgactggccgacgctaattggcggaacttctggcagtggcaaagccaccagcaacgaacccaagcgcaacccaacgaaaaaacagcagtcagccaaaacagcagccgcagtagcagccagcagcaataccacttcaagtgaagttgccacagagtctaacgtcgcaggcacaaccagcagcagcaacagcaatcccagcagcagcaccaccaccacaaacaccactaccaacagccaagccacaactgcacctgttgccagcacgagtcatgatgccaaagcccagcgagacgctgagccagcggccaattctgctgcaggaactactggcaccgctgccgggcctgccctcaccaagaagatacccaagcacaagtggcgtccgctgcccatcgatctggctaagtccagtcgccccaagccgattggcggccggccaaatcggcgcttcagcgacgatattgccgaccagcgccgtccgccgcgcgtctaccacgaccgtcagcccggtgctggaggagcgggagtcgagtcgcggcatccacacgctggccggcatccgtacgggtcacgcccagcgactgctacgtccgagcgcgtggattcctggcgtagcagcagcagcaccaccaccgcagcgttcgatgagcagcgctctggagcagcgggtggtgccggggcagcgggaacgggagttgggtcagccacgcgcgggccgcgtcgctaccggacgccgtaccgtggcgggcggcaaggccggggcggattctcccgacagggaccaggtcgcccgacttatcgcataccacgccatctgctagcttcgggcgagtatgccaactatctgccggcggacgccgccggcgccgactcgcagtcctcgtatgtgctcatgggcacccactactttggcaacgtgcccgccgcctacatcgaattggacgctaacagcatcaaggaggccatcaagaagcaagttgaatactatttcagcgtcgataatcttaccggcgacttctttttgcgccgcaaaatggaccccgagggctatatcccagttactctgatcgcctcgttccatcgcgttctcgcactgaccaccgatgtggctgtgatcgtaaacgccattaaggaatcggataaactggagctctttgagggctataaggtgcgcaccaagacgacaccgaccacctggcccatcacggaagtgccggaggtcaacgaaggggaaccgaaggctattggcacactggagcaggagcagttggagcagaatgatggtcaggaaaagctggaggagcagactgaggcggattccccgccgcccattctcacatcggcgatggccacaaagccgctgaacagcattccgccgccgccaatgccgcgaaacccccagaatctggtgcccaaaatgttgcaggataagcaacagtcgagatcctcgaccattgcggctctaaactctgtgaatgcgatcagtgcgctgacccagcaagtggagggtggtgccgctgagctggctggacatttgagtggactggctgagagtgtgaagcccaagtcgacatcgacgccagacaagagaaatgctgcttcagcgggcaatggagctgggtcagcagctgctttggtggcggagccggagggcatatggaaagaggtaaagagacgctccaaaacaaatgctatcaaagaaaacgctactacaccaccacaacaacaacagccaccgctttcacaaacgctcaacaacaataacgataatgtcaaaacgaacaacacctcgtccaagtccaagtcctcgtccaacaacgccccatccaacgcctcatcatcagccactgtgtgtgtaaccacgaacaatgcttcctcagccaccaaagcaaccaccaaaaccacaaccacctccaccgccactaccaccacgaacaacaacattaaatctggcaatgctgcttactccaaaacccactccaaatcctcatccaaaacagctgctccgccatccgctcagtgccatgccgaaaaggaagaactagacttccagtttgacgaggagctaatggaccccctaccccctggaaccggacgcatcaacaacttcaccgaaaacttctccgacgacgacgaatccgactacgagtttgccgatcgtgacattaacaagctactgattgtggcccaagtgggccgcgcacctaagcacgagggctacgaccgcaccgccgactttacgtcgcgtacgaaaatcacccaggatctggagaacatcatcaacgatggactggttaactacgaagaggatctgtggaccaccaccaatgtggttgccgattacaagactgtcaatgtgatttcccaggcagacttcgaaaaactggctggtggtcgaaacaaatcggtgttgccgccgcaggtggtgccaccaccgccaccatttgaggaagatctggatgaaaccctggtgggtgacaccactctcaactccacgctgaacaacactctcaagtcccgacgtgcccgcttctatgctgctcccaactcgcactcgattgatccccgaacgccaagaaagaggaaactccgtcacaccgccaatcctccagtggaggcccacgtcggttggctgcttgacactgtggagcatcgtcctcgcaccacctcgatgggttcctcggcgggcacatcgcctaccgcctcgtcgtacggatcgttcggatcgtcggtgccacagtcgctgcccgtattccagcatccatcacatgctcttctcaaggagaacaacttcacccaacaggcctaccacaagtaccattcgcgctgcctcaaggagcgccggcgcttgggctacggtcagtcgcaggagatgaacaccctgtaccgcttctggtcgttcttcctgcgcgagaacttcaacaagagcatgtacaacgagttccgatcgttggcgctggaggatgccggcaatggtttccgctacggtcttgaatgcctcttccggttcttctcgtacggcttggagaagaatgagaagttggaggtgcagcccaagctggccgagtacctgaagagcttcaagaacattgaggacttccgcgtggtggagccggagatcaacgagatgctgcaaggagtgggcagcctgaatccaggccgccagctcaatcgccaccgcagtgtgtcggagagcgatggcacagctgtaattgcggccggcggtcgtcgcctcaacacgaccatcaccaaccgcagcgactacgtgggcaggttgctgcagcaacagcaccaacaacagcagcagcagcagcatcaccagtatcagcagggatacggcggctacaatcagcagcaaaaccgcaggcgcacaggctccttcggcagcaccacagtgcgcattcgcagcggctccctgggcaacaagccgcaggtggccaatcgcaatcagggatcgcagcacgagttgcgacgcggcggcagcaattctggcctggcgccacacaagcgacagcagcaacagaagccgaagccaggagcaggatcacagacaggctcaacacgtgccaccacatcagcggcagctacagcaacaacagccgcatcagcagcaacatcaacagcagcgacgccagcggtaacggtatcttcggggtcatcgtcgtcgaagaagtag

SEQ ID NO: 33612 - protein, 1379 aa, DROSOPHILA
MSETEAEAYSNQKIISAKQSGSPKAGTSPLDKRVLQPKAQQQQQQTKQTASQNNNAQNTASNKKTQQQQQPQQGATTTTQTTTAAAAAATAAAAATAATTSAAAATSSAAAVPAATTETATTTTVDASQADALAKVVVKDKKKVNQKASDFSNVGDWPTLIGGTSGSGKATSNEPKRNPTKKQQSAKTAAAVAASSNTTSSEVATESNVAGTTSSSNSNPSSSTTTTNTTTNSQATTAPVASTSHDAKAQRDAEPAANSAAGTTGTAAGPALTKKIPKHKWRPLPIDLAKSSRPKPIGGRPNRRFSDDIADQRRPPRVYHDRQPGAGGAGVESRHPHAGRHPYGSRPATATSERVDSWRSSSSTTTAAFDEQRSGAAGGAGAAGTGVGSATRGPRRYRTPYRGGRQGRGGFSRQGPGRPTYRIPRHLLASGEYANYLPADAAGADSQSSYVLMGTHYFGNVPAAYIELDANSIKEAIKKQVEYYFSVDNLTGDFFLRRKMDPEGYIPVTLIASFHRVLALTTDVAVIVNAIKESDKLELFEGYKVRTKTTPTTWPITEVPEVNEGEPKAIGTLEQEQLEQNDGQEKLEEQTEADSPPPILTSAMATKPLNSIPPPPMPRNPQNLVPKMLQDKQQSRSSTIAALNSVNAISALTQQVEGGAAELAGHLSGLAESVKPKSTSTPDKRNAASAGNGAGSAAALVAEPEGIWKEVKRRSKTNAIKENATTPPQQQQPPLSQTLNNNNDNVKTNNTSSKSKSSSNNAPSNASSSATVCVTTNNASSATKATTKTTTTSTATTTTNNNIKSGNAAYSKTHSKSSSKTAAPPSAQCHAEKEELDFQFDEELMDPLPPGTGRINNFTENFSDDDESDYEFADRDINKLLIVAQVGRAPKHEGYDRTADFTSRTKITQDLENIINDGLVNYEEDLWTTTNVVADYKTVNVISQADFEKLAGGRNKSVLPPQVVPPPPPFEEDLDETLVGDTTLNSTLNNTLKSRRARFYAAPNSHSIDPRTPRKRKLRHTANPPVEAHVGWLLDTVEHRPRTTSMGSSAGTSPTASSYGSFGSSVPQSLPVFQHPSHALLKENNFTQQAYHKYHSRCLKERRRLGYGQSQEMNTLYRFWSFFLRENFNKSMYNEFRSLALEDAGNGFRYGLECLFRFFSYGLEKNEKLEVQPKLAEYLKSFKNIEDFRVVEPEINEMLQGVGSLNPGRQLNRHRSVSESDGTAVIAAGGRRLNTTITNRSDYVGRLLQQQHQQQQQQQHHQYQQGYGGYNQQQNRRRTGSFGSTTVRIRSGSLGNKPQVANRNQGSQHELRRGGSNSGLAPHKRQQQQKPKPGAGSQTGSTRATTSAAATATTAASAATSTAATPAVTVSSGSSSSKK

SEQ ID NO: 33613 - DNA, 2876 bp, DROSOPHILA
ccagtttacatcattttgaccgcagctgttctccaacaatctacggggcttcaagcccattgtctgtttgatttaccggtgaaatatagtagttgtacacgaaagcaggccaaactaaactcgtttcaagtcccaacattttcggttatcaatgcaaatgcgtggcgttgttgctcagcggtgggcaccaccgcaaaaaggcttacctgcagacaatgcgtgccacgcccccgcggcactcaacgcctctatatatggctatattcgccatggccgacggctgtgcttttgtttggaacttttcaggccggtgttacctgccactacctgcagttgcgtgtgggtgaataaatgctcgatgggtggggcctggcattctaccaaatcggtcggacctcgggcaattttagagttcttttattaccaacttgttagctgtttatttggcgcattattgactcaaccgctacccgaaaaccccaagcaattccagcactactaggcccagtgctcccggatccggatacggcgccgtgcgtttagataatcaactaaacacttcattattccgtccgttgggtggtgcaaattgcttccactcttccgcccactatttttacgtagaggggaatgtgcgaaaatcctctggtttatttcgcgcatttgccatgcacgcgtttttagctgctttcctccctttttttaattgaatgataaaacatcgctgcacagcctattccgattcgcagtgagaggcattaatttagattagcgaacgaaaagtgcgagttgaatgttctcaacaggctttctgtgtgtaaatagctgttgaaatccccagcccattgaattagattgcatgcattagatactgacacaacacctaaaggtaaggattgaatgattccctaattggtaaggataccattcatttttgagtaaaattaaataagtggcgataagattcgaataatggtattgtatttacccagcttacacttcaattgccaaatatagttccaactggatatatgataatctttctctcgccatttatgggcagggtttcatagtgataaccacgatgtatacaagcactatacttccttagctcgaatgcccgcttaatgggctccatatcgaccgtgaaacagttgatcttaaaggtatcgagtagattcatcatgccaattacatcgtaaacactcgaaacccgctcattccatatactaaccgatgcgattggtaggggatattcctttctatatatctgagtggcttcgaaaggggtgcgaaaaatatgcatggttataatgccagtgggtccatcgcccagaaatttgtgtggtatgtcccgcaccattatgggcgtggcatcgggtaagacacgatctgaaggacctattatagttttcggcctaagttcgtcaatcttcatcagagtgcgcttgtagcacggatgattggccaccctggcatccaagggtttcatcagaatttttactcggttttcgatttcttcggctaaagcttcttgtaccaagatcacggcaaccgcatctaaggcaaagggatcctgtagagattcgaccaggtgatgcagggcacaattgacatcgccatcctcgaagatgaccatcatgcagggtgcattccaagcgtactttacctcttcttccttcggctcctcagatacctcaattacctctttttcggattcagaaaccgcttccgatttctctgtattatcttccacctcattctcattcgatttttcttcgaaattaatatcttccgttgggggcttgattgcatcctcaataatatcgggaagtgttatcctaccgaccataacacttggcaggatttgcaccatttgtcgagttattaccgggctgatcattatgccagctataatttaaatagctatattgataatttcgaaggttgaaagtataaatttgaattcggttgtgaaataaaaacaaaagcacactgaagaacctcctgattctgacgcaccattaaaataatatattatggtttaagaccgccacaaattatgttgaatactacttgaaaattaaaagagtttatggggggaaataaatttaaaaacgaaaagtgattaaaatttgttaaagcgcgtacgtcctagaacaataaacataaataatcatttcaacggggctccattaaaattaatctatcagagccgaaaatgaacagcatatttcacaaaatttggactgagactcgggattttgcggaatatgattttgctatttttccacaataactggcctgtggcagcgaagaaaaccaaagccaagctgtcttgcttgacatgcctggggcaaataaatattaatgaaatgcatttcatcagcgataccaaattacaaaatgtgactccactcggagcagacctaaggccaagttaattcttgactggacttcagcaaatcttaaatgcaattacgctctagcatttgtcggaactgctttttggttttggcctgcagaagcagttaagctcaagttgacccattgtcaactaattgacaaatgaatgacttgatttgcttgacagcatttgattcgatgctgttgccaaaatcgcagccagctcctgaaactgagcacgagaacgagtctgagccaggacatgagcattttacactcattaagtttaattacatattttgctgggcattcgaggctgaagtgcctgcagttggatgaagattatctcagtcgagtggaacaatggagctgctttgtgtctgactaaattcaaaacctaataaaccgtctacactttggcagtgcggcatgaacactttgctgagcaatacaaatatgtagaatggaaa

SEQ ID NO: 33614 - DNA, 876 bp, DROSOPHILA
atggtgcaaatcctgccaagtgttatggtcggtaggataacacttcccgatattattgaggatgcaatcaagcccccaacggaagatattaatttcgaagaaaaatcgaatgagaatgaggtggaagataatacagagaaatcggaagcggtttctgaatccgaaaaagaggtaattgaggtatctgaggagccgaaggaagaagaggtaaagtacgcttggaatgcaccctgcatgatggtcatcttcgaggatggcgatgtcaattgtgccctgcatcacctggtcgaatctctacaggatccctttgccttagatgcggttgccgtgatcttggtacaagaagctttagccgaagaaatcgaaaaccgagtaaaaattctgatgaaacccttggatgccagggtggccaatcatccgtgctacaagcgcactctgatgaagattgacgaacttaggccgaaaactataataggtccttcagatcgtgtcttacccgatgccacgcccataatggtgcgggacataccacacaaatttctgggcgatggacccactggcattataaccatgcatatttttcgcacccctttcgaagccactcagatatatagaaaggaatatcccctaccaatcgcatcggttagtatatggaatgagcgggtttcgagtgtttacgatgtaattggcatgatgaatctactcgatacctttaagatcaactgtttcacggtcgatatggagcccattaagcgggcattcgagctaaggaagtatagtgcttgtatacatcgtggttatcactatgaaaccctgcccataaatggcgagagaaagattatcatatatccagttggaactatatttggcaattga

SEQ ID NO: 33615 - protein, 291 aa, DROSOPHILA
MVQILPSVMVGRITLPDIIEDAIKPPTEDINFEEKSNENEVEDNTEKSEAVSESEKEVIEVSEEPKEEEVKYAWNAPCMMVIFEDGDVNCALHHLVESLQDPFALDAVAVILVQEALAEEIENRVKILMKPLDARVANHPCYKRTLMKIDELRPKTIIGPSDRVLPDATPIMVRDIPHKFLGDGPTGIITMHIFRTPFEATQIYRKEYPLPIASVSIWNERVSSVYDVIGMMNLLDTFKINCFTVDMEPIKRAFELRKYSACIHRGYHYETLPINGERKIIIYPVGTIFGN

SEQ ID NO: 33616 - DNA, 2667 bp, DROSOPHILA
tgcatctgtgtgtgtgtgtggccattccgcccccatctactcactttccgcatatgtatgcatgagtgtgcccgagcggggggtgggcacttaaataatttagatttttgtgtctaacatgcacaagtgccaccccaatggcctaaaagattcaagtgcagccggcaaaagtgagtgacccagttagagagattggaggcagtgacatgaggatggagaagctgcagatggtggtggacatggactcggatgtgaatgtggatgcgcatctgcatggggaatggcgtggcagagcgacgatggcagttgcgggtgttgcaaccgggccattatcagcaaccaagtcgcgtcgctgttttggcgactgctccgctgccattatgcgctcattaaaatgtcaaataaattcaaatgcagaaaacatgatttttcgctttttgccacgtggtgcagagtgcgaagtgctaggtgcatgggagtttcgcacgtgcgaggtgtggatagcagttaacggtaaagatagtccgtgctgcatacttgctgagtgatttataatttatacgcgttacttgacgcgaactttgaactttgaaccgcgcacgttgcggcttggcaatgagaattctgaactttgaatgcagattgaaatatacttggaatctttaatgttaagcaacttcttttctagtaaaaatatgttagtttaatgcagcataacgttcttcttttggtttcttcctgctgggatgatatgagttttgggacaatttcgagtatttcctgtgctgaacgaattcaacttaggcaattaaaatgcactcatctattttgattaaaagccattcccattgtttagctacgtcttccggttggaaaatagtaaggaaatcgttaaattgcttgccaagtgtgatatataattattatgagcgttttcccccattgtttcggtttttattgctcgctcgccatttgtcctttgatcccaacgagccgtgaaatgccatctcatggtgcatttttgaaataaattcaagtgtgcacatccaaactcttgtgtgtgcagctctcagtaaaatcgtttccgtagttgtgggggaaaagagcattttcactgagcattgagtggcatttaattaatgttctcccttttcaactattcctgtctgctgtccaaaggagggataggtcattatatggctgtttacaactcctttcaggatatgcaataaaagcagttcatcaagaccttaaagctatctggttatattttgaaggagaaatgaataaaccactttttgaaggaatacaacttggtatttaaaagttctttcgttctaagcacttttccttcttccttttgcatcacagctcatctcgtggatggcaatgacaacctgttgcccatggtttctgcaccatcgagcattgataacgattacgtttacattgcttcggtgaataggaaatttccccagttcggaaattccatcgatgatgaacgagaggccgaggagcagccgcccgaggagaccacctatccgccacccgtttttgacttcggaatgcccaggaatattacaacccggacgggacacacggcggccatcaattgccgcgttgacaatctgggtgataaatcggtgagtgaatcagccggcaagtgattgcatttaccagcttatcattgaatagatttcgcctctaacgattttcattttaatgcatttttaagcaaaatatttggatcgtcagtcaagctgaaaatcaagttagcgataacttttcccatgcagttcctagctccccagtcacaactttcaacttacccgtcgcttttcccttatttcccggatcttggccacccttgttttgccggttcaatgagaaagtttctgccttccgctcaaaaccttcagtctggcctttgaccaatgtcgagtttactttgcgaactcgtcttgtattccctcagcttcaccccgtttttccttttctttaagctttttaagttccagggtattttgcattggattcctttgactaggactattttgtgtactggtttcaatcaaaacggactaacaaactggaggcgaacacttaagacattgattgcacagatgcgtctatattggggaagtgtttttgacaagtctttttttcgatattgttgtattgctttatgtaaaactttcatcttaatcatcttatatttttatagtacttaagctataagctctaaattatctcatttctaaaacgtgtcctttgcgttggtaattagaaatgggcttttgttaattttgaacccaagtgcgttccttgattccctttcctccgattccgagccatgcaatccttcgcaatcaccatccatctcgtgctcactagcgtagtctgatccagatttactatcgctcaccttgtgggtccatctattttccacgagctcatccgcgctgctcgtgttccctttcgccactttgacacttttagtttcgtttatatctcctgcctggttttcctcgttttcccgccttcattttaccattttaccatttttgttttgtggcggcttctgggcgatgcgaaaagttttgtttgcccgcggccgtctggaagattacttttttgcccggtgcagcagcggcaggttctcctttc

SEQ ID NO: 33617 - DNA, 309 bp, DROSOPHILA
atgccatctcatgctcatctcgtggatggcaatgacaacctgttgcccatggtttctgcaccatcgagcattgataacgattacgtttacattgcttcggtgaataggaaatttccccagttcggaaattccatcgatgatgaacgagaggccgaggagcagccgcccgaggagaccacctatccgccacccgtttttgacttcggaatgcccaggaatattacaacccggacgggacacacggcggccatcaattgccgcgttgacaatctgggtgataaatcggtgagtgaatcagccggcaagtga

SEQ ID NO: 33618 - protein, 102 aa, DROSOPHILA
MPSHAHLVDGNDNLLPMVSAPSSIDNDYVYIASVNRKFPQFGNSIDDEREAEEQPPEETTYPPPVFDFGMPRNITTRTGHTAAINCRVDNLGDKSVSESAGK

SEQ ID NO: 33619 - DNA, 3232 bp, DROSOPHILA
cagttcagttcctccccacacatttgtctctgtctgcggcagctgccgttgagcttttccacccaccaaccatcgaccagcgccaaccgcccatcgcccttttccaaccggaaaacccaatgccgatattagaaaagccacacgtacaaacatacacgtatactgtacgtatggggaacaacatttaatggcacgtcctaatacatcggccaatggcccagcgtctggctcacaataacaaccggctaacaacacttaaaatgtgtgtaaaatgcgagaccagcagcaaaagccaacagcttcatcgacaaacaatgggtcaatgaaatggccaaaagtcggcggtcggggcaagttgcccaaaaagccaaggccatcaggaaggtccaacaaatttttatgtgctagttttttcattaattttgctcggaaaaagaggcgtttgcttactataaaatttgttgttcaccagagaatgaaaatttgattcgatcaaacgctttttactacttccggggcatttagtatcaacaaaatcaaagtgctttagttttttaagagtcacaatcgataatattccaataaacaatacgcttttatgaagcgcataaatttaaatagtgaataggaaagtataagcttgtcagattaaatataaacctacagctattaaaaaaaatcttattggaaaaacataacaatatcaataattattatctttctatagaaattgattatcttgtgaaattaaatatcaagccttcaaattgagactcaactaatatgcatatagattggctgcaggtcagtctcagattttgtagattggcatagccataaacaatatgctcgtattgaaggcgaagctggttccagttaataacaggaggccactggctgaatcgactactcagtcgagcctcagtttacacagaaggtgctcattatcagtcgaaatctgggctgtctgccttgcagctccaaggtattccggtcaaacatggagctccacaagcagtacacaactgtgggggctagcatgtgtgctggaattgcaggcaattcaattcacccaattcaattcaactcgtctccaaccagcagccccaaccccaaaccctattcccattcccatcccaagctgaacccaatcaattgcgttccagtggaatttgcatttgccggacgcatgattagatgcagtggcccacccatacccgaccgaccaccacctaacctcatgagtggagcgtgttggagcgcctaggaatgctattaatcaattttgggctcgtttcattgcgttccgcggcgaatcgcagtaacgccgccagatgccaaggcgattattgccggaccgacggacctctatgtcaaagtgggcagcagcgtaacgctcacttgtcacgtgaagcagccggcgacgtcggcgcaggatattgggccaatttactggtatcgcggcccctacatcctcaccccattcgtggcccatccgaatgacgcggccatcgatttgcagcgcatctccatggagtccacgctggccgagaagctccagagcaggtgagccactgggtgcacaaaatagcacaataatgcatcgcatttacgggaatgtactatattattttaacgtacgagcaacttaggttagtgtggaaaaagtagctcatatttaagagtaacaagccctaaatgacttgctattactttttcttaagtttcttcatttaaatttgttgcaaaacgttttatattaaaaaagaagctcaaattgctcttaatttcttaagcatttaattgaacacatcgaattggttgttataatgattcaacaagcgattaagcgcgcaagtctcgagtgctggaatttttcctccagcttgccagccggaatgctgaaggggatttaacgtgccatcaggtgcgagattttccagttgcctcatggctggcatgccgagctttgatcgatgaagttgatttaatcgcaggagcaggagtgggcagcagggggatggtggcggcaaagttgacgcaattaagctgcacgtttgccttaagcttctctgtgctttggtttccatattttccagattacgcattgccaatgctcagctgctggacaccggaaactatacgtgcatgccgaccacagcggaagcggccagcgtggtggtcaatgtcatcaatggtaagagcggttcggactccgaactccggacttaaccaaatgtatctgctgcagccacacactttctgtttgtcttcctgttctgttctccatagacgaaagccccgcagcgatgcaaaagagcagggcgatccggaccagtggcagcatgcgtagcagtcgattggtcctcctcctggccatggtggccagttccgttgtgcgatggcttattggtggccaacgcatcgggagcaacagctgccatgattcctgctcgaatttatccactctgcatatcaattattgcaacctgcgtgcgaaaatcaccagccacttgaaggagcatcgatgtttgggccctggatcgacggtcgaatcatgataattaagtggtggccacttggaaatacaattataaaaaaaaaaaacatcttgtatataaaaaactgaattcatagttaagcataactcatttgtgtaaatctgagaaatctggggagatgatgggaaagccgctgtatgaaataattagtttatcgtactgcttcgccatcctaaactttattcatcgtttattacaacattataatgattgtgaaactttccaactgtctgcatttagtggtttcccatctggcatatactatgactatatttaatgctaatttttatgactagcgtaaatatttatgtaacaataaaaataaaaaatggtgcccatgtaattatcgaatgtaaaacgaaacgaaattacgaacgcgataacagacacaaagctgcattgcattgttagttttagaatgcaaatattattattattattattcgggttattttccgtttctgttattgcaattagctaattatgtttgtcactgtgaaagcacttgaaaaccaattgaattcaactcacattaatgcgacaggcgctggaaaataaaaactgtttcaaattgcattatcagccacataaaaagggccacaactaatttcacttcgatttagttatagattttcacatattccatgtgcaggacaaacgatttgtaaccg

SEQ ID NO: 33620 - DNA, 420 bp, DROSOPHILA
atggagctccacaagcagtacacaactgtgggggctagcatgttaacgccgccagatgccaaggcgattattgccggaccgacggacctctatgtcaaagtgggcagcagcgtaacgctcacttgtcacgtgaagcagccggcgacgtcggcgcaggatattgggccaatttactggtatcgcggcccctacatcctcaccccattcgtggcccatccgaatgacgcggccatcgatttgcagcgcatctccatggagtccacgctggccgagaagctccagagcagattacgcattgccaatgctcagctgctggacaccggaaactatacgtgcatgccgaccacagcggaagcggccagcgtggtggtcaatgtcatcaatggtaagagcggttcggactccgaactccggacttaa

SEQ ID NO: 33621 - protein, 139 aa, DROSOPHILA
MELHKQYTTVGASMLTPPDAKAIIAGPTDLYVKVGSSVTLTCHVKQPATSAQDIGPIYWYRGPYILTPFVAHPNDAAIDLQRISMESTLAEKLQSRLRIANAQLLDTGNYTCMPTTAEAASVVVNVINGKSGSDSELRT

SEQ ID NO: 33622 - DNA, 2306 bp, DROSOPHILA
acttacattcacgcagacaattcgtttatatagcctggcagggtatggataaaaaatgggaaatgggcgcgtaaatatgacagtaaccatcatatagatagcagaaaagttacttcctcagcgacgttattaaataataaaacggagaaatttacactcgattgcatgcatcattcgaggtcgatgctgcaccggggccaaagtggccaaaaggacgaggaccgggcattcatttcgccaaatgcaatttcaaccagaagaatgacgacgttcggaaaaaaaacagaggtgccgataatgaaagggccgaacaaagaaaaaaccgctaacaagcaattgaaaggtctaaaaacaaacgaaaactttgggcgaaaataaagcgttaaaatggggaaatggcgaatcgtatattaaaggctatttcactttgcagtcctgcgaaaaaatattgattaaaattgagcctgcctaaaaaaatggtaatgaaagaaataatttttaaaagcagctttaacactaagctacaaattaaacggactgtaataatcataaaaagaacataagagctaactacagaaaagtgcttcattttgaacatatattttgcaactattttacattattgtataaatacacattcgattttttatatttgcttaaataagtagatagattgttggtaagtagtgtacgtagcttggtgttatataaaaaatgaattgttaaaactgtcgctacacataaattacttattcaacaaattaatgcattatattaaaaatctgtcaagattcaaacgacccaataaaataattttacatattgaggtgcaattttcaattgctcgataagaatgcaaatggcaggcaatgatttctattggttatttttcagctgcttttaaagtttcaatgcaaatcaagaacagctgttggaacttaaatgaacagctagtagcttagatggcgcttattagctcagttgcctgctatttgtcgccatgaacacagcgaccacaattgccatcggattgttaatgttcatcccactgatcctgatgcagctggaccctcaaatagccaactggtcggctcaaatagcactggagcttcaggagcagccggacaagttggcctattgtcgttcgcttcagcaacagaagctgcgaataccgctccaaaacactggatgtgccaccattctgagcaaccagctcggcgtgacaggtgaaatgctactcgagattcaaaagcgttgctgggccggatggggtctcctggcaggacgatgtcgcaagttggcctagactttaaggtgattcgaaatatcccaaaaccttgtagctaactgaaataaagaacacaatggcaggcaacatatgtatagccgtgatttttgagttgatctcgagttcgccgtgccataaaacccaagcatccatcatagattcgtgttaaccctaatcaaggattggttcgttatgttatgtatacgtcatgttggctcgccccagcgcctcaggcaaatgacaacaatggtagccggatgaagctgaaggaaagttgtcggccatttttgtttatcaaccttccgtatggaaaaagtgtccaaaggagtcaatcaacttccgctttggcattgcccttttttgttgccagttagttcatggatttcatcctttgcttgtccgcctggttgccatcgccactaaaacaccaaaataccgagtgtcaatcggacaaaaccggcaacggcaacttggcgcccctttagacagcaaattatgagtagtttcgtcgaacgatgagtgaatttaatacttgctgaaagtttttagaatcaagttaaatcctggtgctgagatgggtaatgaaaaagtctgaaaagtatgccagatagtataaatagttgagcagttggtaactcatttcatattacaaagattttcatagtaaatatagttttaaaattccaaaccaacttatttttgatacaaacttcctaaaacgataagtaatttgatacttagtatgtataactatcattttttggaacgcatcatggccagtttgctgacacaggtgaacaattgtgcaacatttaatttagcactatctgcagtgacatgcttgcttgttctattttggcaactttaaacagtttccattgcgaaaggactcattcttctgctcagccactaacgaagcagaacggcgaatagttacgcaaaattgccgacgaccgcgcgttgttacgcgccacgtgttcccacaaagttgccatcgccatcgtcatcagaatcggaa

SEQ ID NO: 33623 - DNA, 306 bp, DROSOPHILA
atgaacacagcgaccacaattgccatcggattgttaatgttcatcccactgatcctgatgcagctggaccctcaaatagccaactggtcggctcaaatagcactggagcttcaggagcagccggacaagttggcctattgtcgttcgcttcagcaacagaagctgcgaataccgctccaaaacactggatgtgccaccattctgagcaaccagctcggcgtgacaggtgaaatgctactcgagattcaaaagcgttgctgggccggatggggtctcctggcaggacgatgtcgcaagttggcctag

SEQ ID NO: 33624 - protein, 101 aa, DROSOPHILA
MNTATTIAIGLLMFIPLILMQLDPQIANWSAQIALELQEQPDKLAYCRSLQQQKLRIPLQNTGCATILSNQLGVTGEMLLEIQKRCWAGWGLLAGRCRKLA

SEQ ID NO: 33625 - DNA, 2812 bp, DROSOPHILA
ctgcgaaaacaagtggcgatgaggtgtctatcagcgagcaaagtgaactcaaacactttatagattgtctgggtttctgcagtcagattatgacttcagtattccctgcttcgcaccaatgaaaatattagctaatctgcttatcttgctacgatataactatacttataatttaccttattatattgagaactaggcttaggcagatttgaagttataactacacttcctaaactttctaccatatgtatgtgtgttttttggcttatttacttgtaaagtataaaagcatactacactcattgatgagaaaataatcttaagctccgcacactgtacccacaactagagtgttcaatctttgaaggtttgaattcctggaactcgtctgatagccacaaggtgtgcacaagtattttcctggcagaattctcaaggaaagacaatctaccttctggcggccaattaactaatataaccctgcggtctgccaatggcatcgccaacaattactgacaattaggcgcggcacgatattgaatgttcacccctcatcacaaaaagatttcactaagggccaaaacctgcgaatattacgcccccgagatatttggggcttactaataatgacgagctaattaaaaaggggaggttcggtaaaggataagacagtccaagaaaggataaggtattattgcttacaggtattaatattagcttttgagatgggttgttagattcgtcgaaaaaaaatgcaacaggtagaatgaacacatctagtatatatatttttgataaggataactagccatgtttgtccgtctgtatgaacgtcaatatctcgcaaactaaatcgaagaacaaagtttgctttgcctaaacaattcatttatgtcatataggtgatactttctagtttaaatctaaaagcgagttcatcatggtatcgaaagcaatcaatattcttaggcgcgagtttaggcccattgttctaaagtatatgcagtacttcgtgatgtcgtactactttatggaggttttgtattcagtggtcaacacaccacttgtgggcagggaaagagcgattgtgatggacgtgaacgagtgcttcggtcacttctacacatgctttgatgtcctgctgaccatcggcgccatctttctcattctcggcacgcgaaaggaggcgagcggagtgactctgctgctaatcggaagagttatccaccggctgttcttctcgatatggaccatgttcttttatttcctcttcaacgacagcttggatgtgggctccctgctgctgctaatggcggccaaaatcaatttgagggatcagatggactggttccagtcgaaatatcatattttactgctgggaggaagactctgtctgtccagtttgtacatcatttggatagacgagggcttggaggtaagttgcacaattacttattacaaatgattaattaagtttacataattttccagacccttttcagcatcgtttcatttggtcttttggttttcatttggcttggctttcattgcaaactgtttgcctatctgacggtgattgccctactatatcacgatgtgtttagcaatcattggagcatgttgtggggctggaacgatactctgctgtcgatacaatacttctccctgctgttctgcaaaattggcggattcctgatgctctcggagctaggtggaggcaggtggtcggtggatggataccggaagagaagtggcgagaaatgggagaaaaaaggcaactaccggatcattaagacacagacgtcggcctagtaatccttatccatcggattgcttaacgtccattcgacatttaagggatttgcataaactttaatgggaaacactctcccagcgtctaatgctttctttttttttttattttatatctctatttgtacacctgccccttggcaacggagaggccactccaaatgctctttgattcgcgcctcagccaacgtaaattattaaaaagtctcgagttgcgtttaagcggctttaccatccactcaaagatttttttcccgttgcaaactaacatacatacatacaatgccgtaaaattcttaaatgtgaaaaaggcagcaagaaaatgtgattcggtggcaccctcgagcaccgaagcaaagatactctacacgcaactggcattcagttgggaccggtcactactaggtcctgagcggattaagtaaatgcacaaggacccttttcggcagtaaaaaacgttccattactttaatccctgtcgcaaacgtcttcacttaattattgtgactttggcccgaccatcaagggccaaggagtcgagggccaggacgcgggagccaggagccgacttaaaaggcaacactgccgttaatgagtttctggaagcggatcaccagagcggggggagatgccaaccaggcatgcattcgagaaccgcaaaagacgcagtgaccttcgctcttggctgaaaatccatttgcataagcgcttgctggatgggagggggcagtctcccgagaagcttccaacgacatgtgtatgcaccccctctctcctctccagttgaacaggccagaaaaagggggaaagactcccattctccccatcctttgctatcatttcactttatttttacttacccgcaatgcgttactcttaattggaaagcagttgcgttttcgccgttaagatccgaaccttaaaagtaattgacagtacgataaacaagtaagcggccagttccgagaaaagcggataatctgaatccgacaataaaagg

SEQ ID NO: 33626 - DNA, 756 bp, DROSOPHILA
atgcagtacttcgtgatgtcgtactactttatggaggttttgtattcagtggtcaacacaccacttgtgggcagggaaagagcgattgtgatggacgtgaacgagtgcttcggtcacttctacacatgctttgatgtcctgctgaccatcggcgccatctttctcattctcggcacgcgaaaggaggcgagcggagtgactctgctgctaatcggaagagttatccaccggctgttcttctcgatatggaccatgttcttttatttcctcttcaacgacagcttggatgtgggctccctgctgctgctaatggcggccaaaatcaatttgagggatcagatggactggttccagtcgaaatatcatattttactgctgggaggaagactctgtctgtccagtttgtacatcatttggatagacgagggcttggagacccttttcagcatcgtttcatttggtcttttggttttcatttggcttggctttcattgcaaactgtttgcctatctgacggtgattgccctactatatcacgatgtgtttagcaatcattggagcatgttgtggggctggaacgatactctgctgtcgatacaatacttctccctgctgttctgcaaaattggcggattcctgatgctctcggagctaggtggaggcaggtggtcggtggatggataccggaagagaagtggcgagaaatgggagaaaaaaggcaactaccggatcattaagacacagacgtcggcctag

SEQ ID NO: 33627 - protein, 251 aa, DROSOPHILA
MQYFVMSYYFMEVLYSVVNTPLVGRERAIVMDVNECFGHFYTCFDVLLTIGAIFLILGTRKEASGVTLLLIGRVIHRLFFSIWTMFFYFLFNDSLDVGSLLLLMAAKINLRDQMDWFQSKYHILLLGGRLCLSSLYIIWIDEGLETLFSIVSFGLLVFIWLGFHCKLFAYLTVIALLYHDVFSNHWSMLWGWNDTLLSIQYFSLLFCKIGGFLMLSELGGGRWSVDGYRKRSGEKWEKKGNYRIIKTQTSA

SEQ ID NO: 33628 - DNA, 2411 bp, DROSOPHILA
ttacatgcctcatttggcagcgccttgaagagtctgcttattatattttgattattttcggcacgcgtgtttcgcaggacctcaaagccaggatctccgcgtcgagagctgtaaacaaattcgtgaaatacgcagactggtcaaggggcggatgtcgatttgcaaggacgaggaggataaacaggacagctgggttttttttttttttgttttttgtttcggttgcataatttttcattttatttttggactcgtttggcctgcttttgtccataatgagatatctctatcctcctttgtttcttttcatcattttgtccattgtgtttcggtgcttgttgtttttgcatttcgcgaaatgccgctgggaaattcttgtaaccaacaaaaaaaaaggagcaaaaatccactgggctcaaatggcaatgatggcgtcgaggtggtcttattaattaggacacgcgccctgagttgtatatattcccaaatattctccacttcaaatatacacgtgaacctcaaaagggaccgctgttattgttatttaaatgcatggcaagattctctttcagaaagcttcccttgattgccaaattttgattagcatataaatgcagaagggacaaaaagaaactatatctttgtgccgttaactcgtggaaaattttaaacttcaacacattcttgtccactaaaaagagatagtacgaaaaataactatttgaatgatagtttacaatgcttctgctatcatctactcgtaatgcatttcggcttaaacaatttttgaatgtaatgatctatttccttttttaactacagtctttttgttttttctcgagtattcagtggacgccagcaacacatatttaccaatcataagtaggtagctagaaactgttcggatttaaggaacaaatttattgctaagttaaatcaaatactgctccacgtagaaaaccacaaactcctttcaacggcgtaactacactgtgcagcaatgtccagatcggcaaagggctttggtcgtttaatcaatccgggcgtggtactccatccggaactgcatcaaaagatggccgactttgaggccatgaccatcgagcgatctgatttggatcacgaattgagccgattgcgcaagcagcaggacgataccgaggataatttggcagaggcgctggccgaggacgagttccagtgcaatttgagtggccagccattcgttgctcccaacgaggacgagctgcaggaaattctgaggaatcacctcggtagcattatcaacaagctggctgccacgtacgagcgccttatttacctggatgcggacatcaggaagctgaagggagtcattgaaaaggccatcacagtggctaatgaggaatcggcagcagccgcctcaatgtgaagatatgtatttaaccattacatacgttgtacttctacatatgtgtatcttgaaaatttcagttcgatttaatgtgcaagtaaagtttgcaagtatgttaaatgattcgaaattgcaagggctatgtaaacatgtatttgtattctccagctttgccatatgtacccgtgtgccgtcgataatcagtaaaatatgtgttacttttggataatgaagtccacgttcgatgcaacgcgaaatccattcacacattccgctggacatcttaaatcattttgggtgaaattaaagccgcaacaatctcatttccggtaattctttatgcactcgcgcacagacaatccaatgcgagccagaagacactgcaaatttaattgcgtatacgcaatgttgccactgccgtcgcggaaacagcatccgctgcggcagcagctacactctgctgactctatcgttaagtgcataaattcaataatgccgagcgtctggcggtgtcaacgcgctgcaaatatatagactcgccggatcgataaagctgaagcttgaaaatttatggaatttcctgtgcattgaaaatggtcgccatttactgaatatatttaagtaaactacagctcaaaacaaaaatgcatatgttatatattgactttacataaaaccccaaaatgtttagaaacataagaaattaattctacttggataaagttaaacttaaacaattctataccaaactgtaactttaattgccaaggggaccacaaaatggtctgcgcttacatgtataaggatgcaattgcatatttgttgttactttgctttggttaaacattaatagtcggagaattgagaaggaagtcgaggtatatttgaagaaagccagacttatgggccctgtcctgtactctaattaattaaattgaagcgttcgacgacgaggtaacaatttcaattttattcccgtgccagccagactggtcaaacaagccaaatgcaaatttcc

SEQ ID NO: 33629 - DNA, 411 bp, DROSOPHILA
atgtccagatcggcaaagggctttggtcgtttaatcaatccgggcgtggtactccatccggaactgcatcaaaagatggccgactttgaggccatgaccatcgagcgatctgatttggatcacgaattgagccgattgcgcaagcagcaggacgataccgaggataatttggcagaggcgctggccgaggacgagttccagtgcaatttgagtggccagccattcgttgctcccaacgaggacgagctgcaggaaattctgaggaatcacctcggtagcattatcaacaagctggctgccacgtacgagcgccttatttacctggatgcggacatcaggaagctgaagggagtcattgaaaaggccatcacagtggctaatgaggaatcggcagcagccgcctcaatgtga

SEQ ID NO: 33630 - protein, 136 aa, DROSOPHILA
MSRSAKGFGRLINPGVVLHPELHQKMADFEAMTIERSDLDHELSRLRKQQDDTEDNLAEALAEDEFQCNLSGQPFVAPNEDELQEILRNHLGSIINKLAATYERLIYLDADIRKLKGVIEKAITVANEESAAAASM

SEQ ID NO: 33631 - DNA, 2424 bp, DROSOPHILA
tcctagacatcttaagaccgcgcttccgtcttgctgtctatctgtcagtttaagaaaatttcaatgagaaagaactcacttttcaccttatcatgtttagctgacaaattacgaaaggttgacaagcccgcatgaggtaatgcactggaaaaaatttaagctttacttgttacaatttaccgaaataccatgctatctcaacatattaaacaaacttttgagtaaagcttaacttgccttaaataatgactttaaatccagttgttttctctcagtgtacttgcaaattgacttggcatcgccattgatgaaccccgcccatcgatgtgggcatattctcactgtcaacggaataatcagccaggcgggctgacatgttaagtcagtgtgtgtcgtcaggatcgacatcttaatagcccaacaacccgccaagccgactgcgaactcaccctacaccctgcaccctacgccccgtcgtgtggggcatacacccgttttgcttggcaaattacacgtctcggatttgaatgcttcggttatttccttttgtttttggccagctttctgtttgtttgtttatttgtgtgttgtgtcttgtggcattagtttaaattaatatcgggccaaaaaggtatggtaggcaacccagcccgcatgcacaatcacatcgaaatcccctcttgtcttactcacttggctttgggttaactaactaacgatggcgaggaggtgggtgggggcgattggagcaatagcccaaaattaaaatgccttggcagataaacattaattgttgactaaaccaggacaatttttgcggcacctggggctgagctgttggcttaaggaaaagcagaggattaaagcaagactgactggctgacagctaggtgatgtgctgatttcatttcaagatttatttcttggttgttagttaatagattccaaaaggtaaatgtttcttacaatgaatcagagcttaaaaacaagaagctgttactcaatctccattgccaacaaacgcatcctgcagaaaatcaccaaatgcatcttcatccatgagtcccatttcatccaggagccacttctcgtggtcaatgccccgcaattcacacacgaccttgaagattaattcctccttttgggtgtaataatcgggcgaatcaaatttggttgccagcaaatcggcttcccgtttgaattgtaagagcttgtcatgacggttttggccgtcatcattgcgttcctcggctgacttaagggtgagcatggccagaaattccgagagttgagactgtgggcgagaagtcgaccaattagctactaacatcgttaatcggatctgaacctaccacattcgatgggctaccacccagtaggttatcatcgtgggcaaactcgaccgcatattgtagaccatccatggctgtgatttcaatttggcatacggattcgtcgctggtctggggtaaactgtcttcgatgttggagcttcgggctcgcctgcaatttgtttacattatggatggtgtgagttgattcgcttcgctcatattatgaacatgtaccagtaccagtacgaagccctttccctgaggcttcctatgtggggcttacttgtttattttcgttgccactcatcgatgtcgcaccgaccccctgaatttcccccgcaagctgcgttagaagtttagcgtttcgacacgtaatcaaaacagaagcgattattcagctggaaagtgtttggcaaatcaaacattaagatttcggttagtaagctaaaacaaaaaaaggtaattaaatgttaagtccaactcagagcacgagcagcaaagttttgccaataaatatacaaatcaaatgatgttgcaacttataaatgactttataatatgagtctttaactgtttatatcccttttattcgttttagtctaagcatcagtaaaactcactacgccgtaaacttagtatgaaaaacttattttctataataccactttaccctacaaaagcaaggatatcttttctgggaatacaaaataccctgcaatgaaaaaacaattgtaattgtctcttaactcagctttacttaccaatttgtttgatgcttccaggaatttgtcaaaaaaaaaaaaaaatcacatttgtcagctcgcggggaatataaacaaacgaatgagaaagtcaagctataaatcagaatcaaattgggcacacttgaggaacatatttatctggttgaattttgatttttcgcatcgggtagcaagttgaatggcaaacaaaagtttggaaaagctaccgtaaacgagcttcatgctcaagctgctacagtgaaaagtaaataaaatggatatggccacgtgaaattcaagccagccagtcagtgtaaacagaatcagaaaataaaacgatagcatcg

SEQ ID NO: 33632 - DNA, 366 bp, DROSOPHILA
atggatggtctacaatatgcggtcgagtttgcccacgatgataacctactgggtggtagcccatcgaatgtgtctcaactctcggaatttctggccatgctcacccttaagtcagccgaggaacgcaatgatgacggccaaaaccgtcatgacaagctcttacaattcaaacgggaagccgatttgctggcaaccaaatttgattcgcccgattattacacccaaaaggaggaattaatcttcaaggtcgtgtgtgaattgcggggcattgaccacgagaagtggctcctggatgaaatgggactcatggatgaagatgcatttggtgattttctgcaggatgcgtttgttggcaatggagattga

SEQ ID NO: 33633 - protein, 121 aa, DROSOPHILA
MDGLQYAVEFAHDDNLLGGSPSNVSQLSEFLAMLTLKSAEERNDDGQNRHDKLLQFKREADLLATKFDSPDYYTQKEELIFKVVCELRGIDHEKWLLDEMGLMDEDAFGDFLQDAFVGNGD

SEQ ID NO: 33634 - DNA, 2417 bp, DROSOPHILA
tcaatgcttgtctgccgtttggctcagcacgtttggtccatctttttaacttgatttttgtgctgccaaatggcggcgacagctgtgggtataccatgttctataaatccaattaatcgggatatccctaggaatttgggcatcgccactatcccaaaattcggcagcacgttccatgacttttattagtttcactttttttcgccgagaatttatggcgatttttgtatatctatgcaaatgttttttatacggctgtatgtgtggttgggtataaaaatatttatttgtttacttgccgtattgctgtccaattattaacaattacacagttttcaagtttgaatttcaaatggcgctataagaactggtaaaagatacaattagggaaatttcagtcaaccaaatgagttattcattttaattatattgagtaaattacatatcaattacagcattttttttagtttttattcggacagcaatttaattggttaaaatcctgtttacttttctctacattcgtttgcattgtaaaagtgccggagtgtgtcatctgttgattaaattatatacgtatgtatgtatctatttgtaagcaaacactgacgtcattcgcattctaattccaaacgaaatgaaaatatttaaataaaaaataaactttgccacgtgctgcactcgaatgcaatcggaagtcacgtaccatgctgactcaaagtttgcaacgcaaatagtgaaagtgctgcgaaatctaaaattaaataaagctcgtaatttgacaaagttattaataagatagcttcgccggcgtttcagatacttctgcttcagcgcattacgttacaatcgagcaaagctgaaaaatgaaatacgaaccaacgatcacacagcacgtagaaatgtttgaagttttgtggcgatttcagttcaaaaccaaatttgctgcagatcggacgcaaagttttcaaacggacttcaaaggatatatattcataaaatgagtaacctgggatcaatactgctccttctgctcatcatctgtatcgaacgctcgcgacagcaacgcttctcgcatcccgaatcctggacggataatgggatttacgttcccggttcggaggacgacctggactggacgggcgccaattggcagctggtggtccgctttctgatgcagcgccagcagctgcgtttctgcatcgcactggccagattcgatgagcaattggtgcccggcacagcctgccaggctcttttggccaacggcccgcttatggccaactgcgatattggcaacatcgaggatctgaccatgaccttgcgctatgccttcggcgaaattctgctggacacaagtcgaaaatgccgtcctggcttggagctattcggagttcgctgcaggcggagggcataacctggggaaaggttttattaaatattttaactttaattttaaaaatactagtacagtttcaacaatgccaaacaatttttttagttacccttttctctgcaaaagttgtctaagttcgttctaattttatggcacttaaatactttggataactgctattatttctaattatcatcgatgtatttttgtgtgcagatacgacagtaagccaagtgttgccagaaataactgcattagtttgtcgctaataaattagtaactaatggaaaatcgtaacatttttgctagctgctgaaactactaattgttcccatttccaaatcgcctcctaagtgcattgctaattcactttatcgagcaatttttcatcgtctgccctgtgctgtcccttgtcatttcaatatgtcaataaaaatcagaatgtaacactaccaccactgcccatcccctgatatatattcgtttccattggaaactgggtgaaggactgagtccgagtggcgagtccttgccgagtgcactgcctccctgacaaatgacgattataatttgtaaaatgcgcccatcttgttgttccccttcagatcctcagaggtccccagatccccagttgcttgtcgcatccccgatatgttcgacttgtggcctagatgttgctgtccggccattttcgccccattcccaggcattttcactctcggattcagtttagttcatcgcaattgttgttgcaattagcagatgcgatgggcgggcattttccgggcggtaatataagcacaactgatggtttgaatggagaaaattgcacagcgcaaatggccgatagccgtgggtggataaagtcgtacgagtattgttgcatttggcaattaccggcaaatgtttaggagcaagctgtgttttccatgcagagttttccaatttcaatcggagctgtgatatctttttcaatcgatttgcaagacatcttcgaatagaaaaaactgtgacacactcc

SEQ ID NO: 33635 - DNA, 417 bp, DROSOPHILA
atgagtaacctgggatcaatactgctccttctgctcatcatctgtatcgaacgctcgcgacagcaacgcttctcgcatcccgaatcctggacggataatgggatttacgttcccggttcggaggacgacctggactggacgggcgccaattggcagctggtggtccgctttctgatgcagcgccagcagctgcgtttctgcatcgcactggccagattcgatgagcaattggtgcccggcacagcctgccaggctcttttggccaacggcccgcttatggccaactgcgatattggcaacatcgaggatctgaccatgaccttgcgctatgccttcggcgaaattctgctggacacaagtcgaaaatgccgtcctggcttggagctattcggagttcgctgcaggcggagggcataa

SEQ ID NO: 33636 - protein, 138 aa, DROSOPHILA
MSNLGSILLLLLIICIERSRQQRFSHPESWTDNGIYVPGSEDDLDWTGANWQLVVRFLMQRQQLRFCIALARFDEQLVPGTACQALLANGPLMANCDIGNIEDLTMTLRYAFGEILLDTSRKCRPGLELFGVRCRRRA

SEQ ID NO: 33637 - DNA, 14358 bp, DROSOPHILA
attttaagcgcccaaagccgccggctagcatttcgtttcgtttttgcccacttgccacgttcgctccatgtttgtttttggctggaagaacagtggcccaaagggagccaatgtcggtatagagttaatttccctccaaactacagcgacaagtttattttggcccgttgtttggccatccactgcatgctttggggctactgcggttgtggatcggaatttccctgagtgtgtgttttattggggataaatagacagacgattgcttaaagtgtctatgtgaatgaacagttattcggatggaaaattacatttattaatacatatttattgctggtattagtttatatggtgctatagtgaacagaagttaatgttctcacataactatctctatatatgacttccgtttccattcaccacatttctcatttcattgacactgaacaagtttaagtcattcttgctgccttgctccgatcattttgtaatttccccttctttcgatggaacaaaaactagctgcatagtttcgaatatttttcctcgtgcactggagatgaaaaactgctcgacgaatgcgaaagaaaaaccaaatgtaaagcaagtcacagtcacagcttgcgacattgccaatgttgttgctaaattgttaaataaatcaaaatccgaatcacaggaaccagaccctcaagctaaactggcacgccaagtgccaattgaaggggaatcaccggatggtttggggtcgtttgggtggttttgggtggttttgggtggcttgccagatgggcggatgggtggttgcagtgggagacgactgttattgatgtgcttttaattgaggcttgtgtgtcgtgtctgctgcatgttgctgtcagctttcagtgccccgatcctccgcaattggcatttggacaccccccccccaaccaccctcttgcactgtcgtttatccagccatttggctcataacgaaattttattagtttttcagttttcaacacttaccggcagtcgacgtgttggccatgcaaatggtcaacatcagaatagcaagactgatggacccatggattcccagcggattccccaagtccgttcgccttcgacgacctcgtcgctgttggttattattgcattttttcctagacatctgcagatctgtaccggaatccttccgatggaattcggggctgactctcagctggaatgcctccgaatgcttctctgttctgtgcattctgttcctgcaaggccagatgcaaagcgaaatggttaattaaatacttaaaatttgaattattaagcttgaatttatcggctaaatgccatgcattgccaaagttttattgattttccgtaatttatgcaaagtctgttgcatcagccaaaaagtttcagtaccaaaaaaatgtcagactaatttgctataagtttctggcgaaagtttataaggaaaagggagagatgcaaatagtattaattgaaaaaaaattggatagtagaatttgacaagtgaccccgaaaataaagcttaagaggaagctcaacataatttataacacatttaaacatcataatatggtggaatcacttttaaagttggcaagctgttaaattggatttcttcactctgaattgtgattaaatcaactttgttaaaacagcacaaagcgcacattaatttaaacgattcaagcttcagccaatcgaaaccgaaaaatttgcatccatcaacatttcgcattcttaaaaacgttcgactaacacaataaagatgttaaatattttatgataagtgatttatatcgaacatgccatgaatatttcatgccaacataatttggttaacggttaacatttttagtgacaagaggtatgcgaaatgcctaatttgataaaacgttttttttttttcaatcagattggacttccataaaattacaagaatttgccatttgtcagccaagaaattagccggagcatttggctttatgtaaatcaacaaagagcgtatccgccagatacattagctaaatcagataaataaaatctattagtgcgcaactgaaaactgtgaatcgaattccggcgacggctagaacaatgcaaaatgctgtacaatttgaggcaaattaaatattaattagtgtggcgtgtgtataaaagttaattaatgttttttacgccctaggtgttaataaggtgtgtttttttttttttgcccactggcgccccgtcttttatttctgggcgttgaaaatagctgttgatttacggataattaagcagatagtaaagttatgcaaataaataaatatttaatcaatcaatcggggtgtgtgaaacaatgtggaagtgtaacaatccatcagatatacatctaattagttagtttaaatgattatatgttggtatgtgtatatatttactaatcacatattccgagagtttattgtatcgtttgattattggatatatatgggattttgttcatttcacaattcgactgttctcggaacacataccttttttgcttcccaaaaaatttatttgttctccaaatctaagatatttaaattagtattgttgaaattagccacagcgaataatttgtgaacatgtctaggaactatggtaggttgaagtcttaattttctacggacaatgcgcatatcctttcagtattttgtaaggacctggacctggagcctacatgctacccagcagttttggacaaaaaggacctcagttctccttcggccgcagaattgaccgcaaaagagatgaaaaacctggtccgggtcctgctgcttataaggtggataaagtgacacgctacggaaacgcggagggtccacagttttccatgtatgttaggaactccaagatgaaaccccttcccattcgattgtcttgaagattcgatcctgattccgtatttagtaatgaagtttctaaaacagtcgatattgtgatgtacatacatagcggcgaaatatgcaagtaaatctataaatatttatataaaaactttgaacatatcctttagccggttgtccactcaattcgcccgcattgcatttccaatttgcttcaattaatgcccaagacattgatgcacaatttccattcaaatcgatgccatggcaacggggattgctaatcgcccttaactcggcaattaattcgacgacatattcaattcgaatggagatgggtgatgggcaatggatggaccaaatgcaaatcggcggcgggggtggagaatcgggaaatggtaataatgacagtctgtggtagctggtggcatgagaattgatacacaatgcggcgacaaccacttgttggacctgttggaagagcctttggtcaggacactacttctcatcacttcaggacgagagcttagatgagggcacttcagctgttggtcggctttgtgaatgtgcccgagtggacagaaggactggtggaactgtaatgaagccgccggcctaagtaactcactttgcagtccaggccagtcgtctactgagtgactgaaccgcgccaaaggagcagcttctggcatctaagcgaaagcctgttattttcctcgctgcctgtaataatcacacagtaaacaggcagcggtcagaagacttgactggggtggggatggcctggatacactgagaaaaatgtctgctgtttgttacattaaacaaattacatgctaacttcatattattaaattatattttggtcaatgaatgaatttagcttttcaacttgattttacatttgaatttgaatgtattttggcaatctaaagttattatatgcaatcttttatcttttctctccctgtactggacttcggcgtgggaatggccaacagaaagccaaagaaaggaaagggctttggactaactgagtgcgccagaggagtaggcccctctagctcctcctgctccttcttctcccatctgaccagttgtaattgcaacgtcaacgtaaatgcatggcacatgcagcagcgactcaggaatttcacggatgtgcgatgtgcgtgcattttgcagatgctcgagctgaccgccgcttggacatcacgtattcgcacagacacacggacgcacagacaacggaccgcatttgattgcattttcgctgctccagaacgcggatgagcccgggggtagtggggcaaacggagtagcttgggaactctgggacttgggaactggacgcactgccctcgatccactcctcgtgctcaagatttatctgtgcgcgtttattttaatgttacgttctggcatctttgctcaattttgcctgccgcatacccttcaccaaaggtattctacctggtagccagaattgaaaaacaaattataaatatatcttctcttcattcaggattaaattatgaaacatttatgaaattaagattccctattaaagaatcgaaacaaaaacttccatctcaagtgaagtgacaaacatttacataaaacatgtcacgtttgtgtaaattgtttaaagtctaattaagatgtcaatctccttcagttgaatctattgattgtgcaactatcacagcactcaagtgcatctaatcttcgccagacggacttctggctgggactttcgtctgcttaagcagcctctttcgatgcattgcccattggctggatgtctttgtgtttatggagccatgtccgcaggttgccatcttcatctggccatcagcagcaccatcatcatcatcaaccgaatcactagaagcgggagcaggagcagaagctgatgcagaagctgcatcctcgatggcgtgccattcctgaacgtggtacgttgaccgctcggaatgttgattcatcttcttgggcataactgctgccagtttgcacggactactctctgttttattttcctattttcacaactccacttgctcttttatgtcaatcagcagtttggcatccagctcctcggctggctgctacacgtttatgggccatcattgtggccatcgagacggttggaaaaatggttgcgtctatttttagtggaacacatgcgtcgctttcgcctgctctattctattcctgaccgaccagcactcgttcatactcgttcagtatgttagatccccaggcgggtctctattatccccatattgccataataagcgaagattgcccttaagtggctggcggggattgggcgagtactcgccagtgcattcttctttatttttagcacgatctcggcctgtctgggcctgttacatgaataattgccagttaggcttacaggcccacatgatcgccatggataattgtaaatgggcatagaacttaattgcatttaaatgccgacaggtgtgggtactgcacaaaatcagcgcatgagaattctggcaaattaaaggcttccgaagtagcaactacattgtaagccaatacatttcattagaaccaattaaagtagggaattatttaaaattggattttacaaaatgtaaattctacgaattgaatgaatatcgcagatatttcttgtgccaaagatgttctttttacaaaacgtaaagaggaattcctgagttgattcttattcctcagaaccttttaattcagaaccttaggcttctgagagtaagatgttatattttaatattattttggcaatattcatgggaaacccgtaaaaggaaatcatgcacgacttgccagcctttgcttaatattcgtctcaccggaatccattcggctgactgtcattagcaattcgggcaatcaatgaacaaaagataatgttaatttgacagcccccggcaattgattcccagccaactgacaaacgcacaggccgcactgcctgattgaagggtcattagagggttaaaggaagtcggagcagcgggctgacctcacacgcatttcgatttgtttatgccatttccgattttaattgatattactgaattgggctggtgtgtgtttttcgtataacctccccttgataaaccataatcgaccctgttccacgcacgtgacttgtttaagtgatagcttaaaatgtaatttcgcgtatttaatgtgcttgccaaaattggggaaaattgcgagctaatcacaacaaataaaacgattaatatgaaataatttcatttcgttagctgacccagttaacgtgtggaatcatcgagaacttcctggtcgaaagattcattttcaccatgctcgcctttattcagctttttttttgcattaactttaaacgattaccttaactttgctcatccgaaatgagccacataaagctgcagtaagtcatcgtcggtcagcttaaactaagctatcacattaaaagttttcaggaatttaagaccatttaatgtaagtcaaaaagtcaataaacccaaacgctcgacttcttcctgctgctcagcgaaaaataaaccaaaaaaacaaaaaacaaaaaaaaaagcaagacaagaaaacaaaagtggagcaacaaaaacctgtcacgttcgacaaaagtgcattcacattttgaaagtccaagcgggagtgggaacttggaatgtatcttcgatgaagcatccacccttgttccgccaccagattcagatacatttctatcttaaagccgccgcatcccgacaactttcgtggttggcccaagacaaattcggccaattacttcattattgaggttgaggttttctggttttgggtctgggttttcttggccacctcccatttttttggggtcctttctcggctgtctggctgctgtcgtctgtcatcaggtgaaaggcaaataaaatgtcaatttgtatcgccagttgtgtccttttcatattattcatatgcacattacacattctgaatttattcatgccgtcggagcagcctttttgtgtcaataaacatttacatgtttatctaatttgggcggctttgcccgtcgcccttttatggccgcagcttcaacttgaacttggggtgaaattgtgattcgtgggaattcaattatagccggccaatctgggccacggcacagatacacagatttcagctttcagatactttcgcagtgcactactttttgggttccggacgccgtttcctctgaacttgttgccaggcccaaaaacaagttgatggccaagccgcactgcaagttgtaaagcggccaataactaaaatacacaaaaaaataaaaacgcagatacgaaacaaaatcaagcgacccaatgccgatgaaacgagcaactctgttgccgcctgtcatcgacggcagagcaagtgttatggcagcaattattgtggtttccgtaagcgagttttcattttgacagcccaaaggacaaggctcgcaggatgtgtgcgaaatatcctgaataattcttgacgggcaggatgcacacagtgcttgttggaatcgataaagtttatttcacagcacggaggggtgcgacatagtgacatagataaagccatgggggatatgacaggttttcgatgacaaaactttaaaaaatcttataaaacattgaagcctaaacaataactaaaattatagaagaagcgataaatgtttagctaataatatgtaacgttttatattgcttgacttggggtgcttctgtttaggattgctgttattggcagagattataattataaatgaacattcagttcttatagttaaattcttgagtaccaagactgtgtgtcctgctgccatggaaattatgttatattgtagttgacttagaaccatgctgaaatggctaactaatattcaaaccaatcaggtacaatttccggagcaccctttcttcatttatttggtttggacaatttgacgcaactaccctttagccgaagacaatgactccattttggagtgcgccctgtgtcagcgccacgtttcacttcgttcttgacattttgtttaaaatgtgtgctctgcattttgcgactagccgcaacttcgtcaagcatagtgaggggaggggtctccaaaagtcaaaagcggcggcaagttggcgaagacgaaaggccaagagggctgtccaatttggcttactatacatgtgccagccgaatccgtgggtcgttcacttcacttggttcgtcttcaattcgggctgggctgtctaaacgccttcgaatttgcgctgatttgacacaaaaatgtgatgtaaagtagtcgccgcctcaaaatgcaaattgtgcatgaatatttacccctctattcccgattcccaaccgcctgtcgttaaaggtttttgtttacgcttgttttgctgtaactacgattttggccacggatgggcgataaggtgaaggatggccgggttttgggttttgggttttttgagttttcctgcgccctgttataaatttcgtatccagcagatacttacaacagctttgtggcacttcgcctacatgtggatactatggcaacccaaaaggggagcaaagaacatcgaaaaatcaacaacttgtagtgcagagaatttacttggccccaagtttgtgcaggcgaaactttactgcaagtaatgattgtcaaaagaatttcttggtacattcgataccaggccgaaatgacttttaacttacgagattatttgtatatctcgtgttattgtaaagttaagacattgtgtgtcactagtgaactagcgaacttgtattttctgaattcgttgttcacctgtcaggaaatagcgcagttctacgtgaaccttatcgcaaagtatattttatgcattcaaccgacattgattaaccaaaatatcacgccttagcgctaattgaacatttagcttaatgggaattcataaatcgctcgaaaaccctcataaagtcaagacgaaacaagtcgaaaggtattatttgcggctctatagtgcaggtgattaatgccggcaataaatagtaatgccgagaaaaaacccgaaactaaatacggatgagtcaaaatggattggactggggaactggacaaacacagcccagttcgtcggatcgatattcaatatcatttcaaaatgaggccgccacatgcgaaatcagtttttacacacgattcgaaattgttgaggacacctgggcgattttcaatatttgtgcttccgaaagcaaattaattaaaactacacgtacgaaggttgatgggcgccccccccatattgaattatttttgtggcattttcaatgctgtccaaatggcgccacacattcgtgtaattagatgcgcatttttggcagaattatttcgctcagctgtttccccaaaacgaaatgatctaagctgaaaaaatttccaaaaataatatgtttgcgcgcctgaccatcttatttcaatcgataaaatgttgatgttttgttatgatttttggctcgagcaaaaatatggaaacaggtttcgaccaaaaaaaaaaaagaaaaatataaacaaagcccggctcaagtcacttgtgaaatttttatcgttgagaagttcatgtggacgccgtgcatttgtgtattcatgaatttcaaccgaaactgaataaatcttgcttaaagtcccttctgcagaatttttgcatctgctacgctggtaggttttccctaccgactctcttcgaaaatattttaaatgagtcagctaaaaaacacatcaagttgcgaccggaaattgaaagacactggttaagtcatcttgagtaaacttagcaaaaacactcacaggtatttgtactgtgtttaccttgtccgaggggcaatatgttttttttttaagatataaacgacactcggtttcagggttccattgcaatcttaaatgtaaaccaatgaacttttaataaagtaagcaaacagtgaaataaattgtatttatccggacacaagcatatcggttgattcttagccgccgccattagtgttgttatttattttcctatcattaaaagtttttatatttatttaccattttttggacaaaaaaaaaactgtcaaaggaaaaactcaatatttgacatttaatgaaatgcagtaaactcattcaaatgttcagctgaaacggacaaactgggtacttttcaaagccatttgtgacgtagaagaaaaaatgaaatatgaattcgtttcctggtaacgagtgtgcaacaaattaattgatttaatatagagtcagcgaataaaaattaaacactcgagtgtaaaaccatttctgccttatttattcacgaggcttaaatgcttatggcaatttaatgttttcactttttatgaagtgcgtggcaattaaacgaaaattgtatgtgggggtagtaacaccgacttggttaatctgctgcatttttgccggttttttctgttttatttttttttttattcgtggatccacgggctttaagccactggaagactttgtacgtaagaggctttgagtctttgaaaaatgttcattattatttagccatgcaagccatgtatctactatgccacgcaatgtgcgcatccaaataaaaaacagatcgaacaaaaaatgggaagacaagcgaaggcaattcaaattcaacacattttgcgtttcattcataaaaaattcacaaatatttttggctatatatcgaagatatgcgcgattttggttttattgtctgtctgcactactttaaatgggtccacgtgccgaatttgtgggcgcccgagggcggtgggcggggctcgagtgccccccttcggcaaaattggtaatgagcattgttaaaatgcgctaagtgattttttgcactttgcgacttcttcgcctgtcgcctcgtcttggccgtcttttgcaagccatttgtgcaccgtgtttggtttgtttggcatggctgccttttagtatttgcctatgaatgaagtggctatatctaaagtggcaacggctatattgctatccacatatattttcattcatatctcgaacttttttgtggcgcggcggcttcactttgtcgcaggaagtcccagtttagttaataaatgcatatgctgaatatgtttattaggcacacatttaggaactatgcctagagcataaaaatatatgtatctccttttcgcacttgccactctaaaattctgcacttaactcatctacatactgttgacaacctggctagctgcctttgcgcacgtgaaagatatattgtggggtaaaaataaaataatacatcgtcgaactatcatcagcacgcgatttcgtcagagcatatggcttaatctcacgtaacagaaattattctataataattctcaacgctctacgcggtcggacaaaagatttcgcatgcatttacttgaatgatttatacccattcgtatatactcgtacgaaacttcggacactcacaattcatctgaaatggccatccttaaccttgaaccccggacgcattagtgcgccaaagttaataatttaaatcaactaattgcggcaataataggcgaatttatttacggctgactttgggccgcctgaccgaccgaccgaccaacaagctgcgaaaatttctataatcggcaagaagcaacgcttaatttgcaatgaatccccagaagccgcactgaatgaatgtgccaaaaattgaggaacaagatttcaatacaataccgtctgaattaacacgctatagaagctgtcagagaaacaaaaaaaaggcaaaaaaaaatagtaaaaggagaaaaaagccacaagaaaagttcacaagccacggctaaaaggcagacacgcgtgtcttgccatttgtttattgttgatttactcgctttattttcgttttagtcggtagctggtagctagtatctggtagttggtagctggatagcccagcgacaatgccattaagattaatgtttattatctaggcagcaagcctacatgaaacttgggggggataaaaaacacagtgacgagtagcaatgaaccttgtaaggtctgggctgctgtcaaatggctttatttcatgtgccacacacacatcagttgcagcagcaagtcgctcataaattttgaatacatttcaaacacctgtaatcgtaaaaatcagcacttagtcaccgccgccgccgccgccgccgctcaaaatccaaacaatttgtgaacgccaaaaagtacacagaaataaagagcaatacctaacaataatggtacatagttcaaaagcgtttcgattgtttggcatcaggggtatttgaacacaggtaagtgaactatgtaggtgggtatacatatgtgtattcgaatcaaaacaatcgcatagacacatcatccttcacttactgcgaattaagtaagcaaccgatttgttcgaacagcttcgcagacttctcgagaaatgtggataaacatatttcaagtatttctttgaaatgtgatctagctaaaaagctaaagctactgaatcaattttattttcaacaaatacagttcctgggaattttctatcatttatggattcgccaatttattaaggttttttgtctcagtttttagtttcaacttggtgcacaaagctgctacttttcattttcggcttgctttctttatttatagaatttacctttaattttctgtaagaattataatttaatatttttcatgaaccactgcaattgactatatttccttggctatgacagctaaactgaatatttacggcgcgtaaatattttggcgcattttcccccgcttcgctggactgaaaatcaccaagcgaacgaatttcttgttcaataatttcactcttggcaaccgactatcaaacaacctttgcattatttttgttgccattgcaatattgttactacaagtgtcccctggtttgttgtacaaacatagccacatatattacatatggccacatatcgacttgcacatgcagacacttacgtttgtggccgaaatgaatatttcgcgctttttcgatttgaggggcgcgatggatgatgggcttaaagaaatattttctgattagcgtcgagctggtgtggtggtggtgttttgctattgctgctgctttttagacggtttttgcctcgcttttggccttacccacgtttcttgccgttttcttttgcgttttttttcggttttttttctgaatatatttttttttacatatatgttatgttttagtgcttttccaatttcttattcacttcatgtctgcgcccgcacacagttgcacactcagcgacgcaagggggttcaccataggcagtacgcactgtaaattatgtgagctttcagccgcctttggccgattttcgattttcaaccgcgacgtcaacgttgtgcgctcgaaatctcgttactaactaaaataaacgaagcgcggcccgacaaaaaaatcgacatcagagtggcgatgtttgtcttttgttgttgcagccgtcgacggtaaccaagctcgctcgcacacctgccccttccctcccctcaccacaccaacccgccgccacgcccccttatgcacgccccggcttcgaacggcggcaagttcaagtcgcaatgttaggcttgaacggaaatggcggcttagctagtttctagacagcttttgtttataaataaaaaattattctaagtcgcctggtaaatattttaaaaatttttgttagaatattctttttattttttaagtaaaagtatttatttttcatggaatacatgtataaaaattccttacgatgttgtaagtagtgtattaaacctacttctgagtcatagaatttgactttcttgcgaacaagttttctataaatatatgtaataatatgatacaatagcttaaaaaacctatattaaataaattcataaagatgtagcttagctcgtttatagctcaattcaagtgtgagttctctgatctcgagccgtctgagtctgcgctgatttaagttcgaaacgaacttcggatcgaaggcaaaacttgcaagccggcaaaagtgaacttgcgtgttgctggactgttcgcaacatgttgcttccgctgggaatttcttagtgccaatatacaaattttaattggaatgactaacgaaaaatattgtttacccgatttctacaaccttgattgttcctatttgggtaattcagaaaaatactgcgttagccaattcagaaacaggccttcgcctgaggcattcttccaaatgagctgagtcgtcctgtgattaccaaaaattccaatttgctcgctgagctcgactttgcacctttgtgcactcagcagacagtaaatttcgagtgaatcccaacgtcttcttgttgccagcggcaaaccaaggtgcccca

SEQ ID NO: 33638 - DNA, 664 bp, DROSOPHILA
cacaacgttgacgtcgcggttgaaaatcgaaaatcggccaaaggcggctgaaagctcacataatttacagtgcgtactgcctatggtgaacccccttgcgtcgctgagtgtgcaactgtgtgcgggcgcagacatgaagtgaataagaaattggaaaagcactaaaacataacatatatgtaaaaaaaaatatattcagaaaaaaaaccgaaaaaaaacgcaaaagaaaacggcaagaaacgtgggtaaggccaaaagcgaggcaaaaaccgtctaaaaagcagcagcaatagcaaaacaccaccaccacaccagctcgacgctaatcagaaaatatttctttaagcccatcatccatcgcgcccctcaaatcgaaaaagcgcgaaatattcatttcggccacaaacgtaagtggaacagaatgcacagaacagagaagcattcggaggcattccagctgagagtcagccccgaattccatcggaaggattccggtacagatctgcagatgtctaggaaaaaatgcaataataaccaacagcgacgaggtcgtcgaaggcgaacggacttggggaatccgctgggaatccatgggtccatcagtcttgctattctgatgttgaccatttgcatggccaacacgtcgactgccggtaagtgttga

SEQ ID NO: 33639 - protein, 80 aa, DROSOPHILA
MHRTEKHSEAFQLRVSPEFHRKDSGTDLQMSRKKCNNNQQRRGRRRRTDLGNPLGIHGSISLAILMLTICMANTSTAGKC

SEQ ID NO: 33640 - DNA, 12806 bp, DROSOPHILA
ttcgattgctacaaattgtttagacactactacaaagaggtgtagattccgtggagtgaagaagtgttgatgcttttcgtgggtatttacaaatttttgagaatcgagctgtatgggattcgttaattattttatttacaactatttcgtgtagtctgggttttctaaaatgcagctgtttcttataggttgtgaataatgttccttttaattcgagaacaaagttttttgatgtgtggttaaaattccgttttgccaggccgtactgtgcttctgtattccatatccgtttgtacttgttgactgcgcatacaagaccttcctcctccacgttttggcagtgaacctgagctttcatctttgacttggtgatcgcacactttacatacaaaaatgtttattaagatactcatagttatgatattcatgggtctatatagatagggggctaaatgaagcacacacatgcaaataaactagttttgcaaaacaaccggagtggttcgagtggattgaaattggaatccactcaagattggatctaatcgtatttcattaactacacaggcttatccttttgccatggttttcaattcagttgtagctgaacatttgcttttgctttttcggggcatatcatatcatgtttgtgttttattaaaaaaatatcatcacaaaattgatgaagtattatgttttcggcggcattacaccataagcttacggctaacgatcttcatcatgtttatcattttcttgggtagcttaaattaggttagacttcaaattaatcagcgcaaagatacaaactaacaactaaagtacatagagaaaatcaacacagtgttcgaataggtagatctcaagaattctttgttctttgcgttccaagctaaacttaatcatctaggttttgttaattctttttctttatctgcatagtatatatgtatgtatgtgtaggtctgctggatgatttttcaaatgaggcatcggcgatttacagggtttttgcgcgatccagcagatcgccaatgaacttcgatatgtctgattgcgggcgtttgcagacggacagtaatctctgcataataaggaaagaagcttaattagaacggtgttaattgatggaagttatggaactcactataagatgagatcttcttatgtcatctgtgtccatgtccagtatctcgtcgatgtccacatcgatggcctcgttctgtgggtcgaagtccatgcaaatgagaagtttaatttacgaataacccttttgaacgttggcactactcactggtggatcgaagagcttctgtagctcgtcgtagagccacatctccacggccagccgcttgcggatgaggctcatctggtgtgaaccgtacttggccgtgaggaacttctcccgccgctccttcacctccgcccccttctcgttgaagttgacccggaggttcgtccggttcggcgaccgctcacagtcgttcatctgctccagaccgcactgcatctttgtcgatcgatttagcggtacaagctgcgccggttgaacttcaatttgcggaacgcctgcaatcgattggcgtggctgctgcaattgaggcaaacagttggacacatgagactcaagtggcagtgtaattaaataaattattaatcgcctgtaactgagctttccaaacgtgcgtcacacccatttctctgtttcaagacccgttttctgtgcccaaaaggcactaccaacatcccgcatccgtgactcacccaacttttgtgccctgcagaccctcagctctgattcatacattccactatctgcccatttgtgcgccagtggactttttctatgtccagaaacaatgacgacatgcaatccgaacaccgaacagcaataattgctaacgtgtcactggtttttctcctatctctgtatcctcccacatatatgtatatatatatatatatatactatatgacagctaattaaattaatgtataatgcttggcatttcagtgaactccagtagctggaaatctaatttcagtatataactaagtgcagccaaaacaaaggtcacgtcgaattgccttcctgggttcatattatgatagaaaacatagtttatttgtaaaaataagtcttaaaatgatatattaataaagagattctatttgaaaagaagttcatattggtatagaaggacatgtataacttttctaacccgacatatttaaaggcacatcgaacgcgccgtattgactttttctattacttataagcatattaaatccaagtgacacttttcccgtgttttccccaatccgaagggggacaaagagaggttattttcccagccaaaagccgagtgccaatggcaacagaggccgtggtgccagtcaccaggaaaggccccttaacacctatccgcccattcccaaagaaactcggtatccttgatctactaacacaagccatccccaaaaaagcattcgccagctaacggtgaaccttgaaatttccaatttcccccgaaaaaaagttaacaaactcgattcactctcattctttggggccgaactaaaacgaaattgaattgcaaatgctcgcagttgagtattgaaatagttttcgttggctttttatatattttttctttcttttttttttttttgtaaggtatttcgaaatcgtgggccatgtggcaaacgtggcagcaacaacagcattgcatgcacactcgtacacacaaagagttttccgcattcgccgctataaatacataaacaacaatgcccgaccccgccacattttcacacagctgaattttccagcccgtgcgaaatctgataccagatttacccgagagccatgagcaattatgaaaccggcgtttaacttgtcacttgcatgtcgtccgcttatcgttctgttttcccggcggagcgaggaaatccgtagatttgtttgcctcttgaaacatgagccggtgcagatctgaccctctggggtaaagagttccatagtttagtttttcttggggctctggtcccggaaattaccctaaacgaagttaattgtgtggatctgtttggcctactactaactggagtggggtaaccactcctacgttcccgctgatgatggactggcgacatgataccattttagaggtatggaaaaacgtgtgaagcggtggatgaaattaccatcttagaacacccaactgggaaaaaacgcgagatcgcttatatctctaaagtatttcgacttcataacgctgccgatctattaaatcattagtaataggattatttttataaataaagaaatcctaggaattcatagcaaagttattaaatatttattctatgaataaacttaggttctttttttattttcattatttaaatactgggtattgttgtcgcggtggttataacaaatgtgtattgtgtgattcttctgctgagtcaacggtaattgtgggatctaataacttatgttgactaccgcaaagcttatctaaggaatttcctcaggttttcccaacgacaacatgtagaaacgagagcaaaaactatttgaccgaagatttcgaagggcgatgaagttgaaaaggggggcaaattatacctttattataatggcttgccacatctgatgttgcagctttgcataaatattatgttgaaatgcctatggcaatgcggcaacaacatgcaacatgttgcatgtgcagcgccagcagcagcagctggcccagcagcaacaacaaagtcggcgctagctgcgaataaatttgtatcgagcaaaccccctctgcccacgcccctgcaacgcagtgttgcataaacttccggaattgctgcactgtgacaaaaaaaatgtggcatataattgaaagcctatgaagccaggagagtttccactgtgaaaaaagatttaaaagaactagttttcttatctgtaattgtaggtttttccagtttggtataatattgtgtaactaaatatcaatttaaaatgtattgtttttcagtgtgtactatttctcaaaatttgtatcaaaattgcagtgcaacttaatgcgttttacctcggtccagtaaaggaaattagtgcggctggtcagaaacagaaagaaccattagatgaattgcatgcgatggcaattttcggaatagtttcatgcatatcaaatgtgatcgatgtgggcagaaaaggctctcctcaattccactcacattcgaattaaaaatgtaaattggcacttggtctgcagctccccacttgccacaaaactgaaatgtcaacgatacatttttcagtgtctcccagacacaaggacattcattgaaatcctgtaagcattttcaatcagcaaacaagatttgatttattgcagacagccagaaaagtcaatcaatcgatgaactcaagaaaaataagacaaaaacgatgatgatgtgtccattagagcgggctaattagatttcaagtaacaaaagccccaattaataaacgtacatttgatgaggcataaaatggggaaataaaatcaaatcccaactcagaaccagagcaagttcaagacaaaggcccaatttgttcacctccaaattgatttttaaatgccccgctctgctgctcccctatatctatatatatatatattccatatatacatggagcatttatgggtaaatgcaaattcaatgtgtcgcaatcgacgcagatacattttatcgttttgggaatatcttttttgggccggcgccaaatgacgactgcagaaagttcatgttaatttcaaggtaattgtggattaattatacatttatgtagtgttcatagtcgcttatatggctttcggtccataaaacactttgccacgccactcaaaagtgctctataaaataaaatggtcatttaagcgattgccaaaagagattatcttcgtatgacttgtaaaaatacacattcatcacacttttctgacttttatgcgcattacgtggcagatattcaaaatgttctaaatctgggctaatgatttcgatttctttttggtccaaatttacatatccataaatatgaaaccaaaatatcaggttcatcaactcagatacggagtagacatggcattaacccatataggaagatactttgagatccatgagatcgactattgagcgtttcagaaaacttcattcaagccggaattttcacatgaacgggggaaaaagtgaaatgtgacggttttatgctaaaaagcctacttttgtaccgctcacaaaaggggcagcgtttgtttatgcaaatgctttatgattcgcgggccgtgaaatcccctggaaaaaaacccaaaaaaaaaaaagaattgagaaaattgggaacaaaaaataagcagaaaccagtttatgaaatctatgaatagaaagaaacttggaatcgaaattcattgatatcgcgccgtctcacttcgagctatcagatttggtgtgcctctattaatttatattgtaaatatattgtttattaatacagcgttatacaacggtgggcttatcagccagacaaaaaaaacattaatctgccatatgaattgcagtcgcatttaaataagccgacgtattgcataaacactcttgataacccgatgagtcaggcaatgcgcacattagattctaacatccttctaatttaattatatatacaatatttcgagtgctatttttgacattctagcacccagcttctgattgatgggctcccaccttctaagacacacgtcgatcttttgataattctaccgtgatttcatggactttgatcgctccttaatttgttaagaatctagaagtcaagcgcctgtttcgcacacaaaagccaagaaattagctaaaatacgaattaatcaacataaaaaaaaaaaataaaaataaaataaaaataagttgtttgtactcaaataaaacttgttgaactcaaagactttgagttgcggcaactttaaataaataaaataaatgcttcaatctaaaaatccaacaaattagcttgtcgcatgaaaactaaaattaaaagttgaaaaaaagttttcacagcacattcagaaactgttgttgagtcgcaaaaaagttctggccaagttgaaactcacgaattcgcagattctcagattgagcaatcattcagtttggaatgcgtgtgtggtggtggtgactcattttcgggagaaggtaaacataaatacttttgtttcttttgctcttttttgttgtttttgttgtgaaattgaaaagttaatttggcttattgtttatccattttggtcagccccttttcagacatttttttgattacccaaatggggttaccgagcgaaaaatgaccaaaaaaaagaggctttgagccttatggctaaataattacaagtgaaaaaacctacacctacgatattcgcgagcagttggggccaagttggtagccaagtggccattaggtaggcagtggtcaactggccaagtagccgcctccggggtcattgacccccaaggaggacgaccccggggcgggcaggggcctggagatggccatctcatattcggactgcttactgggcacttgccaaaagcgaattgtcatggaaaaatgatacacagcattatttggcaggggcaacaacacacaaaaaaaaaaccaaaaacttttccagcataaattacctttggcaaatgtttgcgcacttcggtcgcgagttctccgtactcacaaccccggataaactcaacagcgacggggcggtctacttgacacggttttcgaggcggaaaaaatcaaatgaaatacaatgggctaaactgttcttgcgagcatcgtatttgctggctaattcattgtttacgcaatgtttttctcgttcttggctcactgcgaaattgcgtcacgaactatgggaaaatgttcgactaggtgtgagatatcgcgctgactgatggtcgcaagtggaataaaattttggccatttataaatagatgtcattcctagtcatcgtgtccaacggattgaccgactttttgctaagatgaccgaaaataaatgttgtggatatatttcgaggatctcgaatggagatgttggaatgcaaaagattactcattgtttatataccgcagatcttttaatacaataaaggggaaaccctctaggtggtatcttttcctagtagcaaaagcccacaaaatcgcatccgttgtcaagatacatattcttggaaaccccagttattgtcttatgatttcctgctaatgtttattggctgctccagcgaatgtttacttcttagtagcgctgtgccccatggatgaagcccccagctcgagttcccaatggaggaaactcccgttcggctatcagatttgcccgaactcgaggtctcactccactccagaaatcgggggaaatcgataatgtgagcacacaccgcacgcatttcaaagtcacaaaaggtatggttgaggtctgttgggggttgattccaatcgcggggatttgaaggcggggaaaacagagcaatcaacaaatatgtgcacttgcatatttacgtctggctgcttgtcaatactaaaatgtctataaataacagagacaaatacatatgtgtgtaagtgataaatcgagcaatagaaaccgaataggaacccaatggtccgggcggtggtggtgaaaatcacggaaaacacacgcaaaatgcacacaagcgtcaagttcattgtacacttgtgtttatgattacgatggtaatggatccactatggtatccaaagttctcgggcactgtcaaagtcataaaatcatcaaacaaatgggtccacagcgcgttagtcagctgcactgtaaaaaaccgggtgcggttaagtcatgcataggctttttttgtatcataaaataagtctcatcacatcattttaacatgtaatgctaatttaagttaatataaagcgtattttccgagctaactgctattaccttttaaatacctttacttaaactgctataaatgccgtattcatatattcacattattgtttggagccatttgtgagaatattcattattttataagtcattaaaaagtttctgtagagcataaactatttctttttatagttagttcacttttatgcacacacatcataaaagatgcagcgagctgcgagcactgccacaatggaaccacccctactaatataccgctcacatatattatatatatatggggctatatagttgtgtttataagtgcgcctttatggcagcaatcacattacacatacgccatgtcggccgccgtcgattgtcagctgtccgcagtaggttagagttcaatgattgcacgacgacttcatgtacaaacgtatatctccactgcgccagagattctttttcattctctgaaagaatctgctgtgcaactacaacttgcttctgattgtaaacgaagcttcaaagtattatgaattcaaatgtattcaagtgttctctgcactcttgcggcttagaataatattttctaattaaaggcattattaatataaagtgagcatagagttatgtatacttccgcttcgaattacgattttaacggtttaattaaatatccccaatcatttatcatcgtttctgcattagccataaatcgtataaatggtgagatgcagttaatttagttgaacactctccatacacgattggcatagcaaaaggctctgccaaaatggatttatctgtcatatatcactcttttcttacctgctacacatacctgccgttagatttcaatttccaacgagcttttgaaacatttccgttgcaagatataattcggtgtatctccagatagcattattcccaacacgtaggaaaacaaagcaaacggcaaaacgaccataaattgcttattaatctttttgacgaaatcggcagaacgaaacatttgagacgttacgtttgctctgcgagatacatttatgtttgtgtatattttttccgttgaatttgaaatgttctttgttattctttgggctattcttagacggcccaggatgtttgcaaatgcccggtgatttgatgtttgctttcgtctatgagttataacgcagcatttgctggggttcaagttcatctggtgatctataggcgcgatggggaaacttcttggggcgaccttcgcggcagacaaagcgctaatctgcaatctgccagctgagctcgttggtaaataaacaaacaagcagctgggctagtatctcaaaatcgattttctacccagtctcgagtcgcgagtcgcgccagacaatggaactaaagacccactacggatacgccggcaaaaagcgtgcgtaatgagttgaaagatacatttgcctatctagatatcactaactgtatccgtatctgcatctgtatccgtatctttatagctgaccgttcaactgcagctttgacacgcttctgagcaccctgtaaacacatatcgattgaggggtaaatgcgaaaaaagtcgaagatagtgcagcaaaatatgtaagcatgtcagaatcaagcgacgtgtgtccaatacccaacgtacatatcttgtatctgtaaatgtatctgtatctgtatctggtggcgtgttggtttttactgcacgttgcacagtgattagacacaggcggccgcaaaatgttatgactgcgaataaaaccaggttacaaaacgcagcagacacaacataaaagaaattacggctctcgacacacattatgctgccataaactagcaccagccaccaatgatacacaccacttctgtgggccgaggaaaagcgagtctgcgattgataaaaagtcaattaaactgaattgcattcttgcacttgcagaaagttgccatcggacaagggatactcattcagcgaaatgtttgatagtacttaaagatacacagaaaactacattcaaatattttgagtcttatagtataatttgtcattgaaattccattaaaagggaaatgaataaaatattttaatattttttataatacgctgatggaatataacctaatgtagatattatatttaaatacttgtgtatgttaatacctttcagaaatatatttttgtatgcatattactttagattataatatgtgagaatagaaattaaggagctttaaatttgtttgacaaataccggtctgtggaggtttcaagggtcaacaaaacctctattgacttcgcttttctgtgaggcaagccgatgttaatgctaatatttgccagctaatttggccgctcagacagccgactactgctgtgtttgatttgtgggctggcacaagatctccgcctggccgaatccgaatgctaatcggaattcaagcgcatcccgcttgctgggttctaccacccagaactgcccgatcccccctcggaaaagcgactggcagttgggggaatttggaagcgtgaagcgcagttgcgtttttcgtttcgttacgttccgctggatgcgtggccaaaagaccacccttcgctgccaataaaaagtttcgtatatgaagttgtaaagtgagagagatactcgcactagatacaaataaaaacgtaaacgaggcagcaaccactgcataaaattccgcagctcaacacgcacacggcctgagtagctcttgctgcaggttttcagctggccaactcaaactcggcttctgtgccgcaatgtctgcgggtcttaatgctaatggtactcgactcgtactggaaatgaaaatgctatgggctcaagtacggccatggggatgggagaaggggaccagatctggccccgaaactgggagtgggactttgcctgggagactggacaggtggctgtgacgggcacgcttctcctggacactggccactggacactagccaccggccagctgaaacaaatcgacccgatcgactggtctacgagcagaacaaaaaagaacagacaagcaacattttccggttctcgaatgcgatgaaagttctggctgtaagacagaattttcattttttgttcaacaatattagctgaaaatgtccagaaaagcaaaagcagccatttattggattttaagatttaggattatgattttctcataggtaaaaaaatcaaaaactttgtcataatcaatttgtagctcaatatctgcaatgcttaataaatgaaaatattactttttcataacaatttacaagaccttcacgcataaacttgaattttttgcttaaaaaaatagctttcatagttacgaaaccaaccttccaaaaggtatttaactatttatcatttttttaattaataccaattttctaatatttaaataaaatttacttttggcagttttccagcgattgactcgtcgtggttcggtctgtatttggcttaattgcggcgtctagttctggactgaaatttcactagccgagatttttaatttattttctttttttgctgaggctggcgccgctttaggattttccacttttctactgctgctgctgctgcttctgctgctgcgactttctgctcaatgaaattttcatttgcacgagagcacaatgagggcgaaaagcacacaggcacacacacacacggcgacgttcgagcggtcggtttgtttaactgtttgtttataaagcggcagcggattgcccggagtttggatacagtatctaaaaagtatggttctggacctagcaactcggagcttagcacgcgcagccggtgagcaccaatgaaagactgaactgagtcggcgaatggaaaagtatctgccggatacacacaactgttaagcgaacagagccctctcagccgctgttaactctccgggcgctgtgcgcgttgatgtgactgctgatttgtggattcgtggagctgaagtcgcggactatgggtatttggtgccactaatgaccatcggctcagcacccaatgcttcgggctccaatgattccagttagtcactactcacagcgggataatccaaagctgcgatctttaaatttactatctagccaatcgtaaaatgttatttatagtgctcgtactattttctattggattcctattatattgctccgaattggcgtagtcacactcctactaaaattagttttatgttattcctaaatttgcgtatgagagcaacaaactatcttgtgactaaaacatatcagtgcggtattattctattggtattattctgctttcaaaacgcttttaaataactgtttgatatctaattcgattttaagtgcgaaaacaaaattttccatcctaaatagctcgtgaaataattacaccttgcagtactttaatataacatttatatataattgtttaagcatattgaagcaataaattaatgaattttctgatcttgtgtacaatttcatattttattaggaaagatactagatctgggctacattaagatagatatccattgcgttttagccgacgaatgtcacggttttgagcacagccaccatttgagcttagaatttctgaaacaaaagcgccgtcgactgcaacattttgggggagggagtgcgtagaaagagaaagagagagagggatagagcgtagaaagcagcagcaggccaaactggtcaaaatttacagttggagcggaaaaagcgccaaaagagcggatgcacaaccattgaccataaacttgaaaacataacagaggctgaaactttgttaactaacagtg

SEQ ID NO: 33641 - DNA, 846 bp, DROSOPHILA
ctgcgcgtgctaagctccgagttgctaggtccagaaccatactttttagatactgtatccaaactccgggcaatccgctgccgctttataaacaaacagttaaacaaaccgaccgctcgaacgtcgccgtgtgtgtgtgtgcctgtgtgcttttcgccctcattgtgctctcgtgcaaatgaaaatttcattgagcagaaagtcgcagcagcagaagcagcagcagcagcagtagaaaagtggaaaatcctaaagcggcgccagcctcagcaaaaaaagaaaataaattaaaaatctcggctagtgaaatttcagtccagaactagacgccgcaattaagccaaatacagaccgaaccacgacgagtcaatcgctggaaaactgccaaaacagccacgccaatcgattgcaggcgttccgcaaattgaagttcaaccggcgcagcttgtaccgctaaatcgatcgacaaagatgcagtgcggtctggagcagatgaacgactgtgagcggtcgccgaaccggacgaacctccgggtcaacttcaacgagaagggggcggaggtgaaggagcggcgggagaagttcctcacggccaagtacggttcacaccagatgagcctcatccgcaagcggctggccgtggagatgtggctctacgacgagctacagaagctcttcgatccaccaaacgaggccatcgatgtggacatcgacgagatactggacatggacacagatgacataagaagatctcatcttataagattactgtccgtctgcaaacgcccgcaatcagacatatcgaagttcattggcgatctgctggatcgcgcaaaaaccctgtaa

SEQ ID NO: 33642 - protein, 124 aa, DROSOPHILA
MQCGLEQMNDCERSPNRTNLRVNFNEKGAEVKERREKFLTAKYGSHQMSLIRKRLAVEMWLYDELQKLFDPPNEAIDVDIDEILDMDTDDIRRSHLIRLLSVCKRPQSDISKFIGDLLDRAKTL

SEQ ID NO: 33643 - DNA, 4905 bp, DROSOPHILA
cgcatcaattattaaaatatacccgactaatcctgaaattattagaataaaaccaactagtcctgaaagtacacatgtggatttgttgaaaacaaaacagaatcatatttcttatcttaaattaatacaactttactataaagccaaaatttattattactcatggtttgctctgtgtgtttaaatgaagtgatcaattaatctacggccaacacatttgaattctattgattctattgatattgtattgtagtgatatgcattatatatcgaatatactatttgattgatttctaaaagcattttatcttagttcacagtatcggccagcaattgcgattggtttcactagcgcaaatatgtaaatcttgtgcaatgagtaaaatatagtatcagagtgaaatctctcattcatgactaagtttaggtttacaatctcttagcaatatgatatgttgacactgatcgttagtggggaaaaatcacacattttaatgagacagtgcacgatagcaatcgcaaaatccccataattcgggctcttagagatctgagtcttaacagtccataacaataaagtctcccatgcgcgtcgaacaagatttcaggggttgttaattggtaaaaaaaaaaatcatttctttttagaatatgaatacgaaacccgtttgggtgtcgtcacagccaactttgagatacatttgtgatcgtacacatgtgtgacgattagcgactcacatccgaaggggttttcctggccagcatttgtgaaaatcgaattagcacagtcgtcagaactcggtgatttttggtggtcgattcaggcaaaggtaaactattggaaatccaattttacttgtactttaagctcgttataaataaagtcattaattcccagcccatttgaatatttttttcgtctttggcttatgcaaaaagtccgtaacataatcgcctaatgaaaccggtcgggtacgggatcgtttatttatttatattttctatttttttttttgttttttttttttgccacatttgcgatgaggcttttttttgggcaattatataagtctgagcttcgggcattatgtgatttttcccggagcgacttctttgtgttccataattaatggcagtgaaatggcgcagtatctcgcaattgccaaacaatcgattcgaactctttacataattagctgtctaagctggcaatgcaaacgactggctcccgaattgtaatgcatttgcatttaaataaataacgagagctcttaaataatgaactgctagtgcaaatatttgtatattaaaatcaatcaaattgaaataatcggagactggtcgaaatagaaatattatcacattagccgacggccagaatcattttccatggcgacatgaaatattattaaaatgccaactaatgaacgtcatgttaattatgtaaacacacacacacacacaagcgcacgcaatcagtgtcctgtaatattttcgcattttaaacgccgtttattgctattggcatttcccatagtttttccgcgcctcaccaccacttggcaaattgaattttacccgcccgggcagggcaaacttttcaattatgcggccagcgggctaatgaacaaagcgatctgaccagaaaaccatttggccaacatatcgatatggatacgagccagccagccagccacacatctagctgaatgtgcagactgaattatttaattttaattaaatgctggctggcaatcgaatggtccaaaaattgtgtatagcctattttggggccagtagatcgcttatgaaattgaaacttattgtcgcatactttgaggcaacgcacctgagatgagccgtagtttaaaaaaaaaaaagtgcattggctcattgataaacatttcacatttattttatggcccaacataaattgcagcaaacaaagggcccggccatattgtcagttctacaaaggccaacaactgttgcagcagcagcagcagtgactctgtggcaaaccgccaacagtctgttggccccaacttccggttttcccctcatcttccgcctcttcgactccatgttgcaaaactgcaccgcaggggttcatcgtccttgtgcaaattggtctcacagtttattgccgactccggactgcggactacggactgtggacctcggactagggacttcgtgctgcagacttcagacctcggagcccaggagcacacagatgctgctcctccggcaataaaagtgcactttcagcctgcgagtgagaagccaaagctgaggcgatggcgaaggcaaaggagcttgcttaagatttcaatttgttgccattgtgtgcaacaatttgcaatagtaaaactttgcttaatgataaatgtttgtgggggacacataaaactcaagagcagcgcagtctgtcctggccatttaagagatttatgtgaccatgagtggcatcaatgtcttcggtcggcgcaaatacaactccaaaccataccattccattccctctaatagaccattaattttggcggaaactttgcatgccagattttccgaaccccaaaaagcaggaaaagtcttctttcgaccgctaagaaaacggctcgaagaataaatgggacagaatcaaggacacaacgtgtctttcacgcatttagtccttactccgattcagaaattatagtgtctaataaaatgccaaaaaatgatagtacaccaaaattgttgagtacaaaaactatatttgatcggttttgatgtaatactttaagccactgggagaattacaggtatattgggctttgggtaatccagactagccatgatagccgccgcctgctcctgctgaggcactggcactggctgaagcagaggctccggagccacctccgtagccacctccgtagctaccaccaccgcctggtccgccacctaaggagactgcaggtccaattccgtagccgccaccgccgcctccgcctccgccgccgccgccgccgtatccgcctttgaagccgcctccgcctccatggcctttgtgcttgtggctaagaccaccaccaaagtgtccaccaccggatccgcctccaatgccggggccaaagcctccaccgccacctccaatgccgggtccaaagcctcctccacctggtccgaagcctcctccacctcctccaccaggtccgaagcctcctccgccgtgacctccgccgccatgacctccaccaataactccaactgaagatgatgcagagctaccggatccgccgattcctccaccaaatccaggaccgccgccgattccaccgcctccaccagaatggccacctccgccgccgattccgccaccaaatccagggccgccaccgattccgctacctccaccagaatggccacctccaccgccgattccgccacctcctccggaatatccacctgatccaaatccagggccgtcaccgattcctccaccggaatgaccacctgatccgaatccgggaccgccaccgaatccgcctccacctccagaatgacctccgccggagatcactccaccgccagcatggccacctgcgaagggacctcctccgacaccgccgcctccaagtcctaaatcaccgccagagccgaaaccgccagatccaagtcctccagaaccgtgaccaccagatccataacctccgccgagcttaccgcctccatcaccgccgccaatcgcaccggcagaagcggacgaggaagcggatgctccggcgtgtccaccaccaccacctccgcctccaccgccgtaacctccggcggaagctaacgccacacaaacactcagcactataaacagacgcatcggaacctttgcctgcagctgactaactgggctccctggaaagatgccggcttttataagagactctccgatgtgcaaaaagcacaaataatagcaaaatacttgcaaaaatttcgcagagcgcgaaaaaagaacagaactcagtcacgttcccaatgctgggatcctagggtcaggccaggcaaaaactcagactgcactggacaacaaagaataatcaaatggattagtaatccatttcagtacaatatttgttacaaagaagtttgattttatttcagttgtataccatctcaaaatattaatccacaatagtctcttcaaatttagtaatatattgagaattttaaaaacctttaaaacagtaattatagttaatattaattataaatgagagtgcacacctgtagcacagtgtactttgcacccgtggagaacacacaaacgagttccattttaatattctcgattgtctacaggcggaaattacattataccctagggagaaccgaatatttggaaggcgtgtgcaacccgcgggagattcatgttagccatcagtaatgatgaattaacttaatgatatctaagcccgattaccattgttgatttaccaaaataaacgagtaagcacatattcctaatggaagatcaaatgtggcttgaacgtgggctagggcaaaaagagggtattccgacctcgtcatagtccggtacattcagtcgctaagtcttatgtaaaccattttaattatcgattacctcggaatcagttgcattgaatctcgactcgcccaagattagattgattttcaataagatgatattcggaggcggttgatggttacgacaatgacccttggggtctacgtcactcggtttgatggagtgaaaatacagacgccacacagagtgatgaattatataaaattattaaacaccatcataatgtttatttggcgaacattttaattagtacgcgatcttaaagcacacacataatttataataatagtactttatggtgtatttatattctaatg

SEQ ID NO: 33644 - DNA, 1181 bp, DROSOPHILA
ctttccagggagcccagttagtcagctgcaggcaaaggttccgatgcgtctgtttatagtgctgagtgtttgtgtggcgttagcttccgccggaggttacggcggtggaggcggaggtggtggtggtggacacgccggagcatccgcttcctcgtccgcttctgccggtgcgattggcggcggtgatggaggcggtaagctcggcggaggttatggatctggtggtcacggttctggaggacttggatctggcggtttcggctctggcggtgatttaggacttggaggcggcggtgtcggaggaggtcccttcgcaggtggccatgctggcggtggagtgatctccggcggaggtcattctggaggtggaggcggattcggtggcggtcccggattcggatcaggtggtcattccggtggaggaatcggtgacggccctggatttggatcaggtggatattccggaggaggtggcggaatcggcggtggaggtggccattctggtggaggtagcggaatcggtggcggccctggatttggtggcggaatcggcggcggaggtggccattctggtggaggcggtggaatcggcggcggtcctggatttggtggaggaatcggcggatccggtagctctgcatcatcttcagttggagttattggtggaggtcatggcggcggaggtcacggcggaggaggcttcggacctggtggaggaggtggaggaggcttcggaccaggtggaggaggctttggacccggcattggaggtggcggtggaggctttggccccggcattggaggcggatccggtggtggacactttggtggtggtcttagccacaagcacaaaggccatggaggcggaggcggcttcaaaggcggatacggcggcggcggcggcggaggcggaggcggcggtggcggctacggaattggacctgcagtctccttaggtggcggaccaggcggtggtggtagctacggaggtggctacggaggtggctccggagcctctgcttcagccagtgccagtgcctcagcaggagcaggcggcggctatcatggctagtctggattacccaaagcccaatatacctgtaattctcccagtggcttaaagtattacatcaaaaccgatcaaatatagtttttgtactcaacaaaaaaaaaaaaataga

SEQ ID NO: 33645 - protein, 342 aa, DROSOPHILA
MRLFIVLSVCVALASAGGYGGGGGGGGGGHAGASASSSASAGAIGGGDGGGKLGGGYGSGGHGSGGLGSGGFGSGGDLGLGGGGVGGGPFAGGHAGGGVISGGGHSGGGGGFGGGPGFGSGGHSGGGIGDGPGFGSGGYSGGGGGIGGGGGHSGGGSGIGGGPGFGGGIGGGGGHSGGGGGIGGGPGFGGGIGGSGSSASSSVGVIGGGHGGGGHGGGGFGPGGGGGGGFGPGGGGFGPGIGGGGGGFGPGIGGGSGGGHFGGGLSHKHKGHGGGGGFKGGYGGGGGGGGGGGGGYGIGPAVSLGGGPGGGGSYGGGYGGGSGASASASASASAGAGGGYHG

SEQ ID NO: 33646 - DNA, 3915 bp, DROSOPHILA
gaccgctgcgaactctgcgattggccgctgtgcggatcgtgcgccgacgacgaagacgtcacggagcaccgcggagagtgccaggtcttctccgccgcacgtgtcactttcgccgggaatgtgagcgatgatggcgtctgcccgcagttggattgcataaccatattgaggttagttcgcgggcgctccagcggggcgggggtgatggtgctgggtacatccgtacagcaggggctactgggtgctactaggggaacctgggcggtctgtccgaatattagttttggcagcagcggcccatttctcgcagttcgcaggctagccggcatatacagattctcatggcgactctacgtcaaagaaggcggacggatggattaacaagtctgtgaaagggacagtggagcaaatcgcacagaaaataaaaaataaatagctaaatttaaagtgcatgaaagtaaggagaaaattatggcatgaaacaagccatatttgtacatattattatgacagaataattggtatatgatagttgcggcgcgttatgatcaatgtaccatcatgtttttatatatttcgtagcaaaactgaactgtaagcactgtgaattattatttaaataatgttaagcacatgtttaaatagatcggtgcttagtacttagaaatagaactaacaaagccaagcaacttaaaagttacaagcaacttaaaagttacaagcaacttaaaagttacaaccagtaaattatttaatttatgaaaatgtaaggtattttagttattatagaaattgaacaatgttttctcaagacaatttgttcaaaactaaaatttctcacctaggacctcgcatgcccactgtgcccagcaattttgatgctttatgtcggagcaggcagaaatgtagtcatgtagtggggaggaggcatcatctgtggggtgtgcccatgacatgagatctgagatctgagtgcggccagccggcatcagtcagcgaaatgacatcgccgccaacgctgtcggtgaataggacagcggttcagtggagtccggtctgcggacgctatctggtggccaagggagcgatccgtggccacggtctgctgatcgaggagctgccctttgccgtcgggcccaagtgcaatggaccggtggtgtgcctgggttgctacgaacccaacccagatccggaggaggagctgtgtagcgaatgtggctggccgctgtgcgtggagtgcgcccaacaagcggataacgcccatttccgcctggagtgcagccagctgaaggatgctcgggcacgattcttccgcctgcccagcggcagcaggcactgtccgcaattggactgtattatgccgctcaggtgaagcccagcgggtggaacaaaaatagaccaccaggcaccaggcaaactgatagcgtcactattttatccgctcaagatgaaagttatatacaaaaggattcattaacaattaaaaaagagaaagatttttaatttaatgtagctaattataatcaataggttacttgttgtgcttcatatgattgtcatttggaatacccttttaaactttctactttcagagttctgttggccaaggaggcgaatccggagcgatgggacaacgaggtggcacccatggagcaccacaaggaggagcgccaaagggacgcggatgtctggcatgcggatcgcgttaatatcgctcagtatttgcgcggtccctgccaactggccaaccgattcagcgaggagctgatcatgcaggtggtgggtgtgctggaggtgaacgccttcgaggcgcgcagcccgaagggctatccactgaggtgcctctttccctataccggcattctggcccacaactgcgtgcccaacacatccaggagcatctatcccagcgagggatacaagtgagttgtaaatagatttgtaaattcagttctctagttcaagatgtctagaattacatttccgctgttgcacatctaaaataagtcctcctatatttgtttctcttccaaagaatccgactgcgcgccatggtggacttggaggagggtcagcccctgcaccacagctacacctacacattggatggcactgcccagagacagaagcacctgaagcagggcaagttcttcacctgccaatgcgaacgctgtctggatcccaccgaattgggaacgcacttctccagcctgaagtgtggtcagtgcgccgagggattccaagtgcccaggcagccaacaggtgagcgaaaaagatcctctagaaagtgataagctgaccttatccactacgcagaaccggacactagttggaactgcgcgaactgtggctccgacaccagcaatgcggatgcactggcgatgctccaatccctgcaatccgaggtgaatgccgtgcaagcgctgcccatggcagccaagcggctggaggagatcgaacgactgttgcgcaagtacaaatcactgctgcatccgctgcactttatagccaccgggctgaggcagttgctcatcgagatgtacgggcgagtacagggctacgagatggtgcaactgccggaccaccaattggagcgcaaggcggagctatgccgccaagtgctgagagtgctgaacaccttcgaaccgggtctgagtcgaacacgcgccatgaatctttacgagctgcacgtgccactggtgctgctggccaaaagtggcttcatagccggcaagctgaagggcggcgagctgcgtgcccgcctcgtcgacgccatagatctgctgaaggagtgtgtggagatcctggagttcgaggacaagagctcccaggagggagtgctgtgcgttgtggccaaacaggcgctgaaacagctcacactgagcgtcgagggactgggaagcgaactcgattgattgacttatgcatatcggttagctttattgggaacagttctgggtttctagggacacaaactgctgatgttggtgttacatttaaaatcttattggtgcgctggtcgatggtcgtaaatgtcaaaagaacaataaactacaaaactaaacagtgattacaattattacaaactaatgatgcacagtattttctatttgagtgtttaatctccgttttatttcctttttggtatatgcgtcattcttcgggtatatcgtaaatgcttttgataaggacttagtttctagctcggtacatattgctatgtagtattgtatacagttgagatttttctacgtctcaaactagaaggtgctgcttacttggatactggtaaaaaatacaccgggtggccaaagaatgcatcggtgtacaaataatcaacgcaacattcgctggcattctaaagcaagcagctgcaaaaagttacttacaaaatagccgtgttcattttgagtatgctcctgttggccgccacgctgctgctttctatgtatttataattttaaaacattataaactaaagcataaattaagttggaatctgcatataatacacaaaacgaaatacgattcaatttgactggctgcgggcagggggataggtcgtttaaaaataatcacacacacattgattaaaaactaaaaacactcgggggctcttttagccgcacagcaaacgcaaggacaaaatataaagaatatttcctgaccctagacctcgtggctcagtagaggcgtatcatggtagcgggaggcatgattgagactggtgcagggcagcagccacagcgccggatgtccgcgtccgaacacatccgccagcagctggtacttgcgccgatttggacgataggtgcccttctgctgtatcgcctccacggccgtctcgtcgtacagaatcgcatgcagctggtccaccatgatggccgtaacgaacaggccgaacagcgccgacac

SEQ ID NO: 33647 - DNA, 1524 bp, DROSOPHILA
atgacatcgccgccaacgctgtcggtgaataggacagcggttcagtggagtccggtctgcggacgctatctggtggccaagggagcgatccgtggccacggtctgctgatcgaggagctgccctttgccgtcgggcccaagtgcaatggaccggtggtgtgcctgggttgctacgaacccaacccagatccggaggaggagctgtgtagcgaatgtggctggccgctgtgcgtggagtgcgcccaacaagcggataacgcccatttccgcctggagtgcagccagctgaaggatgctcgggcacgattcttccgcctgcccagcggcagcaggcactgtccgcaattggactgtattatgccgctcagagttctgttggccaaggaggcgaatccggagcgatgggacaacgaggtggcacccatggagcaccacaaggaggagcgccaaagggacgcggatgtctggcatgcggatcgcgttaatatcgctcagtatttgcgcggtccctgccaactggccaaccgattcagcgaggagctgatcatgcaggtggtgggtgtgctggaggtgaacgccttcgaggcgcgcagcccgaagggctatccactgaggtgcctctttccctataccggcattctggcccacaactgcgtgcccaacacatccaggagcatctatcccagcgagggatacaaaatccgactgcgcgccatggtggacttggaggagggtcagcccctgcaccacagctacacctacacattggatggcactgcccagagacagaagcacctgaagcagggcaagttcttcacctgccaatgcgaacgctgtctggatcccaccgaattgggaacgcacttctccagcctgaagtgtggtcagtgcgccgagggattccaagtgcccaggcagccaacagaaccggacactagttggaactgcgcgaactgtggctccgacaccagcaatgcggatgcactggcgatgctccaatccctgcaatccgaggtgaatgccgtgcaagcgctgcccatggcagccaagcggctggaggagatcgaacgactgttgcgcaagtacaaatcactgctgcatccgctgcactttatagccaccgggctgaggcagttgctcatcgagatgtacgggcgagtacagggctacgagatggtgcaactgccggaccaccaattggagcgcaaggcggagctatgccgccaagtgctgagagtgctgaacaccttcgaaccgggtctgagtcgaacacgcgccatgaatctttacgagctgcacgtgccactggtgctgctggccaaaagtggcttcatagccggcaagctgaagggcggcgagctgcgtgcccgcctcgtcgacgccatagatctgctgaaggagtgtgtggagatcctggagttcgaggacaagagctcccaggagggagtgctgtgcgttgtggccaaacaggcgctgaaacagctcacactgagcgtcgagggactgggaagcgaactcgattga

SEQ ID NO: 33648 - protein, 507 aa, DROSOPHILA
MTSPPTLSVNRTAVQWSPVCGRYLVAKGAIRGHGLLIEELPFAVGPKCNGPVVCLGCYEPNPDPEEELCSECGWPLCVECAQQADNAHFRLECSQLKDARARFFRLPSGSRHCPQLDCIMPLRVLLAKEANPERWDNEVAPMEHHKEERQRDADVWHADRVNIAQYLRGPCQLANRFSEELIMQVVGVLEVNAFEARSPKGYPLRCLFPYTGILAHNCVPNTSRSIYPSEGYKIRLRAMVDLEEGQPLHHSYTYTLDGTAQRQKHLKQGKFFTCQCERCLDPTELGTHFSSLKCGQCAEGFQVPRQPTEPDTSWNCANCGSDTSNADALAMLQSLQSEVNAVQALPMAAKRLEEIERLLRKYKSLLHPLHFIATGLRQLLIEMYGRVQGYEMVQLPDHQLERKAELCRQVLRVLNTFEPGLSRTRAMNLYELHVPLVLLAKSGFIAGKLKGGELRARLVDAIDLLKECVEILEFEDKSSQEGVLCVVAKQALKQLTLSVEGLGSELD

SEQ ID NO: 33649 - DNA, 2567 bp, DROSOPHILA
ggaattgatgcgacatgcgttacgtaacggaaattcgccaggcacttttccatcgatctctctgcttctttgcccccttttttcgccggcagctgctgccaatgaactgcgaaggcattggtgtgcgtggactgttcatgtgtggatgtgtgtgtgacagctaaccggcttaatatcccctttaaatttcggatttatcaattaattattgcgtgatttggtgataagaagctcgcccatcgtcatccaacaaaaaagtgctcagcccttttgcttttcgttcatgcgcgtgtctacttgcaattttttcatttcgaggttatgaaatcactggcaccgaaaatcctgattttccttctacccataggggtatccatcacatttcactgaattttgagggggtttactcctgagctacttacttttgatgagttttagtttggttagagtgtaatgcgaaacgcagaggaacagagacaccacgacaaacgtacaccaaaaaattttgtaattctgtgccttagtgttaccaaccctaaaaattcgtccaataattattccctaaaacaagccgcagatatactatctggtaacgctgcgtcactcttaatggcaatggtcacactttttgtaacggaaatttgaaaactaacggttacttaaaataattattgaaattagaattcaatcattctattaagaaattcgttatcttaagaacaattaacttacatcaaagtgttttttttttacataaaagggtttcctgcaaacgaaaactttaaagttgtggacaagtaaatgggctttaaaaaagttataatccaaagcaatcaaaatgcaataaatatattacaactttattgattgacaccaatgaagtgtgtgcgatgctctttttatttttagacgaatctgcgtgcagggccgccaatcgaccgcataatcccattcggatgggccaaaagcgagaccagtgcatttgccgtgcggcgacagaatgttgaaggcccgtctgcaggaggacgccgtgctgggacgctgcttggccacctctagctccgtggagcggggcgagctggtgctggaggagctgcccttcgcacgcggaccgaagcgcgacagcggaatcgtgtgcctgggctgctaccagttcctgcagttcggagaggacggcgattcgctggaccgctgcgaactctgcgattggccgctgtgcggatcgtgcgccgacgacgaagacgtcacggagcaccgcggagagtgccaggtcttctccgccgcacgtgtcactttcgccgggaatgtgagcgatgatggcgtctgcccgcagttggattgcataaccatattgaggttagttcgcgggcgctccagcggggcgggggtgatggtgctgggtacatccgtacagcaggggctactgggtgctactaggggaacctgggcggtctgtccgaatattagttttggcagcagcggcccatttctcgcagttcgcaggctagccggcatatacagattctcatggcgactctacgtcaaagaaggcggacggatggattaacaagtctgtgaaagggacagtggagcaaatcgcacagaaaataaaaaataaatagctaaatttaaagtgcatgaaagtaaggagaaaattatggcatgaaacaagccatatttgtacatattattatgacagaataattggtatatgatagttgcggcgcgttatgatcaatgtaccatcatgtttttatatatttcgtagcaaaactgaactgtaagcactgtgaattattatttaaataatgttaagcacatgtttaaatagatcggtgcttagtacttagaaatagaactaacaaagccaagcaacttaaaagttacaagcaacttaaaagttacaagcaacttaaaagttacaaccagtaaattatttaatttatgaaaatgtaaggtattttagttattatagaaattgaacaatgttttctcaagacaatttgttcaaaactaaaatttctcacctaggacctcgcatgcccactgtgcccagcaattttgatgctttatgtcggagcaggcagaaatgtagtcatgtagtggggaggaggcatcatctgtggggtgtgcccatgacatgagatctgagatctgagtgcggccagccggcatcagtcagcgaaatgacatcgccgccaacgctgtcggtgaataggacagcggttcagtggagtccggtctgcggacgctatctggtggccaagggagcgatccgtggccacggtctgctgatcgaggagctgccctttgccgtcgggcccaagtgcaatggaccggtggtgtgcctgggttgctacgaacccaacccagatccggaggaggagctgtgtagcgaatgtggctggccgctgtgcgtggagtgcgcccaacaagcggataacgcccatttccgcctggagtgcagccagctgaaggatgctcgggcacgattcttccgcctgcccagcggcagcaggcactgtccgcaattggactgtattatgccgctcaggtgaagcccagcg

SEQ ID NO: 33650 - DNA, 567 bp, DROSOPHILA
atgttgaaggcccgtctgcaggaggacgccgtgctgggacgctgcttggccacctctagctccgtggagcggggcgagctggtgctggaggagctgcccttcgcacgcggaccgaagcgcgacagcggaatcgtgtgcctgggctgctaccagttcctgcagttcggagaggacggcgattcgctggaccgctgcgaactctgcgattggccgctgtgcggatcgtgcgccgacgacgaagacgtcacggagcaccgcggagagtgccaggtcttctccgccgcacgtgtcactttcgccgggaatgtgagcgatgatggcgtctgcccgcagttggattgcataaccatattgaggttagttcgcgggcgctccagcggggcgggggtgatggtgctgggtacatccgtacagcaggggctactgggtgctactaggggaacctgggcggtctgtccgaatattagttttggcagcagcggcccatttctcgcagttcgcaggctagccggcatatacagattctcatggcgactctacgtcaaagaaggcggacggatggattaa

SEQ ID NO: 33651 - protein, 188 aa, DROSOPHILA
MLKARLQEDAVLGRCLATSSSVERGELVLEELPFARGPKRDSGIVCLGCYQFLQFGEDGDSLDRCELCDWPLCGSCADDEDVTEHRGECQVFSAARVTFAGNVSDDGVCPQLDCITILRLVRGRSSGAGVMVLGTSVQQGLLGATRGTWAVCPNISFGSSGPFLAVRRLAGIYRFSWRLYVKEGGRMD

SEQ ID NO: 33652 - DNA, 2297 bp, DROSOPHILA
atcgcattgctatcgctgtgctcttatcgaaatgccttatcgtcttgttatcacccgttactactaagcggagtttttaaattcaaattttttggtgcgttaaaactatgcataattataatagcttgcttaagtgtaatttgccgattactttaacaaataaaaagatattaatagagtgtatggtatttctaatcactttgattttgtttctctaaaatattactcatcaaattcgaaaaaccgctgattgcataaccactgctttgtcgtttctccttttttttattacaaaaaaatcttacagagatacgagccaattcgcaatactgataattaaatattttttgcaagcaaatcaggcgcagatgatttgctgtaatttagccactaactgcttctcttccttttgatcgtcttacgcaaaatggaaaaataagaaaccaaaaaatgcacagccgcggcggcaatttgtaaatgactcttcaatcttcaaagactggtaattgttaatattttacgttcaggctattaatatgaaccagatagcacctgaaagaccactttgcggccgagtgttcactggaaggttaaatgccacttgacatttctgaagtggcgcttaaccttcgcatcaaaattggacaaatgcccaagaaaataaaaaatttccaataaaaaatgtattcaccttaatgggtcgatggggatattaagctgggaagtaataacactttttttcggtactactactttgtgccaccattttggctttacaaaaaaccagaaacgaagcgaaatgaaagagttaaagctttccagattttcggggcttccagcggcgcagctcagcttataaaacgggcattgcgcctgcgcagccgaaacattacaacaaacgacgcgcgcaaggtaagaccataaccaaatccagtccgcatcgagcgccactgaatccgtgcatctcttgcagttgaatcccctcgagaaaacccacaaaatgaaagtgttcgcgctgtgttcgatgctcgccctgctcctggctggtgcccaatccctgccccagaatcgcgagggtgccgcctacacgaacgaggcgatccggcaggcgcagcagacgcttctcatccccaaggatgcccagatccagaacgtgcaggagggcatcgagctgggcgcgtacgagcagatacccggcaaccagcgcatcaatctcttcgagatcctcggcgaccaggtgccctccgaggtgataaacaacctgcagtcccaggtcgaccagatcggtcgcaactaagtcgtaggaccacttccttggttagctcattgcatttcgtcctcattgttaagtttctcactaataaaacgaaaacattacaagtatttaatcgcagcgtttatttaccacccaaaacaattggaaaaaaaaatccgaaaaaaatattaaaagcgaaagtgatcctccccgaaaaccagttggttcctctgcaaacgaactctcgaatcgaaacgagtgatttattggtttgatttgtggctttttcctaacgatcttcgccgactttctcctcgctgatcccgctgcgcatacgaattaacaataaaagtcggcacattgctatcgcatggcatggtatcctatcctcaaccttgttacgtaacccggggatgggaatggcgatggagtcgctggtaacccgagtggttgccccgccggcaacttttgtgctgcggtcgtgatgcaacagttgtcgtcgtgattgttttcctcggacttttatttatttttttttgtattttgtattttgttgctttttgctgggcttcggtttgtttatttaatttctggtaattgccgccacatgcacttgcatgtgtaatgagttgtacgtggagggggcgtggcatgcccgcaggtacagaggggctgcttgcataacatctgggtgggtccgatgatcgtagggtattttatagggccctgatttttgcatcatttgtggtaataaatattcccaaatatgatatgaaccacttaaaacttttatcttgtgtgtttagaattacctcatttttatttcgtacttcatacattgttaaatgagcttcaatctaaatttacgctagttaaagtattttcataatatattttaattatctcaaaaattctgtgtggtatgtgtgtgagtgatagtgtgcacgatcatcgcctaaataaattatgttcatataggtaattaattatttattatactcgtacgtactaactaaagaatgactgcgttttcattttgaca

SEQ ID NO: 33653 - DNA, 297 bp, DROSOPHILA
atgaaagtgttcgcgctgtgttcgatgctcgccctgctcctggctggtgcccaatccctgccccagaatcgcgagggtgccgcctacacgaacgaggcgatccggcaggcgcagcagacgcttctcatccccaaggatgcccagatccagaacgtgcaggagggcatcgagctgggcgcgtacgagcagatacccggcaaccagcgcatcaatctcttcgagatcctcggcgaccaggtgccctccgaggtgataaacaacctgcagtcccaggtcgaccagatcggtcgcaactaa

SEQ ID NO: 33654 - protein, 98 aa, DROSOPHILA
MKVFALCSMLALLLAGAQSLPQNREGAAYTNEAIRQAQQTLLIPKDAQIQNVQEGIELGAYEQIPGNQRINLFEILGDQVPSEVINNLQSQVDQIGRN

SEQ ID NO: 33655 - DNA, 2291 bp, DROSOPHILA
tggaaattaagttgtcatacgaaaaaaaaaaaacacaggatagtgggacatcccacgatgaaattatatgcactctgcgctatcctgctccttgccattgtggcagtccaaggatatcctggtatacacggtggctttggacacggaggacacggtggactcagtggcttgggaggacttggcggcttaggaggacgcgttggtttcggaggacccggtggctatggaggacccggtggctacggaggactcggtggctacggcggacccggtagctacggcggtggtggtggaggcgcagtagccactgccaacgctaatgcaaacgcaaactcagttggttacagtccgggtgcttactacggataaggaatgatgataacagcagtccagaaacggcaattgctttaaaaaataaacaaatgcataattattgcataaagactaagacatttttctattattacttttgccaaacgttatcaacacaatggccttaccttctatgtataatatactataaatataaatttattaatttttaattattatttattaagtgaagaatatatatataattttcgggttcaaaagttgtaatcaccggaaaaggaattttgtataaaatgtgtaaacagaagcaaatctaaggacttacatgataaactagtttttatagctgattatcataatgaatttatctgagcttttttacagcctgaaaatatactttaccaaaacatggcttgccaaagctaaccagttttcaattattgataacatagtatataagcatatactatacatataggtaatattaaacgtcatgcgtttttaatatatgtctaattaatgtgctaatcgaagcccccatatatatgccgatacaatatcgattctgtgattttttttgtttttcagataacaagtcgtccacctgtcacggatgctggtataaaagaggccagcacgcgatcacaaaacatcgcaatctctaacgatgaagttcctggctatctgcatttttctaatcttcgccctggtggccgttcaggcacatcctggtggattcggcggattcggtggaggcggtggtggcggtggtcgcggtggaggcggtggaggcggtggagtcggtggagtcggcggttcgaacgcagttgccaacgcgaatgccgctgcaaccgccgacagcagaggaggcggcccagcttccgcctcggcctcggccactgcaaccgccaacgccagctccggaggaggtggaggtggacatggcagacatggataggctcgaaacggattcataactgtactctcgaaaagtgggcacgtccgctgacagacctactaaactgaaaccaataccaataccaataaatattaaaatgctaattctgtttttggaaatccaagatgttgttttcgtatattaggttaataaccagtttatgagtcgggcattatttatagatctaatgacgtcaaacaagatttctctagcctcctaaaaacagactaagttaacagcgggagctaatattagaaactatgttttaaaatgtatctaacaacttgaattacaactgaaaagtatgcattatatatatatagtttttgcaaatagttagtgcatctcaattttaatttaatttatttttatatttaaaatcattaagctcatttcattcatcatttgtttgtacagcttacccggaaatccaaacaatttgtgagttttttttttttgtgtgattactttttttatgtaattaagtaattgcatttgccacccacaacaagtcttgaatttggccacttacggagtgacacactcaatttcagcaggtctaataaatcgaagatattttttcacaaatgaagtccgacgtctcttgatatattgtcaagcttcttaaaactcgggtttgcaatatttaaatttgcaaattatcaacatctggataagtttctacgtttacggtagccaaacctttccgaaataaaactagttttataccccttaatcgtacagtaatagggtatgctaggcttattagaatgtatgaaacagatagaaggagcattttcaatctatattgcattcagattttagggacgttgcacttttgaaaaatgcttttgatatttttttgtttaattaccattttttcctatctattgatgtgccaaatgaactagttgagtaacgggtatcagatagtcgaggaactcggctatagcgttttttctagtttttaattctagctaaattatctacatattattat

SEQ ID NO: 33656 - DNA, 291 bp, DROSOPHILA
atgaagttcctggctatctgcatttttctaatcttcgccctggtggccgttcaggcacatcctggtggattcggcggattcggtggaggcggtggtggcggtggtcgcggtggaggcggtggaggcggtggagtcggtggagtcggcggttcgaacgcagttgccaacgcgaatgccgctgcaaccgccgacagcagaggaggcggcccagcttccgcctcggcctcggccactgcaaccgccaacgccagctccggaggaggtggaggtggacatggcagacatggatag

SEQ ID NO: 33657 - protein, 96 aa, DROSOPHILA
MKFLAICIFLIFALVAVQAHPGGFGGFGGGGGGGGRGGGGGGGGVGGVGGSNAVANANAAATADSRGGGPASASASATATANASSGGGGGGHGRHG

SEQ ID NO: 33658 - DNA, 2312 bp, DROSOPHILA
aagctcagacattcagcagcccacaagctgatcgctgcccacctgcaaaaaaaaaaataaaaaacagaaaaagaaaaaccggcaatctcctcaagagttgtcgtcatacatttttgggctttatgttccggcatggacgcagttagtccgatggacagacacgtggaccagtcaagctgactggtttggtgtggtcaggtctgcaggcttgggtcgcctggcagattattcattcatcgatcggcttgtgaaaatccatgaatccatgaagaagcacagggcttttttgggggttttgcaatgagtatcacgtttgctatgcctcaccctcgatggaatttgaaagcaatcggctataaaacaaacaccaagcgctaatttccatttgaacttgagcggcagtcgctaaactgcatgttgaatatggttcgaatgaatgcggatcgaaggttttggcgatacgggtttttttttttttggccacttaactggcctttatttactaagccaactgacttagtaagctctaggtcgtgggatgtaccgatatcaggcagttagtcataagcttaacgggatgaagaaaaatatatatattaagatggtaaccacaattgcagaaatgaaattaatagattagttatttctatcataacattgaagtaatttctctatctctccattttccttgcttatgaataaatttatcctggacatttaatgacccaaattactacagtagattgatttgtaaaacaaaaagattcgcaaatatttctcactgtatgcttgctacagtaagctctggctataaaagcttcattcgcagaaaataaaaacaacttctgttacagccgaaaactatgccacttatatatttaagctctagttaaccattgttaacaagttaagtagacttatttttgctttctttgtttcattatggaaattaagttgtcatacgaaaaaaaaaaaacacaggatagtgggacatcccacgatgaaattatatgcactctgcgctatcctgctccttgccattgtggcagtccaaggatatcctggtatacacggtggctttggacacggaggacacggtggactcagtggcttgggaggacttggcggcttaggaggacgcgttggtttcggaggacccggtggctatggaggacccggtggctacggaggactcggtggctacggcggacccggtagctacggcggtggtggtggaggcgcagtagccactgccaacgctaatgcaaacgcaaactcagttggttacagtccgggtgcttactacggataaggaatgatgataacagcagtccagaaacggcaattgctttaaaaaataaacaaatgcataattattgcataaagactaagacatttttctattattacttttgccaaacgttatcaacacaatggccttaccttctatgtataatatactataaatataaatttattaatttttaattattatttattaagtgaagaatatatatataattttcgggttcaaaagttgtaatcaccggaaaaggaattttgtataaaatgtgtaaacagaagcaaatctaaggacttacatgataaactagtttttatagctgattatcataatgaatttatctgagcttttttacagcctgaaaatatactttaccaaaacatggcttgccaaagctaaccagttttcaattattgataacatagtatataagcatatactatacatataggtaatattaaacgtcatgcgtttttaatatatgtctaattaatgtgctaatcgaagcccccatatatatgccgatacaatatcgattctgtgattttttttgtttttcagataacaagtcgtccacctgtcacggatgctggtataaaagaggccagcacgcgatcacaaaacatcgcaatctctaacgatgaagttcctggctatctgcatttttctaatcttcgccctggtggccgttcaggcacatcctggtggattcggcggattcggtggaggcggtggtggcggtggtcgcggtggaggcggtggaggcggtggagtcggtggagtcggcggttcgaacgcagttgccaacgcgaatgccgctgcaaccgccgacagcagaggaggcggcccagcttccgcctcggcctcggccactgcaaccgccaacgccagctccggaggaggtggaggtggacatggcagacatggataggctcgaaacggattcataactgtactctcgaaaagtgggcacgtccgctgacagacctactaaactgaaaccaatacc

SEQ ID NO: 33659 - DNA, 312 bp, DROSOPHILA
atgaaattatatgcactctgcgctatcctgctccttgccattgtggcagtccaaggatatcctggtatacacggtggctttggacacggaggacacggtggactcagtggcttgggaggacttggcggcttaggaggacgcgttggtttcggaggacccggtggctatggaggacccggtggctacggaggactcggtggctacggcggacccggtagctacggcggtggtggtggaggcgcagtagccactgccaacgctaatgcaaacgcaaactcagttggttacagtccgggtgcttactacggataa

SEQ ID NO: 33660 - protein, 103 aa, DROSOPHILA
MKLYALCAILLLAIVAVQGYPGIHGGFGHGGHGGLSGLGGLGGLGGRVGFGGPGGYGGPGGYGGLGGYGGPGSYGGGGGGAVATANANANANSVGYSPGAYYG

SEQ ID NO: 33661 - DNA, 5137 bp, DROSOPHILA
aagcgaaaaaaaaaacaaataaaccaaatttatgcttaaacatttggcaaaaatcggccgaatacaaaacatgcagaaacggagcaggaaaaaaacatttcgctggcttactttgcgtaccacttcctcatgttgtccaaccagccggcaagtcaattggccaattgcagtgtttatattattttctggccaacaacaggagggtctattcgctgccaaggttaattaaaatgccagtcggcccgcagagcctctctttctctagctttttcactcattccagctgattttcagtttgtttgcttcgaaatttgggtaatcgcgtgtttataacttaatttcaacaatggtgttatgagtttttcttatggccacccactacccgaccggcttacataatcgcacagacttatcaaacgtatcacggacttctgaaaaacctataaattcatttgccagcaggaagaaatgtatgctgtcatacagtgcgtatgcgtgatacgtgactgggtttaactatggcgatgtgcttatagaggttgccgcgtgtattttgcctcacctgtagttccaataaagcatcgccaatgttttgctttatagttagcccgatacttttgttttcatcggtgtcaataaagcggttctataaggttctgtaagccaatatagtggctagaatgtcgttttacctgtctgcctctgaaataatctaccacaactatttcacttagctttaacttctctaagatggaagggttaacatccaggcacaagcctgagaggataggctcaaatcctggaccacaacagcttgtctggtaactttattaacttgttgatgctgcaaattaaaattcattacttccaaatgactgtggttaaggccaggcgattgcctccttgatgacgataacgctgccagtggataccggtggtctcctccacctgcccttccatttgaactatgcaaattaacggggcaaaaacaaaaagcagtatgggcaggtggaacgtagagcatggcaactcaatttcacactaccatgatttgcacttctaacacctttctctcaatctgacgcatttttttcctccattttttcgctcttccagcccaaattaatacgcaaatatggatatccatcggaaacccacacggtggtgacgaaggatggctatatcctggaaatgcatcgcattcccaagaagggagcccagccggttctcctcatgcacggaattcttgatacctctgcaacatgggtgcttatgggacccaagtcaggattaggtaagctattttacagggttaaaatatttacttttactcaaaaaaaaaggacaatatcgtttggctcaaaagtgattttattttaactaaatttttggctttaaaaaactgttctcaaatgagtaagcaatttgaatactaactaaaagaaaacatttagcgataacttcatctaaaataaaatattatcaacgtaagattgaattatttaaatatatatatacttcgcatcgatggtttttgcaattttcagtactccttttgtatcatatgcagaggtatttaataaaatttccaaaatctatattgagtacctgcctgtgatgttaattaatcaaattaaatatgttatccaggctacatgctctccgatctgggctacgacgtgtggatgggcaactctcggggcaatcggtactccaagaaccacaccagtttgaatagcgactatcaggagttctgggacttcaccttccacgagatgggcaagtacgaccttccggccaatatcgactacatcctgagcaagacgggatacgagcaggtccactacatcggtcactcccagggaacagccatcttctgggtcctgtgctccgagcagcccgcctacacccagaagataacctccatgcacgccctggcgcccatcgcctacatacacgacatgaagagccccctgttccgcaccctggtcctcttcctcgactttctcacggtgggtggtgcttcgggtttttggatttgggcttggagccgccacatgcggctggctcattttccattttccatgccgtatttccacccgtctcatgccgtgttcttttcctgcaggccgccacacgaatgctgcgcatcacagaattcatgcccaacacaaaattcctagtggaccacagccaggttgtgtgccacgacaacgccatgacgcaggacgtctgctcgaatatcctgtttttggtcgccggctacaactccgaacagctgaacaaagtaagcgggggcactgtgaaaaacggttgatccatatactgaataaaaacttaaatggtatttccaattaacgtaaggtaggaagagatttcagcagttgatttagaagataaatatatgctctttagttatttatgcttgttgtaaatttattagctcgcagtctatcttttattggcacaattttagttcccattcccattttatgcagtgttctagaaatggtagtgtgatccgtaggtgggattggattacgggtgtgttttggccacgatttcgcgtgactcgccaggcaaactgagagagccatcgatttgggtgtccccttcgattgtcttcattaagttggcacttaattaacccgcctcaatcggattgtcgatagggatagtttgcatatccgtttgtgccacaacatgtcggtgcggaatgtccttaattgctcacgaccgtttgtgagcgcaaattacgtaaagagtgtgcaactcaatacatttttcggtacccagttggcccttagtcggtgcacagttcagatgggcccactaactaactcggggctgcaattatcgatgggttaaacgtatttaaacactaggttagtcccccaagcggccacgatgtttgcattaaatatgctcaatgcccgggcaaaactttgcccgataatcgaccgcaagctaaacacccgcagaatcaaaattatggcccacaaagtgcggcgggcttaaattacttgaacaagatgtaggtgttgggatgagggatagtagctatatgtaggatacagaatgtgggggcatgacctgacctggtgtctgccattgaaagggtgtcattatctattatgtcaacggccgccaagagtgggcggcatcttcttgtttgaaattggcataattaactggcaggccgggataccggagcaccgaaaacaagcgacaatgcatgcaaattaggcgcgattccatggcccgacatgaacctggtcacccagttgctcctccctccacgcccgcctccatgtgttatatgtatgtgggggaataataccatgctgggcattcggaacatgggtgcactgttgttacattgtgcgggaaacaggtgtgggagtcggaatggcgattagccatacatttacatagattcgatttatttacttaaaatatgaaaacaattccttgtagaccatgcttcctgtgatgctgagccacacgccatcgggagcctcgattaagcagctggagcactttggccagctgatgaagtcgggccatttccggaaattcgaccgcggctatctgcgcaaccagctggagtacaaccggatgactccgccggactatgacttgtccagggtgaaagtgccggtggcactatattactcggtgaatgatctgcttgtctccaccacgggagtggaccgtttggcccgcgagctgccgaatgtgatcgacaagtatttggtgcccatggagcgttttaatcacctcgacttcctatgggccatcgatgtgaagccactggtgtacaatcgcctcgtgcgaaatgtgcgccgggtggagaatcatcgggccaagctcacggccaatttggccaattacctggccatgcagctgcagcgccagcagctccgccaacagatgcagcagcaaatgatggagggtctgccgcccaatgtgcacctgccccacggactgggcatggaaatgttggccagggcaaccacctttgctccggtcacacatcccaccacaaccatgaccatgcccacgacaacgacggagaatgatgcggaggatgaggtcctgactaccgccgccaccgcaacggaagtaccggcgtgactttgacgccgcctggccaagctcgtttcgttccacttccatatgactgtgatgacatttttaacaatttaccgatcgcagcatcgccaagttctccggctggaggaccgcaggtgcaatcactcaggcgcaatccattcccatccatccaagaagcatcccacagagagccccaacttcgatacgtccactttttacaccagaattgttcgattcgtcttctgtgctactctcaatactttaatttatgtgtacaaatttatgagtaactttaaatgtacgattatttttaataaaagacatactttaagaaaatctgtctcaatgcgttttgggcaaaaagaaaccagaaattcaaacaatgctttgtgtatctttagaaatgggatttccatcatcaaaaaaaacaatgtaaaacatactagtttatttatcatggattattatttaaataattcatcgtcttctaaatggaccgttaaaacgaagagtttaaagctgtgtgaatattttacattttacatttacatcttactgcccacatgcaaaagtatgcaatgttttttgtagatttttctgattgcacccatttttatactacctttgcatatcattaagcaatgtgatctaataaaatcgtgttaagatatatttaatagcagactgggccaaaaaatcgcaaacttttgctaaggccaagcaagtatatattttggtgaaaacccactgcggttttagtctgccccaatggctggcaaagatgaggagctttcaagaagaaggagcggaaaacagcacaaacacttaattgcgacttaaaacgcaactcatttcgacagccagggtgcaaaactttatcctggtcgcagcaggagtcaaagccacaggaccagcaccgggtctacactggcaaaaattatagagaaattgcaagctctgtaaagtctttaccactagatattctaaacacttgcttaattcttagaaacttttgtttcag

SEQ ID NO: 33662 - DNA, 1371 bp, DROSOPHILA
atgggcaggtggaaccccaaattaatacgcaaatatggatatccatcggaaacccacacggtggtgacgaaggatggctatatcctggaaatgcatcgcattcccaagaagggagcccagccggttctcctcatgcacggaattcttgatacctctgcaacatgggtgcttatgggacccaagtcaggattaggctacatgctctccgatctgggctacgacgtgtggatgggcaactctcggggcaatcggtactccaagaaccacaccagtttgaatagcgactatcaggagttctgggacttcaccttccacgagatgggcaagtacgaccttccggccaatatcgactacatcctgagcaagacgggatacgagcaggtccactacatcggtcactcccagggaacagccatcttctgggtcctgtgctccgagcagcccgcctacacccagaagataacctccatgcacgccctggcgcccatcgcctacatacacgacatgaagagccccctgttccgcaccctggtcctcttcctcgactttctcacggccgccacacgaatgctgcgcatcacagaattcatgcccaacacaaaattcctagtggaccacagccaggttgtgtgccacgacaacgccatgacgcaggacgtctgctcgaatatcctgtttttggtcgccggctacaactccgaacagctgaacaaaatgcttcctgtgatgctgagccacacgccatcgggagcctcgattaagcagctggagcactttggccagctgatgaagtcgggccatttccggaaattcgaccgcggctatctgcgcaaccagctggagtacaaccggatgactccgccggactatgacttgtccagggtgaaagtgccggtggcactatattactcggtgaatgatctgcttgtctccaccacgggagtggaccgtttggcccgcgagctgccgaatgtgatcgacaagtatttggtgcccatggagcgttttaatcacctcgacttcctatgggccatcgatgtgaagccactggtgtacaatcgcctcgtgcgaaatgtgcgccgggtggagaatcatcgggccaagctcacggccaatttggccaattacctggccatgcagctgcagcgccagcagctccgccaacagatgcagcagcaaatgatggagggtctgccgcccaatgtgcacctgccccacggactgggcatggaaatgttggccagggcaaccacctttgctccggtcacacatcccaccacaaccatgaccatgcccacgacaacgacggagaatgatgcggaggatgaggtcctgactaccgccgccaccgcaacggaagtaccggcgtga

SEQ ID NO: 33663 - protein, 456 aa, DROSOPHILA
MGRWNPKLIRKYGYPSETHTVVTKDGYILEMHRIPKKGAQPVLLMHGILDTSATWVLMGPKSGLGYMLSDLGYDVWMGNSRGNRYSKNHTSLNSDYQEFWDFTFHEMGKYDLPANIDYILSKTGYEQVHYIGHSQGTAIFWVLCSEQPAYTQKITSMHALAPIAYIHDMKSPLFRTLVLFLDFLTAATRMLRITEFMPNTKFLVDHSQVVCHDNAMTQDVCSNILFLVAGYNSEQLNKMLPVMLSHTPSGASIKQLEHFGQLMKSGHFRKFDRGYLRNQLEYNRMTPPDYDLSRVKVPVALYYSVNDLLVSTTGVDRLARELPNVIDKYLVPMERFNHLDFLWAIDVKPLVYNRLVRNVRRVENHRAKLTANLANYLAMQLQRQQLRQQMQQQMMEGLPPNVHLPHGLGMEMLARATTFAPVTHPTTTMTMPTTTTENDAEDEVLTTAATATEVPA

SEQ ID NO: 33664 - DNA, 2252 bp, DROSOPHILA
ttttgcggccgaacgaaagcgaaacgaaacgaaagacttaggaaaaaaacttgattggcacgcgccaaactctgtttgcgaagtgggcaagaggggcagggaggttttgttgcattgggggcgtcgaacatttcggtttgatcagctgactaatccgggggagttaagctaggtcggaaaaatttacactcggagaaaagtttgtgatttgaattttatttttaagatgcaaagtaatcatactatacattactatattaatgtgccatagcttaatttaatttaactagtatattaaacacaatgacgtaaagactgtagtaattactcagaaacacaaataagttttataaaacaataataataggattagaaataattataataacgtttacaagtatgtatttacagtgcataatcacaagtgccaacaaacaaattgaacgcagcttatgcccgctttaaagctgatcactaccatccactaactcgcgatccacaatagccggctcgaacaagttggcccgcagatcgtggctgcaattcgagcctagctcagctcattctgcctacgaagcggccagtcgaacgacgaatctcaagccagacggttgccatcgcagatttttgatcccgcgccaagtgatcaagtgaatcggaatatccaactcatacaacgcgctcttcgtgggaattagttccacgatccaaagtcgatccgaaggataccggcgagacattcggagtgccaaaacgccacacgtaactgacaagtgtgacgaaagaggggagaaaaaaagatagtggcgacgtaaccgttacgcttaagtgcaagcaactgttgcatttgccaatttgccccattttgtgtgtccgactgagcgtgagtcgcttggccagccagtgagtagtgagtgagtgtctctggagtgagtgtcccagtgagtgtcgccttgagtgtttgaagtttgggtgcgattccttcccttccggccttccgatgcggtccaccgtcgaggtcaagggtcgcctgctgttgaccctgctgctacactgcctcgtcgctctcgaggtgtgcggacgggccggtgccttcaccctcctctcgccctttagctacagctccctgagcttcaagaacctgctcaactctgtgctgctctcgagcaaccccaacctggccggcggcggaaggaacctcaaatcggatgtcctagaagatgcatccctcattacggtgagtctttcgtaataaaatgtgctacgatacggataaatcaaatcagtatgtcacttttgttgattattgtttggtttaataacattgataataccattctgtggataaatattagtgaaatttaactattactgtggctgatatttttacaaaagcttagaaaatcattgtttcttcatttatcaattatatgcctttcatgtatttgtacctaaaacagtacttttgaagaaagctgttttgatttatgcgtccagtccaagtcggtcaaaacgccacgcttgagttgcctcttgcattgacattggttttccacggcaactttgtgttgtttctataataccgctgtatagattttctatacggcattatcgcgttctgttctggtatttactttggtcgagcagtttttgtgtgtcatataaatttacacttttcactccacgccgccgaaagaaagttcccgttctcagggttcgttgactcgacatattcgtgtgagaatcaagtattacggattttatttgagctgtccagtggcacctggtaatggccacctgtcgtgatcaactgcagttgccactgcactttccatccgcttccctttgttttttttttttttttgtttgaagagaaagggggagttgccgtaacttgtgtacatttcgtagcctttttatggcgttaatcatgtctaactttagtgagtgagctaacgcagcggcgagtacgtaactgatggatttatttctagagttcaggctaattaaaaggtttacgagccatcattgctggcgtgaagtaacgtcgcgaggtctatgacttaataggtgacagaatgaactgcataggggattccactttgggagaaatcgaatcaggttttatacttatttgcttatagttttcgaatccaccttcaacaaaacaaaagccgggcttagccttcattgaaatggatccaatacgaaacaagcgttttatggcagccgcagacatccgagttcgctta

SEQ ID NO: 33665 - DNA, 252 bp, DROSOPHILA
atgcggtccaccgtcgaggtcaagggtcgcctgctgttgaccctgctgctacactgcctcgtcgctctcgaggtgtgcggacgggccggtgccttcaccctcctctcgccctttagctacagctccctgagcttcaagaacctgctcaactctgtgctgctctcgagcaaccccaacctggccggcggcggaaggaacctcaaatcggatgtcctagaagatgcatccctcattacggtgagtctttcgtaa

SEQ ID NO: 33666 - protein, 83 aa, DROSOPHILA
MRSTVEVKGRLLLTLLLHCLVALEVCGRAGAFTLLSPFSYSSLSFKNLLNSVLLSSNPNLAGGGRNLKSDVLEDASLITVSLS

SEQ ID NO: 33667 - DNA, 4951 bp, DROSOPHILA
agatgcaatccatgagtgccgaatcctccacttccgcccatctagtacccaagatggaaccgcgcattcgaactaaagccgagctcaagggcttcacatttacgccgccggtgctcgttacttccacaacaaatgcttctagcacaatttcaccaccgaggacgccacccaaccagattaccaatcacattcagattaagctggagccagcgcctccgaaggcgaccgatttgggtttggatgatgaacaacacagtttgggtaacctgatggactggggcagcacatgtaataatctcgttgagcaacttatgagcaaggttgtggtgccaccgacattgccagccaacaaccccggcatcaaactggagctcagtgaagatgatctgccagtggctcgcattttaaagagacaacctttggcagcaccatctcttgctggcggagatgccgaatcggcaactactcaattaaccacaactaccaacggaatctcttcgtccttgggcaatggcagtggccagaagaagctcagcaaagtggagagggagaagaaacgacagcagcaggaacagcgaattgccgcccgcttggcgcccaaacagggccaaagcagttcatcggagagcgataccacagagcttcacaagcggaatacggcgcggcaaaagaaaccactactgcgaaagggacgaacgaggcaaaggtctccggaggcagctagcattcagcagagcagcgatgaggagcaggagaaggtgagccagcgacttagtcgcaaacctcgaacctccagcgaggaaagcaagacaaaagccacctccgccaaaaaggatgttaagaaggaggcgaagactccaagcaacaagaccaacaatagcgcctctctaaccaagatcaaaaagaagaccactgattcttccagcttaaacaaagccaagggtgatgagaaccccaagcaggagagccaggagagcacctcctcggagagtgaccaggacgacaatgacaatgacaatgacgaagaggaggaggatcaggaggaggacgaggaagagcccgaagaggaggacgacgatgaggagcaggacaagaagaaggagaagcgagtgggcaggcgtccgggaaacacgctcaaaaaacgcattgcccacaagctgaacaccatgactcgctcaaagcatcgcaaggagctcgaacttcagttggccaatagtaaggttctccgcaatgacaagatcatcaggaactccaccaccaaaattaagagaaagtatgtccgtaaggtggtggacagcaagaaggagatgatggtcacgcgtttgaggaacaaacgtggcatgaactctgatttaggagcgctgaatggtagaaactccaagctgaagggcagcaaggtgggaaatagtcccggtaaacccaagacatcccctcagcagcaactgtacctggaggaatatcgctataagttggctttaaaaatcccacacagcctgatctcgattaataagcttaacaaagtggcttcctcgctaccggacttggagcgccgtgatctcagccaggagctggcctgtttcaagagaaacagaccgaagaccaaagctgccagcaagcaggatttcacgccgaagtccataatcgatgttctccacttgagggtaaccaatggcagtacggctggcactcaaaggaagatctcagtctctgctccagcttccaccaatcttcagatccacagtgaaacctcgcaaacttccgcttctacttcactgtacgagcaatcccagcaggataacccaactgaaaaccaatccctagacgatatgagcaagcggcactttagcattttcgacaccaaagtgctgcagagcaaaacccgtacagaaaccaagttgcaaaagcacagggagatcatccgtgaaattttcgtcggcccggaacgtccggcgtcggctccgccagaatgcgtccaggaggcagatggaggagatgccattagttaccagaagtacgaggagttcctgcagcaaatgaacagcattgccagcgcgaatgatagcaaattggccaggagatctctcatggaggacaagtcggtcacggctccgcagtgtccgcacaagaggaagtatcgttgtaggaaaggcagctcgggatttgactatatacgaaagaagaagagaccagctccgactcagacgcagaaccacacgcaaaatcagagtcagagccaagtctccagtcagataacacaacacattttggaacacaatcagagtgcggcggatgagcgcttggaggatacggatagcaccatcgctggcagttcccatttgcctccaaaggtgaaaacggaaatggatgtctgtcgtgagatccaaaagtgggtgctcaacaaaggagttggtcagagtaccatgcacaaggctgctcgccagggcctaatcgatgtggtggtctactgcttggatcgtatgaatatgaatcctgaccaaaaggataacgccggctacactccactccacgaggcgtgcacccagggatggctggagattgccaggattctacttcaatacggcgcgaatcattcggaggcggctcaatctggaattaggccattgcacggagccatcgaaaacgatcacgaggaggtggtgcgactgttgctctcctatggagccgatccgttgctggcaacgtactcaggttggtgttggatgtttaactttgcatttcgaagggattgtaacaattgtacccttttgtttttaggtcaaaccccgctaatgttagcttcaagcaagttgatgcgaggcattctgcgcgctcatctcagcgatgcacaaagtgccgccgctgacatcaagccaatgcgattcaatgggccttgggagatatttggtgagtggaagcaaatagttctttgccattgcatacaattaaggataaaactaaaatatgaatgaatttgaactaaaccatgcattaatctcttccagatgctaaggagtatggttatgatatattcagtaatgtaccgaatacagcttgtgatatgagcagagctctacgtaaagaaaggaaggaggccaagcagcagaggatgagcagcaacagtgacaggaccagcaacttgaatggtctgttagcggaaaaaaaggaggagcagaagcccgaggatttggaccaggatcgggtgacaacaacgatcaagcagaacggggagacgagtgcaacaaagactggatcggcgactacgacgacggcaacaacgatggttaaattggaactgggaaccgacgaggatagcaataacaataagaacaacgaggagctgaatgctaatgtggaaaataatttagtaacaagcgttgtgaatgtcaagaatgaagtgaagaaggaagtggaagctgaagctgaaacagaagcggaaacggaaacgaatgcgaaagcaaatacgaatagtagcactaggctagacgaggatcagacggacatcgagacaatggatagtgaattgaatggtgatatttttgaatttgaagaggccgatgtgcccttgccaccactgtacttgctcaaagacgagggcagtgataaatgggtactactcaatgatttgtgcaatttacttaaagttaaatcgaaggatacgttgcttaacaaggtatgtgccatttagatgcgatatttaaatgaacttataacaaaatcttgttattttttttttagctctgtccgaacaacagcaatgccttggccagcagtcagaagcacctgctacgggagttcaagatagatgatttcctggagaaagccacctgcctgcagctgttgtgcgccggtgaaaagctgaacatgttcagttcgtcgaaggttgtgctcatcaaatacaacgacagtgtacggaacttgttgggcgttaagaccattttaatgaaattttaaccgagatatctttagcgattggacggggcaagatccagaaagatataaattagataatgatgaatggatgagcatagtactaactgaacatagagtgtaaagtgcaaacaaatatggaaaaactattagtacgaatataatagtagatttatatactatacatatgtatattttagctagtaactagtttttactcacacgtctttgtctttggaagataaaggattttataaaggaaattaaatttagagctaatgcaaagtgatacaaaggtgctatacacactcaaaacgaagaaaaaggaaatgaatggaaattttagagcgagaatattgagaaaatctggaatctttagggattggctgcaattatgcaataaaagtagaagaaaacaatgcaaggcagttagaaacgaggaaacgaacggaaaatgtatgccagccaatcagctaataaattgatatatacttacagataaatctagggatgaagtgtaatctatggtttttaaaaaaacaaaacaatctagctaaagtataaactaaataataattattgtaataatattaaagaagcaacaaaggcgtatttatgtattatgtatttttaaatgaaattattaacataatatataaagtatatgtatacacaatatgatccaactacaatgtaaatcaattttcagataggtttgtaattttctatgtaatgtacgtgtgtaagttttgtgcaactataaaaggaaaccacaaaaaactgaagaaatttaacaaaaaaaaaaaaactaataatgaaaaacaaaataaatgcaaagtgaaattttgacaatttaaaagtgcggtttcacttcaaaattttaacaatctcctggcatttgaaaacaaatatcgatccaagcttttattaaacgattcttcaaaattggtttaaaaggttatttatatataataatagatgactgaacaggtaaggtcttagataagtacttaaatatacttag

SEQ ID NO: 33668 - DNA, 2611 bp, DROSOPHILA
cgacaatgacaatgacaatgacgaagaggaggaggatcaggaggaggacgaggaagagcccgaagaggaggacgacgatgaggagcaggacaagaagaaggagaagcgagtgggcaggcgtccgggaaacacgctcaaaaaacgcattgcccacaagctgaacaccatgactcgctcaaagcatcgcaaggagctcgaacttcagttggccaatagtaaggttctccgcaatgacaagatcatcaggaactccaccaccaaaattaagagaaagtatgtccgtaaggtggtggacagcaagaaggagatgatggtcacgcgtttgaggaacaaacgtggcatgaactctgatttaggagcgctgaatggtagaaactccaagctgaagggcagcaaggtgggaaatagtcccggtaaacccaagacatcccctcagcagcaactgtacctggaggaatatcgctataagttggctttaaaaatcccacacagcctgatctcgattaataagcttaacaaagtggcttcctcgctaccggacttggagcgccgtgatctcagccaggagctggcctgtttcaagagaaacagaccgaagaccaaagctgccagcaagcaggatttcacgccgaagtccataatcgatgttctccacttgagggtaaccaatggcagtacggctggcactcaaaggaagatctcagtctctgctccagcttccaccaatcttcagatccacagtgaaacctcgcaaacttccgcttctacttcactgtacgagcaatcccagcaggataacccaactgaaaaccaatccctagacgatatgagcaagcggcactttagcattttcgacaccaaagtgctgcagagcaaaacccgtacagaaaccaagttgcaaaagcacagggagatcatccgtgaaattttcgtcggcccggaacgtccggcgtcggctccgccagaatgcgtccaggaggcagatggaggagatgccattagttaccagaagtacgaggagttcctgcagcaaatgaacagcattgccagcgcgaatgatagcaaattggccaggagatctctcatggaggacaagtcggtcacggctccgcagtgtccgcacaagaggaagtatcgttgtaggaaaggcagctcgggatttgactatatacgaaagaagaagagaccagctccgactcagacgcagaaccacacgcaaaatcagagtcagagccaagtgaaaacggaaatggatgtctgtcgtgagatccaaaagtgggtgctcaacaaaggagttggtcagagtaccatgcacaaggctgctcgccagggcctaatcgatgtggtggtctactgcttggatcgtatgaatatgaatcctgaccaaaaggataacgccggctacactccactccacgaggcgtgcacccagggatggctggagattgccaggattctacttcaatacggcgcgaatcattcggaggcggctcaatctggaattaggccattgcacggagccatcgaaaacgatcacgaggaggtggtgcgactgttgctctcctatggagccgatccgttgctggcaacgtactcaggtcaaaccccgctaatgttagcttcaagcaagttgatgcgaggcattctgcgcgctcatctcagcgatgcacaaagtgccgccgctgacatcaagccaatgcgattcaatgggccttgggagatatttgatgctaaggagtatggttatgatatattcagtaatgtaccgaatacagcttgtgatatgagcagagctctacgtaaagaaaggaaggaggccaagcagcagaggatgagcagcaacagtgacaggaccagcaacttgaatggtctgttagcggaaaaaaaggaggagcagaagcccgaggatttggaccaggatcgggtgacaacaacgatcaagcagaacggggagacgagtgcaacaaagactggatcggcgactacgacgacggcaacaacgatggttaaattggaactgggaaccgacgaggatagcaataacaataagaacaacgaggagctgaatgctaatgtggaaaataatttagtaacaagcgttgtgaatgtcaagaatgaagtgaagaaggaagtggaagctgaagctgaaacagaagcggaaacggaaacgaatgcgaaagcaaatacgaatagtagcactaggctagacgaggatcagacggacatcgagacaatggatagtgaattgaatggtgatatttttgaatttgaagaggccgatgtgcccttgccaccactgtacttgctcaaagacgagggcagtgataaatgggtactactcaatgatttgtgcaatttacttaaagttaaatcgaaggatacgttgcttaacaagctctgtccgaacaacagcaatgccttggccagcagtcagaagcacctgctacgggagttcaagatagatgatttcctggagaaagccacctgcctgcagctgttgtgcgccggtgaaaagctgaacatgttcagttcgtcgaaggttgtgctcatcaaatacaacgacagtgtacggaacttgttgggcgttaagaccattttaatgaaattttaa

SEQ ID NO: 33669 - protein, 814 aa, DROSOPHILA
MTRSKHRKELELQLANSKVLRNDKIIRNSTTKIKRKYVRKVVDSKKEMMVTRLRNKRGMNSDLGALNGRNSKLKGSKVGNSPGKPKTSPQQQLYLEEYRYKLALKIPHSLISINKLNKVASSLPDLERRDLSQELACFKRNRPKTKAASKQDFTPKSIIDVLHLRVTNGSTAGTQRKISVSAPASTNLQIHSETSQTSASTSLYEQSQQDNPTENQSLDDMSKRHFSIFDTKVLQSKTRTETKLQKHREIIREIFVGPERPASAPPECVQEADGGDAISYQKYEEFLQQMNSIASANDSKLARRSLMEDKSVTAPQCPHKRKYRCRKGSSGFDYIRKKKRPAPTQTQNHTQNQSQSQVKTEMDVCREIQKWVLNKGVGQSTMHKAARQGLIDVVVYCLDRMNMNPDQKDNAGYTPLHEACTQGWLEIARILLQYGANHSEAAQSGIRPLHGAIENDHEEVVRLLLSYGADPLLATYSGQTPLMLASSKLMRGILRAHLSDAQSAAADIKPMRFNGPWEIFDAKEYGYDIFSNVPNTACDMSRALRKERKEAKQQRMSSNSDRTSNLNGLLAEKKEEQKPEDLDQDRVTTTIKQNGETSATKTGSATTTTATTMVKLELGTDEDSNNNKNNEELNANVENNLVTSVVNVKNEVKKEVEAEAETEAETETNAKANTNSSTRLDEDQTDIETMDSELNGDIFEFEEADVPLPPLYLLKDEGSDKWVLLNDLCNLLKVKSKDTLLNKLCPNNSNALASSQKHLLREFKIDDFLEKATCLQLLCAGEKLNMFSSSKVVLIKYNDSVRNLLGVKTILMKF

SEQ ID NO: 33670 - DNA, 3011 bp, DROSOPHILA
ttaagaacctgtgagctgttttgcagttgggctatcaacgtgggaattcccgccagactactgttcagctcactcatgatcctgtgctgatggctggcctggtcttggatgccggagatttggttagcaatctgcgcagccttctccgcgttcttttcgttggcgccatgaatctgctgccaatcatcctcgtatttggcaagcaaactgcaaccagctgccacatttaggtgactgggcactccatcggttagctggaagggagcactaagggagaggctactgctcctgctggacgacagactttcgttaaggcccagtggcgaaatgggggtcgtaatcccactggcttggctactccccgagtttccggaactgacacgctggcgatattgctgttgcagattctccgagatcaccaggccctcctggatcgcactgctaagcttctttttcaggttcccgaacatcttgcgacaacggatctctatttatttaacttagcgatttctaattgtcttcgcgctggcgttttccatcgaaaattgagtggtaaataaagaatcagctgttcgggcaggtgctgagagaaaatcggtcatagagagagagagagagcaacagtttgttgccgtacacgagaggcatatcaactatggcaagagctctggcacgtggtttttattacttactaaaactaataagtattattaacatttcaaattttgcatttttattttataatttaaataaaaaaatgaacccaaagttgatattataaacagacacaacagggtatcattcggtggtatatttagtatattactattaaacataacttaaaaaaaaaccaaccaaatatgaatctatctatggcagagcttatatctgtaataataatataaaaacaatattcttagtttggttcaacttcagtttgtttcctttaaaatttcattctgatcttacataacgattctctaactaaagtttagcctaattaatcctcggtcaggtccactgtagtgacagctgtgctatcgtccacttgttgatttgtgctatccgattgagacggatattcaggttcagacgcaggttcagtttcacatgccttttttttgggctcttcatggtactcaattatctcaatatcactattatcaccagattctagggttatacagctgcgtacgctgttctttgcttctgaatctgagtccgagcttgatttattgccgctggactcggagctcgagcttactttaatggtgagaacatttggctcttcgtcgctggatgaaatggacagggcctcgggcttctcggatttgtccacctcttcgtcggacataagttcccggaatatatcgcttataggagaggaggagtgttccttagactcgctggctttcttttggctgctcgggtttagtaattgaccataggccatggccactgcaagagccatttgcttggagtggtttaggaacacatctgaaggcgggggtatacgtaacgactcgctgggtgcggattcccaatcgcaaccgctgctgctctggctgcttcttcgtcttctgtgtgattttttgtgttttttaaccttctttttgcgcttttttcgccgatgtgaactgctgcgacttcgactgcggcttgaacttctgctgctcctagttcttcttcggctgcgatgcttcttggcctttttgtggcggctcctgctgcgccttctgctggaacttctgcttctatcaacactttgagttctgggtgcatcgcggctgtaaaagtagttggacttcctcctttcgtgcacatcatccagatcctgcagcttctgtcggcaatttgcctgtgtgcgctccttttctctatcattatgccgaatcgcggtgtttatggtgcggcctaagaagcgtttgtttagtttgcccagaggattcactttgcgttcgctttgtttcgaggtgctgacactggcatttgcaccttcgatctcgcgcattagctcggcaatcgcctgactaacgtgagagcatcaaattaattaaaaatatatcggattgtaatataaatatttactttgttaggtctgcgtccatttccattttttgtgtttgtttatggcatttaattgaataccaattgctgcgaaacaaaaaataccgcggacggtaagtgctacttataagtatttttaaaatactaagtataaagcgattattgtatgtgcgttaaattagcgtcgatgagttcgcggcgatgacggaacggtggaaatcaaaacatggggacgttttttatttatttatttcttttcgttatttggaggtgaattgcaaaaaataaaataaagatcttactaactattcccacattttcgggaatttctccactcgtagagcgtgaccacttttaaggacatttctttagggaaacggcggggcagacgtcaagacattcgttgggccacgggtgacagtcggtcgggcggggcagcaggtgggacagtaagcgtggggagccaagttttcaagtgcatatttcatatactttcttgagtcctatgaacttaagtcgtacataggtagttagatatttttttaaacgttattgcatttttttgaattcaataatgaaagaataaattattcaaaattccatcgttcctccgttcctcctacactagcgatattcttgtcgattaatattgtcagagtaatcttttctgcaaaataccacaaattagtccaacgatatcgattggcacaatcatcgattaaagtttaaaaaatgacgaccggccgcaataaattgaatttctagttggttaaagtaacgtttattgaagaagatcacataatcgagtacgactaatatcacaggtgaatcacaatctttatgtttcagattcctggccaactatttcctgccgtctatcactttctgcatccaggacacgtatttactgacgcgcgtgtagattccgggcaaacctggacgtg

SEQ ID NO: 33671 - DNA, 1011 bp, DROSOPHILA
atgcgcgagatcgaaggtgcaaatgccagtgtcagcacctcgaaacaaagcgaacgcaaagtgaatcctctgggcaaactaaacaaacgcttcttaggccgcaccataaacaccgcgattcggcataatgatagagaaaaggagcgcacacaggcaaattgccgacagaagctgcaggatctggatgatgtgcacgaaaggaggaagtccaactacttttacagccgcgatgcacccagaactcaaagtgttgatagaagcagaagttccagcagaaggcgcagcaggagccgccacaaaaaggccaagaagcatcgcagccgaagaagaactaggagcagcagaagttcaagccgcagtcgaagtcgcagcagttcacatcggcgaaaaaagcgcaaaaagaaggttaaaaaacacaaaaaatcacacagaagacgaagaagcagccagagcagcagcggttgcgattgggaatccgcacccagcgagtcgttacgtatacccccgccttcagatgtgttcctaaaccactccaagcaaatggctcttgcagtggccatggcctatggtcaattactaaacccgagcagccaaaagaaagccagcgagtctaaggaacactcctcctctcctataagcgatatattccgggaacttatgtccgacgaagaggtggacaaatccgagaagcccgaggccctgtccatttcatccagcgacgaagagccaaatgttctcaccattaaagtaagctcgagctccgagtccagcggcaataaatcaagctcggactcagattcagaagcaaagaacagcgtacgcagctgtataaccctagaatctggtgataatagtgatattgagataattgagtaccatgaagagcccaaaaaaaaggcatgtgaaactgaacctgcgtctgaacctgaatatccgtctcaatcggatagcacaaatcaacaagtggacgatagcacagctgtcactacagtggacctgaccgaggattaa

SEQ ID NO: 33672 - protein, 336 aa, DROSOPHILA
MREIEGANASVSTSKQSERKVNPLGKLNKRFLGRTINTAIRHNDREKERTQANCRQKLQDLDDVHERRKSNYFYSRDAPRTQSVDRSRSSSRRRSRSRHKKAKKHRSRRRTRSSRSSSRSRSRSSSHRRKKRKKKVKKHKKSHRRRRSSQSSSGCDWESAPSESLRIPPPSDVFLNHSKQMALAVAMAYGQLLNPSSQKKASESKEHSSSPISDIFRELMSDEEVDKSEKPEALSISSSDEEPNVLTIKVSSSSESSGNKSSSDSDSEAKNSVRSCITLESGDNSDIEIIEYHEEPKKKACETEPASEPEYPSQSDSTNQQVDDSTAVTTVDLTED

SEQ ID NO: 33673 - DNA, 2701 bp, DROSOPHILA
atattccaattattcgactgcataatataaactttcttcaattatattttactgaacaaaaaatctgattgcgtaattctttcaaactaaaaccttatcgttatcttgttttttgcagggctaccgtggcattaccaccttcattgtggaccgtgagactcccggtctgatcgtgaacaagccggaggacaagctgggcatccgtgcctctggaacctgccagctcaccttcgacaacgtgcgtgtgcccgaggagaacatcctgggaaccttcggccatggctacaagtatgccgccggcttcctgaacgagggtcgcatcggtattgctgcccagatggtgggcctggcccaaggaaccttcgacgcgaccattccgtacctgctggagcgcaagcagttcggtgatgccatctataacttccagtcgatgcagcatcagatcgccaccgtggccacggagatcgaggccgcccgcctgatgacctacaatgctgcacgtctgcaggagcagggtgtgcccttccagaaggaggcggccatggccaagtactacgcctccgaggtggcccagagggcggcgatcaagtgcgtcgactggatgggaggcgttggcttcacccgtgatttcccgcaggagaagtactaccgtgacgtgaagatcggagccatttacgagggcaccaccaacatgcagctgagcaccattgccaagtgcatcaagaaggattatgcggcctaaagactaccccgatactcctccttcccccaacatatcccccacacaagctgagatatcgtacgtcagatacgtcaagtgcatttatgcgtgggaaccgctggaacaattttgacggccatccgttatcggttctcaccatgttaacgtagcatttaccacttagttgattctgttatgcatattgtataaaatacaattaaaatatatacacatataaaatttaaataaaacatatagttgtatagtatggttaattcactaatgactgcctcctccatccgttgtggtaaatgcggccagcagaatgttgatcactgtgatcatgaaaactcccattacgagcagatcgttggttctttcgtaacttcggttcctaaatcgcttgagacgtcgctgcggagattttttatttagtgaatggactaattgaagctctactcacatactttaaagatcagcattatgccaactaaaagctgcagcaccagggaaagtatcaccataatcatgctgtatatgtacgtggaagccttgtcgttataggtgatcaggaatcgcaactgattcgcattcgccgaaagcaaagctatatccattaggcctacaaaaagtagtttgaatatcagagttacaagttgtggttagcgttctttaaactttaagtattgtaactttcgaatagtgatttgcattacgttcttaccttcagctacatttttgttggcagcatagctattctctgtcgaaagatcgctggaacatttcttgttcgattttttggattcttgtaattcactggtggccctggatgggaactggtcgtcttttatatggctttcatgcacctgaatatccaaatccctgccagaaccgcaacatggtccactggttgtactggcgaaactttccccggagctgggggaatcctccaaagatattttcacctcgccgctgtccattgttcgagttccaaccgattaataagcatttaaatgctcttcttttaaaaaaatgcgaaaagcttttcttgtttttgagcatgaaagccgcaactgcggtttagtaactgataaaagggaatgacactgaccgaactaccctaaaaaaaaaaaaaaaaaactgggccataagccgacctgaaaagtatctgatgggttgagatacgcactaagcatgtttgccttaaagtatgctacacaatcttatttaaaatgaaggtaaagtggatgtgtaagatacattttataaaatatatgtatgcatgtactgaggtatgtatgttgactccgttttgttggattatccccacctaagaacccttttgttttatgctctgcacgtgaagtcataaaaaagtcacaaaacctgaataaacaagacccacactaaagtatctttgtgttgcaaaacctcaaattacctttaagttgattccttaaagttttacccataattttgtgtgtacttttttttatatatcagagactcctaacaaattcactgttcgaccttttacaagtaattacagattcttcgtcaataaacttttaaacttgacagacagctgtcacaagtatggcagtatcacatcgcaaagtgggagggcagttgtaaaacttctgatgttaaggtgcaagaaggtgtatttaagctctacgtatgcagaagcctagataaacgatttaagaagcgttgaaaaagcatattgtaacgaacaatattgtgatatgtgcatatgtactttagaaatatttattaacagaagaaagtttttttcttgcgtatacgcaatatttttatttaaagtacctaaataataaaaacaaagtgcgaaaaattataaatatttttactaacctattcactatttatattttcatcatcttatcatttatgctatatatgagaaatggagtgataaagggtacaaatgaaaataacgcacaaagatttagacta

SEQ ID NO: 33674 - DNA, 546 bp, DROSOPHILA
atggacagcggcgaggtgaaaatatctttggaggattcccccagctccggggaaagtttcgccagtacaaccagtggaccatgttgcggttctggcagggatttggatattcaggtgcatgaaagccatataaaagacgaccagttcccatccagggccaccagtgaattacaagaatccaaaaaatcgaacaagaaatgttccagcgatctttcgacagagaatagctatgctgccaacaaaaatgtagctgaaggcctaatggatatagctttgctttcggcgaatgcgaatcagttgcgattcctgatcacctataacgacaaggcttccacgtacatatacagcatgattatggtgatactttccctggtgctgcagcttttagttggcataatgctgatctttaaacgacgtctcaagcgatttaggaaccgaagttacgaaagaaccaacgatctgctcgtaatgggagttttcatgatcacagtgatcaacattctgctggccgcatttaccacaacggatggaggaggcagtcattag

SEQ ID NO: 33675 - protein, 181 aa, DROSOPHILA
MDSGEVKISLEDSPSSGESFASTTSGPCCGSGRDLDIQVHESHIKDDQFPSRATSELQESKKSNKKCSSDLSTENSYAANKNVAEGLMDIALLSANANQLRFLITYNDKASTYIYSMIMVILSLVLQLLVGIMLIFKRRLKRFRNRSYERTNDLLVMGVFMITVINILLAAFTTTDGGGSH

SEQ ID NO: 33676 - DNA, 2468 bp, DROSOPHILA
ctgatgagcattggcaagtctcagatttgggatgagtatatggatctgagggcacagagtttccagcaagccatcaacttcgttcagtccgcagaaattttgggaacagctctgcacgtggaaaacttccaaaacaaacaccagcaagtcaacttggccttggatctgcagcagtctctttttttatggggtaacgatatgcaagatgaacatcttctggagcaatttagagctctggatgtgacgggtctgatttacgatcacatggatcgagtgggtccgttcgcttggaaacgatccgaatttttccgggccccacaacttatggaactatttggagctcaatgtgttagcagtggaaactcgacgaccattccgggaataaaaccagctaagccaaccatttggccaaagttaagatagtgtttgggtaacagtagtaaacagtgcaattaatagaaaaatatttgtgaatgaagatttatatgtataagctatacaaattaacgagtggtaaaccaaaggttttagatacaaacgcaatagacggtgctaagcttaattgttgttaataaccaaatttagttgtatatgaaaaattctgttagttgtaaaaaactaatatgccttagattgtgtaaatttattttgctttaaccctttaattaaaagggttaattctaaatttatatgtaagggacgtgcattggaactagacaaagtacattaagtagggaatgattgaaataaaatgaacgaatactcaatgaataagtagatacaattaattagatatacaacagttgaccagtaaccgatctcataataaacaatttgtagaaaatgtaaaatttattaagtggatttatttatacaagctttgctgaaattgggcaccaggtagtcgtactcctcctcgcacaaaatctgagctcacacacacacggacaatcaatgaagcaatcaatcaatccatcaatcaggccgcaagtgaacccttctattgagatgagcagttggcatcggtgtagaggtccatgtagtcatccgagacgcaagcgctgccaatgggcatcggctggcagataccttgcaccttgctgacgatttccacgtggcaggtgcgatgtccgtgggcggaaagcttgtggaatccgctggtcgggtgcttcaggatgatctgcggcttgtggccagaccgatgcttcgtggccggagtgggttcgtcgaaggtcagccagtcgggcggcatggagtgcagggacctgccggcggactggtccccggccacatcctgttccacctccagtggcaggtccaccccatctacgccgtcgtccaggtcgatggggaaaccgactttcgatttggcctcattttctgcacccagtaattggggactcagtaccagggcgttggcaatcagcagagtggtggcacagtggagcagcagatgcagtggggccattctaccaaccgattccagctggaattccgagtactttttccgtgcactggccgtgcatgaatgtggctatccctgcaatccaatcgcgcttttatagctcccaactgtagtgcggatagtcaatgacccaacaattgaaattgaaaagaagccactcaaggaggaagcatctatcgtccggcagccagcgttcggcatccggagaagtctctgcgagtctccgcccacgcggacacaaagggcgtaattaattatagttgagtatacgccacgtaagccgcaatgacaaggacgccctgtggtgcttcctccttgggagtcgagaaaattggaaatctattcccatttcttcctcgattcattctcttcctcaattctgtttggttcggtttcggcgccgccttccttttgtatttccggcaattattttcgacgatgtgacaatattgccgacaatcgggattctcagaagcagctgagtgggggattccacgcctcgatgtggtgtagggcccttaacgacttcataagcatctcgttcaattgaattcaaatgcagttggcttggtcttggagccgcaggaaaaacacgcacacacacacagacactaaaaacgaaatcaacgacaacatttagcggaagtgaagctgacgccatttttaaaatggcgcatacgtgtgcgacgtgtttatggcagattttttggataaatgacatgacagacagcagctgcctaacagggctatcctaaacgaaagccaagtcaataacaacagctagaagagaaaattttttcagaaaagcgaatttagctcagaccgcgattgcccatgtgacttccggtgatttcgccacgtgaccattttaaatttttaaatctttgccatgcacagttgttgaatttaaatcaattgcaaagcttaaaaggtgaatcaaacttattgctcgagataactgctccattagatgacaatgatttaacgcaacaaatggcattcc

SEQ ID NO: 33677 - DNA, 468 bp, DROSOPHILA
atggccccactgcatctgctgctccactgtgccaccactctgctgattgccaacgccctggtactgagtccccaattactgggtgcagaaaatgaggccaaatcgaaagtcggtttccccatcgacctggacgacggcgtagatggggtggacctgccactggaggtggaacaggatgtggccggggaccagtccgccggcaggtccctgcactccatgccgcccgactggctgaccttcgacgaacccactccggccacgaagcatcggtctggccacaagccgcagatcatcctgaagcacccgaccagcggattccacaagctttccgcccacggacatcgcacctgccacgtggaaatcgtcagcaaggtgcaaggtatctgccagccgatgcccattggcagcgcttgcgtctcggatgactacatggacctctacaccgatgccaactgctcatctcaatag

SEQ ID NO: 33678 - protein, 155 aa, DROSOPHILA
MAPLHLLLHCATTLLIANALVLSPQLLGAENEAKSKVGFPIDLDDGVDGVDLPLEVEQDVAGDQSAGRSLHSMPPDWLTFDEPTPATKHRSGHKPQIILKHPTSGFHKLSAHGHRTCHVEIVSKVQGICQPMPIGSACVSDDYMDLYTDANCSSQ

SEQ ID NO: 33679 - DNA, 4495 bp, DROSOPHILA
cttatattttgccatcttactttttgcaacagctttcttaattgcttcctaatgccttcatgccttcgggccaaatacaggctcttaaactgattttagcttatttaaagtcagatttataaggaataatttgcatgtttaacttttctaaaagctaactttttgaggctgcgaaagattaattttctcttgtgcgagaattcgaaattaaattaaaattttaaataatttagttactaatattcaaaaaaaatcatcaagaatatttttattacaactggtaatttatgaagtaatttatgagtaatttatttacctacatttgaaaacaattactgttctcatagtataataaccaattcaccgatagaaccaagtaaattggcgaaattaaaccctctgcaaaactttccaattccttttggccctaacttatgtgcttatcccaaagccaagtccaagtctagaatgtcgaagcaactttctccgttccggtcgtcgttgacacgtaattgactttgtccgcacttccacgcggacaatttgtgcgccacttgctcggaccaattaaacgccatcgatgaccaattgcagttgtcgcaaaattgctcgcgaagattgccctgcgtaatgacagcagatgggtgcacgtggatgtggacgtggatgtggaccgaaaggaagcgcagcggagtgtaatcaatgcataattttaatgcaattcttgaatgcaattactggcgactgcccttttggctataaaagccggggactccaatccgtgaaaaaaagcgcgtcggggaaatgcaaaagcgaaaggacggacagcaactcgttaatactcgcagtcgcagtgatgaaagttcaagtcgcgcactggctccctctgatatttttcctgctcgtcagtgggacaccacgtgtcgctggcagctggcggagcgaatattcccggcaggatccggacccgaaaacacggtggggcaatcagttgccggatatgctagtcgcttactatcgccaccacggcgttcacagcctgatgctggtcgtttgtcacacggacattggtgaattaaccctctgcatgcaatgtgctgctggggacaaatttatgaccccacagtacactggccaaaatgagcttaggaaatccatatctcacgtttgaatttgccaaaggcctaatttcacttaatccttattatttgaagttggtctgagcacattaaaaccatgctacttacataagcaaaagtttttacattagatataccgttccatacttctagacacctctattaatcgaatactaaattttgttttctctgtactcgttttttcccctctagcggattttcgcctttggaagctttggcagcacttcaacctcaacaatttctatgtgcaggtcagcacggagagctcgctgagggacctgcagcatgtcgatgccctggatgaacataaggacgctccaccgccgaagagtttccacgccaacaactccacccactgggagacgtccttcctgctccccgcattgccatacaaaatgggcatcctgctgctggagttcagcagcgagtgcgccttaaatctactccgctggtctgcggcctcggaacataattacttcaccaccaaccggttctggctgctcctcaccgaagatccaggcgatatcgatttactcgaggatccggaaatattcattcccccggatagtgagttgcgggtccttcattatgaaaacgttggcaacttctcttgcagtttaatcgatctatacaaggtagctgcttggaagcctttgaaaagaaccttggtggggcacaacattcgaaattcgcggcacgtcattcatgccctgcagcactttggttcggccataacttatagacaggatctggagggcatagtattcaattcggccatagtaattgcctttccggatctattcactaacattgaagatttgtcgctgaggcatattgacactatatcgaaggttaatcatcgcttaatgctggagctggccaatagattgaatatgaggttagaaggatttcctcttgttgtctttttagatcaaaaacattatggttcttgagtatatataaatacacaggatcgaacactttccatttccagctacaatacctaccaaacagtgaactacggatggcgacaaccaaatggatcattcgatggtctcatgggacgttttcaacgctatgaactggacttggcccagctggcgatcttcatgagattggatcgtattgcattggtcgattttgtggctgagacttatcgagtgagagctgggatcatgtttcggcagccacctctctcggcagtggccaatatattcgctatgccctttgagaacgatgtgtgggtgtccattttgatgctactgatcatcacgaccgtggtcttggttctggaactcttcttttcgccacacaaccacgacatgtcctacatggatacactaaattttgtttggggtgctatgtgccagcagggtttctacgtagaggtgcggaaccgatcggcgagaatcattgtcttcaccacatttgttgcagctctcttcttgttcacctcgttttcggccaatattgtggccctgctgcaaagtccgtcggatgctatccagtcattgtctgatctgggacaatcgcctctagaaatcggagttcaggacacgcaatataataaaatatacttcaccgagtccacagatcccgtaacgaagaatctttaccacaaaaagatcgcgtccaaaggtgaaaatatctatatgcgccccttgctaggaatggagaaaatgcgaaccggcttatttgcataccaggttgaactccaggctggttaccaaatcgtcagcgacaccttcagcgagccggaaaagtgcggattaatggaactggagccttttcagctgcccatgctagctattccaacaaggaaaaactttccttacaaggagctcattcgaaggcagtaagaatattttatatataaacatagtttcgctttccaattgcattttacatttaaataaaataggtaatttattaaattttatactaaaaatccaatagtaatttaaacgtgtaactaatcaaaatatgcctaattaaaaattttacagggataaaaacccttttataatttacaattcaataacttgttcgaaaagaggaaatcataaaacactttgttttaacccacagactacgctggcagcgagaagtaagcttggtgaatcgcgaggagcgaaagtggattcctcagaagcccaaatgcgagggcggagttggcggatttgtctccattggcattacagaatgccggtatgctttggggatctttgggtgtggagctgctgtcagttttgtcctgtttcttttcgagtttatcttcagacacttcaaacaagtttatcgcataattaaaggctatagagaagtgcagcgctaggctccacgcgtttaatccaaacacacttaaaacttagatgggtatggatagctcccggacaacagcacgcagcacctcaggtgtcttgaactgccagttctggatgttcttgctgacccgacaccaggactcgccgtgcgtgggctctgcagaaatgcaccgatcgaggacctcctgctgctgcgcctccgtgccgtggagtaattcgaacttgtagaaatatgcccaagcatcacctagatctggatcgatcttgacctgaaataaacaaatgattagctctgaacatgtttgtttctattacatttaataggtagtataaattacttacagttcgattaaaccagtctcggcacttagagaacttgtgctcagaccagaacagttttgatacagctagcagcacatgtggatcgtgctcgcatttcttgagagcatccactgacttggtctttcgctgcggcttggtttccatgaagatagcctccgcccatagctcaccagcgttgggacattcctgcagtgctcttgccatcattgtgctggcaatctccttgaggcccgcacgcagctccaccctgatggcctccagccagagcacagccactttggggttgcgtaaacgtcctcgttccagaatggatcgagccttcgtcagcactcctttgcgctcttctagattggcggaaagaatccaaagtgggatggacgtaggacactttttcaagcccagagtataggtggcagccgcatcatctgtccgtctctgctgctcctcaatctgacccttcatcatccacagtttggggaaatctgggaacacttccaccgcctcctccagcaaccgcagagcttcgtcgaacttttccaaagcccattccaggcgagctgatttcatcatcacccttggtgtcggtgccgatcctctagccttggctaacaagcgtctcgcccgctcatattccgagttctctgattccaacttaacggcagccaacca

SEQ ID NO: 33680 - DNA, 1884 bp, DROSOPHILA
atgctagtcgcttactatcgccaccacggcgttcacagcctgatgctggtcgtttgtcacacggacattgcggattttcgcctttggaagctttggcagcacttcaacctcaacaatttctatgtgcaggtcagcacggagagctcgctgagggacctgcagcatgtcgatgccctggatgaacataaggacgctccaccgccgaagagtttccacgccaacaactccacccactgggagacgtccttcctgctccccgcattgccatacaaaatgggcatcctgctgctggagttcagcagcgagtgcgccttaaatctactccgctggtctgcggcctcggaacataattacttcaccaccaaccggttctggctgctcctcaccgaagatccaggcgatatcgatttactcgaggatccggaaatattcattcccccggatagtgagttgcgggtccttcattatgaaaacgttggcaacttctcttgcagtttaatcgatctatacaaggtagctgcttggaagcctttgaaaagaaccttggtggggcacaacattcgaaattcgcggcacgtcattcatgccctgcagcactttggttcggccataacttatagacaggatctggagggcatagtattcaattcggccatagtaattgcctttccggatctattcactaacattgaagatttgtcgctgaggcatattgacactatatcgaaggttaatcatcgcttaatgctggagctggccaatagattgaatatgagctacaatacctaccaaacagtgaactacggatggcgacaaccaaatggatcattcgatggtctcatgggacgttttcaacgctatgaactggacttggcccagctggcgatcttcatgagattggatcgtattgcattggtcgattttgtggctgagacttatcgagtgagagctgggatcatgtttcggcagccacctctctcggcagtggccaatatattcgctatgccctttgagaacgatgtgtgggtgtccattttgatgctactgatcatcacgaccgtggtcttggttctggaactcttcttttcgccacacaaccacgacatgtcctacatggatacactaaattttgtttggggtgctatgtgccagcagggtttctacgtagaggtgcggaaccgatcggcgagaatcattgtcttcaccacatttgttgcagctctcttcttgttcacctcgttttcggccaatattgtggccctgctgcaaagtccgtcggatgctatccagtcattgtctgatctgggacaatcgcctctagaaatcggagttcaggacacgcaatataataaaatatacttcaccgagtccacagatcccgtaacgaagaatctttaccacaaaaagatcgcgtccaaaggtgaaaatatctatatgcgccccttgctaggaatggagaaaatgcgaaccggcttatttgcataccaggttgaactccaggctggttaccaaatcgtcagcgacaccttcagcgagccggaaaagtgcggattaatggaactggagccttttcagctgcccatgctagctattccaacaaggaaaaactttccttacaaggagctcattcgaaggcaactacgctggcagcgagaagtaagcttggtgaatcgcgaggagcgaaagtggattcctcagaagcccaaatgcgagggcggagttggcggatttgtctccattggcattacagaatgccggtatgctttggggatctttgggtgtggagctgctgtcagttttgtcctgtttcttttcgagtttatcttcagacacttcaaacaagtttatcgcataattaaaggctatagagaagtgcagcgctag

SEQ ID NO: 33681 - protein, 627 aa, DROSOPHILA
MLVAYYRHHGVHSLMLVVCHTDIADFRLWKLWQHFNLNNFYVQVSTESSLRDLQHVDALDEHKDAPPPKSFHANNSTHWETSFLLPALPYKMGILLLEFSSECALNLLRWSAASEHNYFTTNRFWLLLTEDPGDIDLLEDPEIFIPPDSELRVLHYENVGNFSCSLIDLYKVAAWKPLKRTLVGHNIRNSRHVIHALQHFGSAITYRQDLEGIVFNSAIVIAFPDLFTNIEDLSLRHIDTISKVNHRLMLELANRLNMSYNTYQTVNYGWRQPNGSFDGLMGRFQRYELDLAQLAIFMRLDRIALVDFVAETYRVRAGIMFRQPPLSAVANIFAMPFENDVWVSILMLLIITTVVLVLELFFSPHNHDMSYMDTLNFVWGAMCQQGFYVEVRNRSARIIVFTTFVAALFLFTSFSANIVALLQSPSDAIQSLSDLGQSPLEIGVQDTQYNKIYFTESTDPVTKNLYHKKIASKGENIYMRPLLGMEKMRTGLFAYQVELQAGYQIVSDTFSEPEKCGLMELEPFQLPMLAIPTRKNFPYKELIRRQLRWQREVSLVNREERKWIPQKPKCEGGVGGFVSIGITECRYALGIFGCGAAVSFVLFLFEFIFRHFKQVYRIIKGYREVQR

SEQ ID NO: 33682 - DNA, 2357 bp, DROSOPHILA
ttcccataaaaaagtttaaaaaaatatatcactagttttgagttttctcctagagcaacatcaagaactttagattatttaggtaaagcttaaattgatttattctgtctttaacttatccttgccttataatctatgccctcaggatgaaggactgcaattcaaaatgatacgttgaaaattttcagaaaagccaatggctttaagattcttcgaattctggcttttctaggtaggctatcagttggcatgttggggaaattgtaatttaaaattgtgtttcggaaatctgtctttaaaattatcttttagtaaaaaaatgcggcacttacaattaatgaaatatgtaaacccacggtttgcaatcaacacggttattacccaacgcttaatgtcaaagtctgatggaaaatcttctggcacaggatcaaaaggtatatggtgtgtaaattaaatatatttctatagcgttgataactctattacagacgcgaagtgtaaaggtactaaagatgcaaaatcttcaaatgcagcaaagaaatctactgaagcaaaggccaaggcttccgatgcggcaaagaaaggttaaaaatcgttgcttgtgaaatgaaaatattaaatttggaatgcatgttacatccccacagcgacaccgcctaaagcggccaaggaaactaaagttacgccgccaaaggacgaaacagccatagccggaggatcaaaatgcccgccaaaagtccaacctgttgcagaaactagtaaaaataaaaagaaactacaatcgtgtgatgaattgctactaggtaaaagtactcgaaagcagaagaaacctctaacagcgatccaaggaggggaccttggctgtcctggccggactggaaagaaaccacgtgggtatagtcatataaatcatgttctaaactgatcctttattttcgtagaaattgttgcacaacactccaagctctggcagaaaatctcgctcttcggagtcctgccgatgatagccattctcacccttttggtttttagcactcgatcggaagaggagcgtcttgagtttaagaactatgagcatatgtaccggcggacgaagcgatactggtttaaggatggaaaccgtaccgcttttcacaatagtcactttaatgctttgcctccagccggatatgaggacgaagtggacgagagtgggattggacaggatccggagacggacaaggacaagaaggctcgaatgaaagaattcgacaaggtcgtcaagaattggcgcaaacactcgtctaaaagggatgcgcagctcaaaaaggaggcagccgctgctgaaaaagaggctagaaaacaagaagcacaataagcaatggtaatattaaactacaaaaaaatttcacaaattacccacatagacatttaaacaaaaaccatgatcagagtctgggatccatgtctaatatctccaataaaagttgtctacaaattatgtacaaaggttacaaaataattcatcaagggcaacaggtcgtatgattgataaacatttaatctgcgcgcagtccataaaaacgtaattttcaaattgatattattatttttattttctttttgaatatatgcatttcaaattaattaatttaaattattattaatatgcaaccttatttaaatgttgctaactttttaggtataaaatttgaatacatttaattcattttcgctgttatccttcgtatccaattaaggggccgatttgaaattcagtacccttgtctcaattgtgtcccgattctttcaaacttaatagaatcagaaagtgttatccagcagcaaaagcgtttcctgttcgtttggcccatggatgattatccttgccaaatgtgagacaggtgctctgggtaacgaaccctgatttatccttggcgtgtcgcccagctcgccaaatctgtgtgataatctggtgttgcaatcagcgccatatctacgtaccatgccacaaatggtagccactttgtgccgccttcttcgtttccggccttttcgccttctgtccgctcttcggccatttgtttttcctgctgcttttctcctaatggttttcctttttgctgcgctacgcttcaataacttttatcacttttaattggatttttctttatagtcaacgcatgtcttagaggactaacacatgttcagattgtaattgtgttaatgtcgtcaggagtgggcctcttggcgtggccatgtccttatccttatgtgttgtcgtcgtcctgtgacatcgagctaataccagtttctctatttttacacttgtgtgtgtatttctatattgcgcccacgcttgatcaaatttgcttata

SEQ ID NO: 33683 - DNA, 357 bp, DROSOPHILA
atgatagccattctcacccttttggtttttagcactcgatcggaagaggagcgtcttgagtttaagaactatgagcatatgtaccggcggacgaagcgatactggtttaaggatggaaaccgtaccgcttttcacaatagtcactttaatgctttgcctccagccggatatgaggacgaagtggacgagagtgggattggacaggatccggagacggacaaggacaagaaggctcgaatgaaagaattcgacaaggtcgtcaagaattggcgcaaacactcgtctaaaagggatgcgcagctcaaaaaggaggcagccgctgctgaaaaagaggctagaaaacaagaagcacaataa

SEQ ID NO: 33684 - protein, 118 aa, DROSOPHILA
MIAILTLLVFSTRSEEERLEFKNYEHMYRRTKRYWFKDGNRTAFHNSHFNALPPAGYEDEVDESGIGQDPETDKDKKARMKEFDKVVKNWRKHSSKRDAQLKKEAAAAEKEARKQEAQ

SEQ ID NO: 33685 - DNA, 4100 bp, DROSOPHILA
cattgttccttaccctggatgcgtcatcagatggctatttatacgcgaaaagccatcccgagtgaaaagactctcgaagatatagctgcgtatctgaagacagtggatctgacaatcaaaaacttcagcctaatccggcaaaataaggactgtcggtcgcagaagcctccgatcatgcagcgctggcatttgtcccgatatctgtacatggattataatccggtttatgtcaagcccttggtggagaacgaaaacatctgagccggccattgtgcggcatctctcctctccaactggcaactttctttaccccgaaattaacatatgccaaatttggtacaaatatgcgaatgtcataccatcgaatgtcgcataacaaagaccgaccgatcgagaagtccgaagtgacgataccctcttcgcaataaaaaaaaagattgagtttatcgcgcagaaattatgggtgcatgattaatatgccacgatgctattccgctctccggggattccaaaagtaatctattcagtgaaaggttgcccccagtcggtaattaaaattcctctttttccgataatatttctataatgtattaattagctcaagtttgatctgctcacgctgtcatcgctggtgcctcagtggtcaccaaccttactattactcgtacctatcaactcaattagtgagccgctgacttattagtcagagtttcttcgatcgcagctgattcggaatccgattccgattcccaggccaactccagtttcgactgaaacaaaaccacggtgagctttaagaaattctttcattcggttgtttgtcatcgttgggtcaacttgccttcgcatccgatccaagtcgcgctcatctcttagttttcgttttcaatttcgatttcgtctcggatctcggggcaattccaattgattttggccgagaaagagaaaacttgtttcggtggcgcaaagatggtcatgtcgctgtgtggaatgaggaaaaatgtatcggtctcgtgtgtgtttgaatgtgttaaaatcaattagcataccccatgggctgctggtgttgcagcttctgcttctgcttctgcccctctgcggcgcctttgtgaatgaaaccactgttttcgggcccgagaaactgcaggccttcaagatctttgacgatgaacagcccggccagatctcgggtcgcagcttcatctgtgtgccgctctttcgcatctttagcctggagctgaggcacaatattcgtctggcccccgatgagtttgtggccgtgagtggagatcatccggctctgggcctgtggcagctcgagaaggctctacccctcaaggagcaggacaaggcgcgcaccaagtggtatctgagggtttggatatgcgccagccagagattctactaccgatacctgatatactccaagaacagacaaggcaatcgggtcctgaggacctgggagggccagagagtggctcgaatgctgcagacctacgagatctaccgctccccgggtctggacatcttcggcgaggcctaccccgtctcagtgggcgggggattctatctggaacgcggttggttgcagtacgagtacgtgatagagctaaaattcgtctggcaggatcatattgctatttctggaatgggaagtaacgccaagtaccggttgatccttacaccgctcaatttgatagacgacacacgtattgaggtctccagatatgcctacaatcagtcatcgttcagaccacagaaccaacgcggagtgcggtacacacaaggcaccattgttgtcttccggatttaccaaccgctggacacctacaatgcccttcgcttgtctatttatcaggcatcaagagatctccagttatcccttggagaggcgtacatatttccggatcaaatcaagggcagtcgtgggattttgcagctccccatctttgctagtttacaaaatttggccattggggagatcacgttgccatatttggtggttcaacctatgccaaaagtggaggcgggaaatctacgagccagtttccatcactactggccggataattggcccacattggatgtgggataccgaggtttgggagccagctacttccaatcttcaacgagtcttacggagaacaccatcgaaagttatctggcagttctgaaggccaagggagatatggtccaactggatgtgcagctgaccaaggactacgttcccgtagtctggcatggatttggattttacacctcagacacagatcgctctgtaagggatcgctttgatttacggtttgtgctaataagggaacttacctactcggaactcaaggccagccgggtgtttatcctcaaacgttggaccgtccaggaatacaccaatcttaatgtcaaggatgtgagccaaaaacacagaattttcccaaaactctcggaggtttttgaggccctacccaaaacactgggacttctggtggagataaagtggccgcaaataatggcttctggtgtgccggaatccacccagagtttgaacaaaaacatttacgtggacagaattctacagatcacgattcatcatgggtgtggacgtccactaatcttcgccagctttgatgcggatatatgcacaatgattaggctgaagcagcatgtcttccctgtgattctgatgagcattggcaagtctcagatttgggatgagtatatggatctgagggcacagagtttccagcaagccatcaacttcgttcagtccgcagaaattttgggaacagctctgcacgtggaaaacttccaaaacaaacaccagcaagtcaacttggccttggatctgcagcagtctctttttttatggggtaacgatatgcaagatgaacatcttctggagcaatttagagctctggatgtgacgggtctgatttacgatcacatggatcgagtgggtccgttcgcttggaaacgatccgaatttttccgggccccacaacttatggaactatttggagctcaatgtgttagcagtggaaactcgacgaccattccgggaataaaaccagctaagccaaccatttggccaaagttaagatagtgtttgggtaacagtagtaaacagtgcaattaatagaaaaatatttgtgaatgaagatttatatgtataagctatacaaattaacgagtggtaaaccaaaggttttagatacaaacgcaatagacggtgctaagcttaattgttgttaataaccaaatttagttgtatatgaaaaattctgttagttgtaaaaaactaatatgccttagattgtgtaaatttattttgctttaaccctttaattaaaagggttaattctaaatttatatgtaagggacgtgcattggaactagacaaagtacattaagtagggaatgattgaaataaaatgaacgaatactcaatgaataagtagatacaattaattagatatacaacagttgaccagtaaccgatctcataataaacaatttgtagaaaatgtaaaatttattaagtggatttatttatacaagctttgctgaaattgggcaccaggtagtcgtactcctcctcgcacaaaatctgagctcacacacacacggacaatcaatgaagcaatcaatcaatccatcaatcaggccgcaagtgaacccttctattgagatgagcagttggcatcggtgtagaggtccatgtagtcatccgagacgcaagcgctgccaatgggcatcggctggcagataccttgcaccttgctgacgatttccacgtggcaggtgcgatgtccgtgggcggaaagcttgtggaatccgctggtcgggtgcttcaggatgatctgcggcttgtggccagaccgatgcttcgtggccggagtgggttcgtcgaaggtcagccagtcgggcggcatggagtgcagggacctgccggcggactggtccccggccacatcctgttccacctccagtggcaggtccaccccatctacgccgtcgtccaggtcgatggggaaaccgactttcgatttggcctcattttctgcacccagtaattggggactcagtaccagggcgttggcaat

SEQ ID NO: 33686 - DNA, 2100 bp, DROSOPHILA
atgtatcggtctcgtgtgtgtttgaatgtgttaaaatcaattagcataccccatgggctgctggtgttgcagcttctgcttctgcttctgcccctctgcggcgcctttgtgaatgaaaccactgttttcgggcccgagaaactgcaggccttcaagatctttgacgatgaacagcccggccagatctcgggtcgcagcttcatctgtgtgccgctctttcgcatctttagcctggagctgaggcacaatattcgtctggcccccgatgagtttgtggccgtgagtggagatcatccggctctgggcctgtggcagctcgagaaggctctacccctcaaggagcaggacaaggcgcgcaccaagtggtatctgagggtttggatatgcgccagccagagattctactaccgatacctgatatactccaagaacagacaaggcaatcgggtcctgaggacctgggagggccagagagtggctcgaatgctgcagacctacgagatctaccgctccccgggtctggacatcttcggcgaggcctaccccgtctcagtgggcgggggattctatctggaacgcggttggttgcagtacgagtacgtgatagagctaaaattcgtctggcaggatcatattgctatttctggaatgggaagtaacgccaagtaccggttgatccttacaccgctcaatttgatagacgacacacgtattgaggtctccagatatgcctacaatcagtcatcgttcagaccacagaaccaacgcggagtgcggtacacacaaggcaccattgttgtcttccggatttaccaaccgctggacacctacaatgcccttcgcttgtctatttatcaggcatcaagagatctccagttatcccttggagaggcgtacatatttccggatcaaatcaagggcagtcgtgggattttgcagctccccatctttgctagtttacaaaatttggccattggggagatcacgttgccatatttggtggttcaacctatgccaaaagtggaggcgggaaatctacgagccagtttccatcactactggccggataattggcccacattggatgtgggataccgaggtttgggagccagctacttccaatcttcaacgagtcttacggagaacaccatcgaaagttatctggcagttctgaaggccaagggagatatggtccaactggatgtgcagctgaccaaggactacgttcccgtagtctggcatggatttggattttacacctcagacacagatcgctctgtaagggatcgctttgatttacggtttgtgctaataagggaacttacctactcggaactcaaggccagccgggtgtttatcctcaaacgttggaccgtccaggaatacaccaatcttaatgtcaaggatgtgagccaaaaacacagaattttcccaaaactctcggaggtttttgaggccctacccaaaacactgggacttctggtggagataaagtggccgcaaataatggcttctggtgtgccggaatccacccagagtttgaacaaaaacatttacgtggacagaattctacagatcacgattcatcatgggtgtggacgtccactaatcttcgccagctttgatgcggatatatgcacaatgattaggctgaagcagcatgtcttccctgtgattctgatgagcattggcaagtctcagatttgggatgagtatatggatctgagggcacagagtttccagcaagccatcaacttcgttcagtccgcagaaattttgggaacagctctgcacgtggaaaacttccaaaacaaacaccagcaagtcaacttggccttggatctgcagcagtctctttttttatggggtaacgatatgcaagatgaacatcttctggagcaatttagagctctggatgtgacgggtctgatttacgatcacatggatcgagtgggtccgttcgcttggaaacgatccgaatttttccgggccccacaacttatggaactatttggagctcaatgtgttagcagtggaaactcgacgaccattccgggaataaaaccagctaagccaaccatttggccaaagttaagatag

SEQ ID NO: 33687 - protein, 699 aa, DROSOPHILA
MYRSRVCLNVLKSISIPHGLLVLQLLLLLLPLCGAFVNETTVFGPEKLQAFKIFDDEQPGQISGRSFICVPLFRIFSLELRHNIRLAPDEFVAVSGDHPALGLWQLEKALPLKEQDKARTKWYLRVWICASQRFYYRYLIYSKNRQGNRVLRTWEGQRVARMLQTYEIYRSPGLDIFGEAYPVSVGGGFYLERGWLQYEYVIELKFVWQDHIAISGMGSNAKYRLILTPLNLIDDTRIEVSRYAYNQSSFRPQNQRGVRYTQGTIVVFRIYQPLDTYNALRLSIYQASRDLQLSLGEAYIFPDQIKGSRGILQLPIFASLQNLAIGEITLPYLVVQPMPKVEAGNLRASFHHYWPDNWPTLDVGYRGLGASYFQSSTSLTENTIESYLAVLKAKGDMVQLDVQLTKDYVPVVWHGFGFYTSDTDRSVRDRFDLRFVLIRELTYSELKASRVFILKRWTVQEYTNLNVKDVSQKHRIFPKLSEVFEALPKTLGLLVEIKWPQIMASGVPESTQSLNKNIYVDRILQITIHHGCGRPLIFASFDADICTMIRLKQHVFPVILMSIGKSQIWDEYMDLRAQSFQQAINFVQSAEILGTALHVENFQNKHQQVNLALDLQQSLFLWGNDMQDEHLLEQFRALDVTGLIYDHMDRVGPFAWKRSEFFRAPQLMELFGAQCVSSGNSTTIPGIKPAKPTIWPKLR

SEQ ID NO: 33688 - DNA, 8104 bp, DROSOPHILA
gcaatgaaaaacgaaattaaatagaaaggtaacgcttcattaaaagttaattaaaatcagtcttttgaatgctttgcaaataatttgagcactacaaattatttaaattacacattccgtcctcctaccattcctgaacatctaacaatcggcgcagttgaatctgcttcgctttggtgcggttcacgcgtcgtatgagtaatgtgtaatgaatgggccaaaagcgaccgcagaccgtagaatgctcatctgccggctcagctttcagctttcagcttttagcgctcgggtggctaccaccacccagataatgctgcagtcatttcaattaaaaatgaaagaaacaaaaccgagaccgaaaccagctaaaaaaaaagccgaaaagaaagaaaactttgagtgccgccgccgacgacgacgtcattaattaggaatgctctccgagctgccgcctttcaagtttctcgaggggattcaaagagatcggcattggccgcctggtcgccatcgctttgtgttggcgttgaggcataaacttttgtgctgttgtaatgcgctttgtgcaaattgcaaataaattgcaagacgccggcgaaaggcgcacacagaaagaaattgtgcaaaggggttttaaagttaattaaaaacagagaattaattaggaaacacagttttctatttgggttttcgatttgctttgacataactatgagtactggttgaattaaatataatatcaaagccaatatctatttaagtgcaattagagtgtattactattattggagctacttatttgaatggggaaaatatggtgatgcacagtgcacacagaaaagccgacaaaagccaaggggattagatgtccaaagggagcagactgagactgggcgctgtttttatgccgccaatttcatgccactttgcattttaattaaaagcatcccacccctctcttcccgttgcagtccaggaatgcaccacagactccgaggagctgatgtaccaccaggtgcgggcctcctcctcctgcagcgccccgcccgatttgctgctggtcagcgaacgtgacaataatatccaactgcgatcgccggtagtgaacataatcaccacgccgccgggcaatgcgtctggtgcgggaagtaagcagcagtctcatcaccagacgaaccaccactcctcgggcaggagtcatcccgggcacacggcacatccgcaggatgtgagcagcggcggcagccatagcaagcatctgcgcatcagcagcacttccaatggcaagcacggcaaatactcaaatatgcagcagcaactgccgcaggatgaggatgtggtggatgcggctgccacgatgcagcagcagcagcacactggccacgcccactcgcgccacctgcaccaccacaaggaggagcgcatccgactggaggtgagttagcaatgccattacccaaattccctgccagcaggcactcaatgcattatcccatggacacaatcagattccatcttccgcacccataaacactgcgcctaatagtccattctgatttcaatttcaatttccatttccattcattaattagtgaatttatggaatggatttgtcttgttttcaacgtttcataacacaaatatttatggagccattaattggcgctcactttaaaagggttgtgcgcaattaggtagaattttgcatttactcagagttcatcatacttcaaggcgacccagatgaaatttggaatgtatcttgagcagatagtcaatctcgattgttaattttgtctgagattaagtattttccctttaagtacttttcatttagtgtagtgctaacaaataaaataaggtttgattaatattatttgatagctttagtagggtattctcgttgcttgtatgccctgtaattttcaattagccaaacaatcgatttgcttataaatacgagatgataaattaaatgatgtttgcttttccatttgcgggatttttctgacccccagccaggtgtttggtgttgggccaagtttaatcaactcgcccggtgttattaccacgattcccggccataattcatggcccacagggcacatcgcacatcggccataaactcaacatttcaatgtgcttttaattaaaatttcaatggctgttcgctcaccgcgatggcctcagattcggcttcagcttcatttgttgttccagcgcacccacccacgaaaatgtagtaaaatcgaaaaaaaatagggaaaaatatttcattaacacaagggcgccggcaattttccattaccacccactgcggatggtcgttttctgtttcggacgccgctgccacttgtgccagtttcgccaaaaaatatcaaaacattaaaattcaataaaacccattaaaagcaaaacaacaaacacgaaaagcactcaggggcaattaaaaatctacaagccgagcagcagcagcagcagcaaaggaaattatatttatttatttgcgactctgaaggggcagccatgtgggggagtggaagttctggcagcgagctgttggctgctgggatctgccactttatcagtggtaatgggaattgttttgtgccccctgtgaggatgacgttgctgctccttgtgcagcggcaaattaaatatttagtcaaattatggccacaattttcgactggttttagtggtcctgaacattgttcgctattgttgtttccagtggcttcggtttcattttcgcctccccttagccatgtggcatcagcatccgcaacatgttgcatttgcaaaaagtgttgcctactttcgggtcgtgtggtaaatttgcagtgcgatttttatttttttttttttttttttattacgatgatgtttttattatttgatcaacgcactgttacccatgcggcaacttaatttgatctgcttaaattattttattttacaatgtgtcttggttacttaagactaacagatttttaatcctaaaaatgatagggagaattataatagttgatataacatagtaattattatttatttgattattctaatgaattttaaaactaagactttctaggtcaaaaccaggttagggaggtcatgagggtggtgtgcgatttttatgcccgaaagtttattagcagcgttatttttttgttgtctatttttagttagttttccattgcatcaggcttatgaagctgctaaaaatttgtgggcaaaaagttttaacacatttgcggatagaggaatttaagtctttgagtttgtagaacatttttaatggaatggtatttatttgtctgagttgttggtgaggagatttaaatggctggcatggtaatttaaaagctataattataagttttttgaatagcattcagtatagctacaatttattataatgcctctttgagttgttcaggtaattaaacagatattcaaaatgtttatctttgaatgccaatgaacatccatgattcctctaaactttcaactacattgtgataactaaacaaataagataattgagaatcatttgaatggtgcttaagttagcttgcaggttcttcgttttgatagaaaaatatgtttaaacaagaatctttaattaaggcagtgttagagaatctcttgcaaacccttgggaaaatgcaattaccatagaatcttgatttgcacgctcttgattcaaatcaaattcagtccgagacaatcaatcactcatcccgcaaaatgtatttgtattccaaaacaggaattcacctgcgacgtgtccgtggagggcggcaagtcatcgcagccgctgcagttctcgttcacgttctacgacctggacgggcatcacggcaagataacaaaggacgacatcgtgggcattgtgtacaccatatacgagtccattggcaagtcggtggtggtgccccactgcggcagcaagacaatcaacgtgcgcctcaccgtcagtcccgagggcaaatcgaaatcgcagccggtggtgcccgttccggtggcagccggattcagcagcagccacgccagcaaactgaagaagttgcccacgggtctggcggccatgtcgaaacccctggccggcggaggagtgggatccggcggagcgtcggcgctaacgacatccgccggcaaccgccgccagcatcgctatcgaccacgcaaactgattaagtccgatgacgaggacgatgacagcaacagcgaaaaggagaaggacgccgcccacgcccctgccgccgaccagcccagcggaagtggaacaaaggcgactgggaagagccatcaccaccagtcgcagtccgccaggtatcaccagaagaacaattcccgggcggagcagtgctgcacggaacagaatacgcccgacaatggccacaatacctacgagaatatgctgaatctcaagtgctgcaagccggaggtggaccaggtggactgtccctcgcaccgacagcaccaccagagccacccgaaccatcaaatgcgccagcaggacatctacatgaagcaggccacccagcgggtcaagatgttgcgaagggcgcgcaaacaaaaggtaggcacaaggtaacaaacgaaattgtggcaaaaacaaatcaattgctaaacttaactgaaactgctgccagtctaactaacacaagcgaagttatgcatgaatattttgactaaaaaatattaatatgtactctgcatccatgattactcaaatttaaatttatgtttaaataaagttatgcatataagtacagtttaaaccaaaaagatacatttcctgttacaatttatgtagcaaattgcaaacttttcatacggctgaattgaattttcagtacagatttgtatataataattgagaaaatgatggatatcttgtgtaatcccagcttgtctggcagcagatgcaaaactgaatcccctccctttgaaatgtcgtcttttgtttttgttacacctttgttgcttaccaaatgcgttgaacatacgttattttttgcattattataatttaattaaatttaatttccttttatttttggttaactcatcgccatcaatcaaacaccaaccacagtaccaggaccactgcctcgaaacgcgacagcgcagcctgtcagtgggcaacgattccgcctgcccgaatcgccatctgcagctgcagcagccgccggtgggtcacccccagccccagtcgctgaaccacaagagcgcgtcggggtcaccaccgctgggcgtggggggtggtggcgacatgatgctcgatggggtgcagctgcgtcagccgcgaccccattccctcaccccgcatcagcatcaacagcaaaatcagcagcagcagcagcagcagcgaaaatcggccgagtgctggaaatcggcgctgaatcgcaacgatttaattagcatcatcagggagagcatggagaagaaccgcctgtgttttcagctgaatgggtaagccaatcccagatgaatccacccccagtccacattgatgaggatagaaagtcaacagtgctaatggcagaggtttgacattttccaaaagcaattgaaaatgcgtcgatagatgacattttgaagttatattggatgacaaactttaaactcatgaactgaatgtattttgaaaactaatggataaaaaacataatacttatgatcttaagaatattgaaatatctaaacacaagcgttaaaaaacaaaatgctgcattatcatgttaaattattttagtagttgcaagttagtttgctttagttagtataagctttaaaggataccaattcatttgtcataaattgagctgcatggaaatgaaatctcggtcaaacattgtatacaaaattgtattattttcccttttcaaatttaaatttcatttgctttccctatgattttctacttttcggcgactcctaacttccttaccattcccaaccaaacaaattttaaaaaaatcctttaatgacgactaattggaggcctctctctttcaattttccagaaaaccccaagccaatgtgagtcccatacggcaaccggcagcacaacaacaaccacaacaacagcaacgccaacgctgcaatacgggctcgaaaatacccacgttaattaccaaccacagtccggtcgcccagcagtcgccgctcagctgcagtccacccacggcggagcccaccacccccagcattccagcagctccgccggccatcgaggtcaacggtcagcagcaccaccccactcatcccactcatcccagccaccacaaccaccacgagcatccccaaccgcacatacctatctaccatcagcagttggccattaatccggccgttctggccgcccagcagacgcacaacacggcccacaacaagctgaatctgtgtggctacgactcctttctgcacgccactatctgtgggggcggtgcagccgcccactcgcccccggccacgcccagtaatgtggcgaccgttcagccgatacccaagaagagccagaagaacctgctgcaaggataccagcgtttggagcagtcgcagcagcagcagcaacagcagcggagcagcaaggactacaagaactatggcaacctcatctatgccaagctgagtgagcagctgcagcagaaggatcgggagcagaggcgacagcggcacaagcagcagcaacaccagatgctgcaggatcagcccaaggatgcgagtcggtcggagcagcgaccaccgacatcaaactccagttcggctggctccaagatctacggcgatgccgtcgagtgcgcccatctactggccagcgaggaggaggacctaccccccagtccgcagctgaccagtacgcccagcaaagtggtcagcacggacaccctcatcgatctcaacgacgatgtgggcgaggctgtggccgaggcagtcacagaaggaggcaagcagtcgttggaggctgaggaatctggccagcaggtggaggtggaactggacaccagcgcctccagctccatgatacaccgctatgtgcacgagcacatccaccaccactatcaccacttcaaggagcagcaggatgtctaggctaatcggggaatcacactataaactatttgaatgttgcttatgtttcagtctattgattaatgtagcgcgaattgtaatttaaagtaagccttcatcaactaaaacgagaaaatattcgaaaaacgatattagggccagaaacagtggggttggttaagtgagtttggagtttggttaaccaaagacaaattgagaacgattgctgacaaaaatcaattgatagaaatgctagatactaaataaaataactgattattattctttgattttgtaaaaccaatatgtaaattaggataaatattaaacctaacacagtgaagttaagctaggttcctgaataggtaaagaggttaaccaatttcaaactcgcatctccaatttctctcaaggaaaatctttagaaccaaattcgaactcaatgaagatttagcccactgtgagatccactgatcccagcatatacatacatacatacatacacatagcctctatagcttacgcagaattcgaaagaaaacaaaaatcatgcgccttttgccttagcaacaatcgaatcgccgcttcgctatgctacatgttgcagaaacacatatcactatcagaaacaacatgttgccaagagcattttgtgttgctgagcgtgtacgtgtaaactaatgggagaaaaactattgtttagtgcaaattattaaaacaaattgttgtctatgatataaagttttatgcgccgctttttacgtgtttagacagagagcaacagatgattgtagtggaactatggccgccagtttaagttaactaccgatatggatcatgtatatttatgttatctaagccaattaatttaaatactattcttagtttctaacactaaccccaaacaagacaagaaacaatgcaactaagtactaaaccacaacgaccaccaacacaaatcgtagttcaattattattttaaaacttgtttttaattacatcatctgtcaaacaatcgagt

SEQ ID NO: 33689 - DNA, 2691 bp, DROSOPHILA
atgtaccaccaggtgcgggcctcctcctcctgcagcgccccgcccgatttgctgctggtcagcgaacgtgacaataatatccaactgcgatcgccggtagtgaacataatcaccacgccgccgggcaatgcgtctggtgcgggaagtaagcagcagtctcatcaccagacgaaccaccactcctcgggcaggagtcatcccgggcacacggcacatccgcaggatgtgagcagcggcggcagccatagcaagcatctgcgcatcagcagcacttccaatggcaagcacggcaaatactcaaatatgcagcagcaactgccgcaggatgaggatgtggtggatgcggctgccacgatgcagcagcagcagcacactggccacgcccactcgcgccacctgcaccaccacaaggaggagcgcatccgactggaggaattcacctgcgacgtgtccgtggagggcggcaagtcatcgcagccgctgcagttctcgttcacgttctacgacctggacgggcatcacggcaagataacaaaggacgacatcgtgggcattgtgtacaccatatacgagtccattggcaagtcggtggtggtgccccactgcggcagcaagacaatcaacgtgcgcctcaccgtcagtcccgagggcaaatcgaaatcgcagccggtggtgcccgttccggtggcagccggattcagcagcagccacgccagcaaactgaagaagttgcccacgggtctggcggccatgtcgaaacccctggccggcggaggagtgggatccggcggagcgtcggcgctaacgacatccgccggcaaccgccgccagcatcgctatcgaccacgcaaactgattaagtccgatgacgaggacgatgacagcaacagcgaaaaggagaaggacgccgcccacgcccctgccgccgaccagcccagcggaagtggaacaaaggcgactgggaagagccatcaccaccagtcgcagtccgccaggtatcaccagaagaacaattcccgggcggagcagtgctgcacggaacagaatacgcccgacaatggccacaatacctacgagaatatgctgaatctcaagtgctgcaagccggaggtggaccaggtggactgtccctcgcaccgacagcaccaccagagccacccgaaccatcaaatgcgccagcaggacatctacatgaagcaggccacccagcgggtcaagatgttgcgaagggcgcgcaaacaaaagtaccaggaccactgcctcgaaacgcgacagcgcagcctgtcagtgggcaacgattccgcctgcccgaatcgccatctgcagctgcagcagccgccggtgggtcacccccagccccagtcgctgaaccacaagagcgcgtcggggtcaccaccgctgggcgtggggggtggtggcgacatgatgctcgatggggtgcagctgcgtcagccgcgaccccattccctcaccccgcatcagcatcaacagcaaaatcagcagcagcagcagcagcagcgaaaatcggccgagtgctggaaatcggcgctgaatcgcaacgatttaattagcatcatcagggagagcatggagaagaaccgcctgtgttttcagctgaatggaaaaccccaagccaatgtgagtcccatacggcaaccggcagcacaacaacaaccacaacaacagcaacgccaacgctgcaatacgggctcgaaaatacccacgttaattaccaaccacagtccggtcgcccagcagtcgccgctcagctgcagtccacccacggcggagcccaccacccccagcattccagcagctccgccggccatcgaggtcaacggtcagcagcaccaccccactcatcccactcatcccagccaccacaaccaccacgagcatccccaaccgcacatacctatctaccatcagcagttggccattaatccggccgttctggccgcccagcagacgcacaacacggcccacaacaagctgaatctgtgtggctacgactcctttctgcacgccactatctgtgggggcggtgcagccgcccactcgcccccggccacgcccagtaatgtggcgaccgttcagccgatacccaagaagagccagaagaacctgctgcaaggataccagcgtttggagcagtcgcagcagcagcagcaacagcagcggagcagcaaggactacaagaactatggcaacctcatctatgccaagctgagtgagcagctgcagcagaaggatcgggagcagaggcgacagcggcacaagcagcagcaacaccagatgctgcaggatcagcccaaggatgcgagtcggtcggagcagcgaccaccgacatcaaactccagttcggctggctccaagatctacggcgatgccgtcgagtgcgcccatctactggccagcgaggaggaggacctaccccccagtccgcagctgaccagtacgcccagcaaagtggtcagcacggacaccctcatcgatctcaacgacgatgtgggcgaggctgtggccgaggcagtcacagaaggaggcaagcagtcgttggaggctgaggaatctggccagcaggtggaggtggaactggacaccagcgcctccagctccatgatacaccgctatgtgcacgagcacatccaccaccactatcaccacttcaaggagcagcaggatgtctag

SEQ ID NO: 33690 - protein, 896 aa, DROSOPHILA
MYHQVRASSSCSAPPDLLLVSERDNNIQLRSPVVNIITTPPGNASGAGSKQQSHHQTNHHSSGRSHPGHTAHPQDVSSGGSHSKHLRISSTSNGKHGKYSNMQQQLPQDEDVVDAAATMQQQQHTGHAHSRHLHHHKEERIRLEEFTCDVSVEGGKSSQPLQFSFTFYDLDGHHGKITKDDIVGIVYTIYESIGKSVVVPHCGSKTINVRLTVSPEGKSKSQPVVPVPVAAGFSSSHASKLKKLPTGLAAMSKPLAGGGVGSGGASALTTSAGNRRQHRYRPRKLIKSDDEDDDSNSEKEKDAAHAPAADQPSGSGTKATGKSHHHQSQSARYHQKNNSRAEQCCTEQNTPDNGHNTYENMLNLKCCKPEVDQVDCPSHRQHHQSHPNHQMRQQDIYMKQATQRVKMLRRARKQKYQDHCLETRQRSLSVGNDSACPNRHLQLQQPPVGHPQPQSLNHKSASGSPPLGVGGGGDMMLDGVQLRQPRPHSLTPHQHQQQNQQQQQQQRKSAECWKSALNRNDLISIIRESMEKNRLCFQLNGKPQANVSPIRQPAAQQQPQQQQRQRCNTGSKIPTLITNHSPVAQQSPLSCSPPTAEPTTPSIPAAPPAIEVNGQQHHPTHPTHPSHHNHHEHPQPHIPIYHQQLAINPAVLAAQQTHNTAHNKLNLCGYDSFLHATICGGGAAAHSPPATPSNVATVQPIPKKSQKNLLQGYQRLEQSQQQQQQQRSSKDYKNYGNLIYAKLSEQLQQKDREQRRQRHKQQQHQMLQDQPKDASRSEQRPPTSNSSSAGSKIYGDAVECAHLLASEEEDLPPSPQLTSTPSKVVSTDTLIDLNDDVGEAVAEAVTEGGKQSLEAEESGQQVEVELDTSASSSMIHRYVHEHIHHHYHHFKEQQDV

SEQ ID NO: 33691 - DNA, 2868 bp, DROSOPHILA
gaacagttactaactaactatgttttagcccgagttgcctccgttcaagtgcctgctgcccacgcccgaatggcgggatgagcaagttaaatccttccaagcagcccgctcccaggtcctagttcttcgtaaggagttggccaacaacaactacgaccagtccggggaaccacctttgacttccgaccaggagaaatggaaggaattctgccggaatcagcagcccctcctgagcaccctgctccatttgacccaaaacgacttggagctcttgctggaaatgctcagcaagtggctgcaggatcccaacaccacggtagaccttctccacgatgtctggctggctcgctggctgtatgccaccttggtctgcctccaccttccactggaacctcacgtgttcagcacccttcgatacatcgcccgaacctgcatccatctgagaaatcaacttaaggaggacgaagtgcaacgggcagctccctacaacctactactaacgctcaccgttcaggttttcgcacagaatgatttcaaggattacatataggtatcatattcccagtttagaaaccactaatttaagcgcaaattcgactattttgttaactaaaaagccaaaagctacgctggtaattttgtttatataattactctacgtttagatactatttttatagttttctgtggctgaattatattcttttggttagaaaacagatttatttatgcatatcaatcaagagacaacatattgttaatgaacctaaaaattagatcgtaaaacataaaagtttaaatataaaagtaatgataatatcttaatttgaatgaagaagttacccatttaacccatgtacacaagtcaattatttctggaaaatgtactgaaatgtgaccatttattgaaaatatccattgttttccgggttgcaacataagtcttttaacaccaaaggttttcttaaaacataagacacaaataattttgctaatttattcagtaagaaggaaacatgcgcctgtaggcctggcatatatcgcagctgttgtgatgctcatccaaaggagaactacagctggacaagtggctgcactgcgtcagcgaggaactctggctaaggctacttaattgcgttgtgctggagcaggaggacaatcgccgttcctgctgtttctgttgggcaggagagccagctctccaagcggcgtaactgccacttggacaacaattggattgcctcccatgacacacggtttgctgctttcgaggctgatccaaatggcccaggcaacggctctcaacgtggcgattgacaggaggagcagagtactccctggaactggagcagctgcacacctttttccgatcctgcgtggtcaactgcgcagatagctccaccttgggcgccaggatacccggaaaagcaggcgtcgccttcatcaacagctgaacattggagctgtgggcacagctcaggcgcggaaaagtgggttgcatcacatccgaaagactgcccacgaagtaggccaaccttcggccattctgccagacggttatctccagctgttcagctttcagtagctcgtgcatctcctccaggcagcccacgctcttgaagtatccctccatcgtgaactgatcgtggcacagcatcggaaagcgaggctccatgggtccagttcgaaagtagtagcccaaggtcttgatggtggcctccaaatatccgtgtgaacaaagccaaacaccgggacaagtgagctgaaaatggaaggagccttgatgtcacaggtacacttcaatcgacatagccacaaaccgcatggagctgcagatctaactttacgtagaatctcttgtgggacatttgctgcctgatcctaagtgaaagtctgccggaaaatagccaactgcttggggcgggaatcgagaattggggggcgaaagcgcatggttctttgttttggagcccactggttgccggggcagcggttgaaagtgaatttcaaagtcgattactggtcgataacgcagggaattttgattgataagcaaaagagttgaaagtgatgtgtatagaatgtatagtgtaactatacaatgtgaagagtacttaaagaattgaatagtttttgaattaattaagaaataatacaaaaatatgatagtaaaatactaaaaaaaatctattttagaataattagctaactcacatttttccatgttttcattttctatagctttaactactgataatacggcttccgtgggaacaaagtatttctcacagtgatagcagcaacccgataggaaatcccgaccacaatgtgcatcactagtcacagcaatagtaaacagcgggcacagtccacaaagaaaaccattgccgccggtagagatggctgcagtttcggatattccagtgcacctgcccaagctgctggctctgttcaagacggtggtgcccaagctggtgaacaacaagcacaagggacagtacggacgcattggagtgatcggtgggtccctggagtacaccggagcgccgtacttcgcggccatttcctcgataagagtgggcgctgacctggcgcatgtgttctgccattcaaatgcgtcggccattatcaagtcctacagtcccgatcttatcgtgcatccagtgctagactgtgtggatgcagtggagagaatagcgccctggttagagcgacttcacgtcgttgtgagtagccccccccccccacctacatacgtatatgctacatttatacaattaaatgctaaatttagaatcgttaaggttattggacctggactgggtcgggagccgggcatcctgaagacggcatccaacgtactcaagc

SEQ ID NO: 33692 - DNA, 810 bp, DROSOPHILA
atgtcccacaagagattctacgtaaagttagatctgcagctccatgcgctcacttgtcccggtgtttggctttgttcacacggatatttggaggccaccatcaagaccttgggctactactttcgaactggacccatggagcctcgctttccgatgctgtgccacgatcagttcacgatggagggatacttcaagagcgtgggctgcctggaggagatgcacgagctactgaaagctgaacagctggagataaccgtctggcagaatggccgaaggttggcctacttcgtgggcagtctttcggatgtgatgcaacccacttttccgcgcctgagctgtgcccacagctccaatgttcagctgttgatgaaggcgacgcctgcttttccgggtatcctggcgcccaaggtggagctatctgcgcagttgaccacgcaggatcggaaaaaggtgtgcagctgctccagttccagggagtactctgctcctcctgtcaatcgccacgttgagagccgttgcctgggccatttggatcagcctcgaaagcagcaaaccgtgtgtcatgggaggcaatccaattgttgtccaagtggcagttacgccgcttggagagctggctctcctgcccaacagaaacagcaggaacggcgattgtcctcctgctccagcacaacgcaattaagtagccttagccagagttcctcgctgacgcagtgcagccacttgtccagctgtagttctcctttggatgagcatcacaacagctgcgatatatgccaggcctacaggcgcatgtttccttcttactga

SEQ ID NO: 33693 - protein, 269 aa, DROSOPHILA
MSHKRFYVKLDLQLHALTCPGVWLCSHGYLEATIKTLGYYFRTGPMEPRFPMLCHDQFTMEGYFKSVGCLEEMHELLKAEQLEITVWQNGRRLAYFVGSLSDVMQPTFPRLSCAHSSNVQLLMKATPAFPGILAPKVELSAQLTTQDRKKVCSCSSSREYSAPPVNRHVESRCLGHLDQPRKQQTVCHGRQSNCCPSGSYAAWRAGSPAQQKQQERRLSSCSSTTQLSSLSQSSSLTQCSHLSSCSSPLDEHHNSCDICQAYRRMFPSY

SEQ ID NO: 33694 - DNA, 3867 bp, DROSOPHILA
tcatcaatgaaacaatctaaacacaaaagcactcacaagtgtgacacagaacgtgacaaaaaaatataaaaaaaaaaactataaagacacagatacatgtgtgtgtgactatcagccatttgagggcaaaacaagtggaaaacgaggagaagcgatgaccatatgggagctataaattggttattttataatagggaaactcacctgccggggtaatataattgagggttctgtttggaatcatcgtattgaaacgtagaaggaggttacggattttgggtagaaattagggggcttttgtaagctaaaagtaattactgcgcataatttgaatgaatatatgtatttagtagtgaacgagtccccatgtttaatctgataatattaatattattatatatttgaattaacatttatttgcttattaaactaatcgtaatatcttaactatattttatgagtatgcggcgaggttaatcattagaaaacaaaatattcgctgcgttgaccaccttaatatttaattatgtgccaaaaattctttggcgaaccgtgctgagataccgtcaaattccaattttgcatagcaatcatgaagagcagtttctgatgaaatgcttatacagcaattccgtggtattcatcaccctttctatatttattagcatctatttcccctgttccattcggcggaactcaatgataggccgagtttgtttgagaaggaaacagccatcgaatgcagtttggtatgccatatccacggggattgatatccatggccatggtcgctcggttcgattggcctttatcgtggtttatttttaaagttctgcggaaaatgcgcagattgagccggcagagtgcgtataccacccgttggccggcaaataagttgattgccagcgaactctttgctgcgccttccgttttattcaatttgctttttttcgcatttaatatgcggcaagtagaaaattgtaagcttccgtttggcgttatgctgatgagcagtggccattcgcgtattttgatgacaattcccatacaagtctcaagcttgtaaatatagaaacagcatttccgctgctgcgaccactcgcacttccgtttccaattggagcaaagaagatcaccagtaccttcccttagttttccttttccccctcccccttttatgaatgattcgcttgcaagaatttcacgcatacttggcttaggttgggttaatagcagctacatgtcgcgtcgtcgcgtaggtgttgccttaccaaagacgaaagaccaaaaagctacacttggccaagcataacgaacgtcggattccagaggcctcaaatgacacggtggccaaaagaggcgctctgctcaaaaagcattataaagtttaacccgctctcttcgcttttctttactttcagatggcttcaacaattttcgccaggcatttccggaatggtgcgaggacgataatcagacgcacagcaaagagatcgaatctagtcgcaatgttcaaaccgatcagttaatgggtcttaggtaagtgatgcatcctgatttttaaaggaagataatatatagattaaagaaacgaatatatggaataaatttaaccctgccaaatttttcaggtccctgcgcatttccacaacgcaatccgattccgcgtgcagcagttcggcggaatcgtcggattgcgagagctccagccaccatcaccaccaccacagtcaccacaactacaacgaggcgcccgtggagataatccctggactactcttcctgggaaatgccacacacagctgcgactcggaagcgttgaaaaagtacaatataaaggtaagcatggatcgctttgttagcttactttatttaatcatatcctttggctatttcagtatgttttgaatgtgacaccagatttgccaaataagttcaaggagtcgggcgacatcaagtatctgcagattccgatcacggatcactactcacaagatttggccatacatttcccggatgccatacagtttataggtgaggttttgtgaaaatgcgtaattttgaggataataactttaagggattaaagtatagataactataatgaaaggggtaagggaaaggggttttgataatcaaatataacgttttaaagatagaaactattaaagcttgaaggcttaatcctgttttgtcaaatcaaagctaatgctctgtattgtttacaaaaattcacagaggaagcgcggtccgcaagctcggtggtgctggtccactgcctggccggagtttcgcgctcggtgaccgtgacgctcgcctacttgatgcacacgcggggcctgagtctcaacgacgccttcgcgatggtgcgggaccggaagccggatgtatcgcccaacttccacttcatgcagcagctgctgtccttcgagagccaactgcgcctgagacccggctccaggttctcgtgcagctgcattgcgccggactgcaattgcatgcagaccacgggctttatggccacccatctggcgaatgctaccggggtctcgccagactccggcatcgagttcgatcgctggaccccgtcggacacgggtcttaaatgagaacagagtggcggtaagagtttcgtgctaccaccaagtcaggaggtcccatttgcagccgccgccacatcgccgttgcccatgtgcctggcggttaacccggacaacatgtctccggccagcaccaccagctcgtccacatcgaccacgaccaccgcggaggcggtttccgtggtggaaatggtgcagcatcgggatcaggagatggccgaagaagacatcataaccaggggagagtacgatgaggatgcggcctgaatggcgaagcttttcctaacttggttctcgcgcaaaacacccggataaaccacacatacatatgagccgcttgttaaataggggtacgaattcaaactttaataaatgtacaaagttttggagaaatgcccaacgtacacatattgattaataccacgtaaataacttaatgtttaatacacttttaagtgaagtgcagacaaaatccaacgttatccacacggaaaccaacttcgcaactatacaaaaatgagaatgagaaataaaatatataaaatatatttatatatacgcagtgtacgcagtgtttgtatctaactcctaagccaagtcaagagaataaatatattgaagccgaagcgaaaataaacaattaaactgagagcagttttctaggtatatagttttagttttagttttaaattttactaaactcgaaatcgtttataaatgtaaagtttgttatattcggagcgattggccgcgataggcgctccctaatataaatatactaccatgccaagtcatataagtgtaaagtgaactaaaatcccgaatatcgaagaatttttaaaatcgaaaacaaaagaaaaatgaacactaaaacaaagaaaataaatacaaccatttgcacaacacaaataaccacacaaaaaagaacatttgccaaaagcaaaacattttttattgtttttaggggtgatctaaaatatcggcatagaccatatagctaagcagattttagcaaggtttgacaattggtctagattatattaaaagccgattaatcgcataaagttattttctacaaacgacatgttaaagttggaggacagcaagatggaaataaattaagtgattcatttgttatgtaatggataaaaaaaaataaagttgtatgcgtgtcagctgttttccagtcaggcaaagttggtacaaaattttatcaggtgacatttcaagaaacaaaaaatacgaaccaaactgcatctgaataatg

SEQ ID NO: 33695 - DNA, 1047 bp, DROSOPHILA
atgctgatgagcagtggccattcgcatggcttcaacaattttcgccaggcatttccggaatggtgcgaggacgataatcagacgcacagcaaagagatcgaatctagtcgcaatgttcaaaccgatcagttaatgggtcttaggtccctgcgcatttccacaacgcaatccgattccgcgtgcagcagttcggcggaatcgtcggattgcgagagctccagccaccatcaccaccaccacagtcaccacaactacaacgaggcgcccgtggagataatccctggactactcttcctgggaaatgccacacacagctgcgactcggaagcgttgaaaaagtacaatataaagtatgttttgaatgtgacaccagatttgccaaataagttcaaggagtcgggcgacatcaagtatctgcagattccgatcacggatcactactcacaagatttggccatacatttcccggatgccatacagtttatagaggaagcgcggtccgcaagctcggtggtgctggtccactgcctggccggagtttcgcgctcggtgaccgtgacgctcgcctacttgatgcacacgcggggcctgagtctcaacgacgccttcgcgatggtgcgggaccggaagccggatgtatcgcccaacttccacttcatgcagcagctgctgtccttcgagagccaactgcgcctgagacccggctccaggttctcgtgcagctgcattgcgccggactgcaattgcatgcagaccacgggctttatggccacccatctggcgaatgctaccggggtctcgccagactccggcatcgagttcgatcgctggaccccgtcggacacggccgccgccacatcgccgttgcccatgtgcctggcggttaacccggacaacatgtctccggccagcaccaccagctcgtccacatcgaccacgaccaccgcggaggcggtttccgtggtggaaatggtgcagcatcgggatcaggagatggccgaagaagacatcataaccaggggagagtacgatgaggatgcggcctga

SEQ ID NO: 33696 - protein, 348 aa, DROSOPHILA
MLMSSGHSHGFNNFRQAFPEWCEDDNQTHSKEIESSRNVQTDQLMGLRSLRISTTQSDSACSSSAESSDCESSSHHHHHHSHHNYNEAPVEIIPGLLFLGNATHSCDSEALKKYNIKYVLNVTPDLPNKFKESGDIKYLQIPITDHYSQDLAIHFPDAIQFIEEARSASSVVLVHCLAGVSRSVTVTLAYLMHTRGLSLNDAFAMVRDRKPDVSPNFHFMQQLLSFESQLRLRPGSRFSCSCIAPDCNCMQTTGFMATHLANATGVSPDSGIEFDRWTPSDTAAATSPLPMCLAVNPDNMSPASTTSSSTSTTTTAEAVSVVEMVQHRDQEMAEEDIITRGEYDEDAA

SEQ ID NO: 33697 - DNA, 2414 bp, DROSOPHILA
gctcttctctccggttcgcgtacctgtgtgcgcgggtgcgttcttcctttcattgcgtgtaacggactgtttgtttcgaaatagtaattcccaaatgtatttttttaaacgagaaggcaaaaagattcaatattttataagttatttcttaatactgcgcctaacaaatacaatattgttattgggtttcgctcttcgaattccgacggagagaattggagagtcggagagcaagtgcaactgtgttcgtatttttggagagcaacgaggctatttaagcaacccacgacgcgcttattttgttattgcccgattatcttttacccgcgctgcttgtgtgtgctcgctttccattcgaaaaaaacatcaactcaaaatatggatatttgatagaagtaattacctatttgtttgggaaatattcaacggtttttggatgttttagttactcgatgacaggttcaccgcacgttttttcattcgattccgaactgttgttgttgttttagcgaagcacacctaaaaaatacaaaaccactcacacacacgcgaaacatacacacggttgtgatttggcgcgctcttgtgtgcgtgtgtacatacaacaaaaagcaaaaagcaacgaatttcggtgtgcaaagaaacataaatcggcaagcgaggaaatcggaaagccaagaaacaaaaaaaacaaaacagtgcaagttacagatttccccaaacgagataaaaacaaaaattcctttttgatttccaagattttcatctgcgcgggagtgtgtgtgtgtgtaacagcaacaaataccattgcacggccaagaaagaagaagagaaccagcgcgaagcagaagaagaaagatgatgtaaactttgttgtaaccaaaagaaaaaagaataacataaaaaacgagtgaagcagagaacagagctaaacgggaaaaatagtggcagtgcttcgaattcttccagtctttgagtgattttttgggagctcttcaaaatgccagaaacggagcacgagacctgcagcaaggagtggctgcagtcccagttgcgatccctggactccaaggacctgatcctgttggactgccgcggctcgcacgagtacagtgagtcgcacatccgcggagccgtcaacctatgcatacccagcatcgtcctccgtcgtctggcggttggcaaaatcgatctggcctccacgatcaagtcgcccgagctgaagcaacgcatccagtcgggctacaagctatgctggttcatcctctacaacggcgaaggcgtgcccggccagaatcaggagatcgccggagccggatccctggccgtcgccatggactccatcatcagcatcctgcaccgtcgcctcaagcaggacggctgccgcgtagttgctttacaaggtgagtcataagttcaatactttgggtgccccaaaaaatagaactacaatatcataatacaagtgcgggagttactaaaaccaactaaggtttatatatacctctcaattcccacatttaaactcacgtaattaatcttataaatatgaatactatccatgttgatttcatagaatatgtacatatttgaaatattaaagcttcagtaatagaaatgactaagtaaatcattataaacatagtagaaaaccgaaaaatttcatccaaaatttccccccttaatctcgtttgattagaatgtaataactaaagtagtaatattaagatttacattgtgatattcttggaatgcaatgaatcaatattacgaatggaattttttgttagtttactacgcacctgtatcgagaacggaactctccatttgttgatcatagctgtgctatcggattctttaaatgcctgatacttcccaacaccgcccataaatcaatgccgcacattcctatcctaggcctaagaatatcataacttatttatacttccccaatgttgtttgcggcatttttagcccgaaacccccaaggaagaaaccaaaacaaaacaaaacagccgaaagaatattaataatacaagcaagcactgcctggccataaataaacatttgcatggatttgttattgttttttttttttttcgttttggcgaaacaaggcaagcattctgggggcggagacaaaatgacaaatgcaaaaaaaaaaactagcaaaatataatgtaatccgcacagctgataaagctagcgccagattagaattatatttagtctgactgatcctgtcctcctcctctcgcattctgattatagacatacactgcatagatttcacctttctgaacttgtttttggttgacacgattttgtttgactttgatagaaaattataatggcaggaatttgttagtttatatatgctgtgtcttttgtttccttatcacaattgcatgtaa

SEQ ID NO: 33698 - DNA, 414 bp, DROSOPHILA
atgccagaaacggagcacgagacctgcagcaaggagtggctgcagtcccagttgcgatccctggactccaaggacctgatcctgttggactgccgcggctcgcacgagtacagtgagtcgcacatccgcggagccgtcaacctatgcatacccagcatcgtcctccgtcgtctggcggttggcaaaatcgatctggcctccacgatcaagtcgcccgagctgaagcaacgcatccagtcgggctacaagctatgctggttcatcctctacaacggcgaaggcgtgcccggccagaatcaggagatcgccggagccggatccctggccgtcgccatggactccatcatcagcatcctgcaccgtcgcctcaagcaggacggctgccgcgtagttgctttacaaggtgagtcataa

SEQ ID NO: 33699 - protein, 137 aa, DROSOPHILA
MPETEHETCSKEWLQSQLRSLDSKDLILLDCRGSHEYSESHIRGAVNLCIPSIVLRRLAVGKIDLASTIKSPELKQRIQSGYKLCWFILYNGEGVPGQNQEIAGAGSLAVAMDSIISILHRRLKQDGCRVVALQGES

SEQ ID NO: 33700 - DNA, 5212 bp, DROSOPHILA
taatgctcgaatttggccaacagcaagcaaggtcgatgatgatggtcatgatgatggcaacgttgatggcgcacaaagagtcgctgcatttcgccaacgcaaatatttatcgccaccacacgaaaatgtcaaaggccatgggcctttccacgcgagggttaaaatttaattactccgtgacaagagcacctgttgcggtcaattaattttaaattagcagcagagtttttaaattattgggactttgaaccggaaaccggaatcgcataaacagggagagctgcaaacggttgggtaatttaatattgcaaattttctgttccagcaaaatgattattttgaaatgaattttaatattttagaatgggtgtaaaattcaaatttaatttgcaagagaattaatggttacaacagccacgtgtttcactatatttatcataaacagcaataatacttcttaacctatttgaatgtcgttcaaatattcagcgattaatcaaagctaccatgaaattttttgtcatgacgaacttgatttgccaggaaattaaatgacacttttgaatcaaacgagcttcatgagccatgccaattaatgtctttcatttattcaactaattggaatgtgaattatttatttaattataattattatattattattattattcatttactcgctttaaagaatatgaggagcaatgtagttcttttcaaaacaaaacacagaataatgacgaaaattaattattaactaaagagaaactaaaatattcaacacatatataaaataaaaacaagaataacacagaagaggcataatttttctttttcggttattaattcggttaaataaattgtcaattcttttaaatgcaatgtatttatttaaatggattttaaatggatttttattggagaaaatttaacatttcaaaaataccgtaggtaaaatgcacacgtgcaaacaatttctgtgtgcatccaaaagaatttcccgatgtttccagccgtgcaaacaacactaatgaacaccgaagcacaggaaaattctgttgaaaagccaattaatcaatccgcgtttccacttgcagaaacaagaaaaaaggcgcgagctgcgcctgaagcgattctggcgctcccccaagaccacgtcctcggaggactccaatggctatgagagtcccacgagaacgaaagcgtccagtgccggcggcagcagcgatgcccagagattcaaccacctgcactacaccagcctgtcgcagggatcgggcacctcgtcctcggcgggcggagccactgcatccggagcggggccgacgactctggggcagtccggcaacagcaagccctcctgctcgctgccacttttgcaggtgtggcccagccaggtaggtccttgtctccccacgttttgatttgttttctagcccgcagtggggaaaaaaacacgttccaaatttgggaaattcagattaacgttaagtattttatagaaatttatacagttctattatagcataaaaattgatatttttaaacaattaatttatacacttattttatcagtgattaaaatctatttttttagaaatatatattcagacagtttgtctttatattatataaacgaatccttgcagttttataacaatataaaaacgttgcatacttttaagcatctcagctgaaaaaataacttccccacgaaaagttattttggaacgtgttgtttaccccatatgcgaaatatagtgttgaaaagaaaatgtagaccaatatatgtgttttgggaaaaaaagcaaccgcaacagttttaaacttggggctttttagttttatttttacgaatctctcgcttgcgagtggtttttatgctgtggccagttgtgcgtttttgcgttaatttgttctccgactctctatttcttgccactacaccaacaccaccgaaccccacctacaccaccaaaccttacttacaccactaccaccactaccatcaccaccaccaaacaccaccacccgcctaaaaaacatacaataaccctctgtgtgtgcgttgcgtgtttggttcggttatggttttggttcggtttggtttggtttggttttggctatggctatggttatggtttcggattggattggttttggttctgattctggttctgattctgattccgattccggttcggttttgattgccgttctgctgtggtagccgctcctgcgccaggagggcttcgttcagttgcgtcgaaacagcggccccgagggtcagcgggtatgatctccaaccagttcctctttttccagcctctctagtctgctccacttcttatctgctctattctctatctaatcttatatatgctactcgtaactattaactatatagatttttgcatgcctcgattaactattttgaaagagcctccaacgagctccaatcgtttttgactactaactgtataaatctgaccacagtacccttctcgttgaggttattttgtgtattctacacgtcgttttagcctagaattcgatgctcatgtaatttaattgggaattcttttgctaaatattatttggttattcatgcaccatttttggctggggctggtcgacaactgccatgggaatgtggtcatagctgccagtttgctgtattaaaaaaaaaaaagtgattttttattggaatttgcacactaaatactttaatgaaattctaacaaccagctatcataaattattaaaaaaatatgtatataaaaattggttttaacccactcttgtcgatcaacccatgctcacccaactcaaaatcaccttgtataagtaaatcccacgacacgacacttttccctgtataaaaaggcaagcccccccacccactgaactacgtttttgaaccacctaactaatcaagtcacctctgagaatataccactattcccgaataagcagcgaatcccacactgcacttgcgaaccggcttgaaagctccccgaatcccctaagtaactcctcgaatgatcctatccaggattcaaatgtagcctatcttatatttgatctggactcttgcaggattcgccgcgcggcgaagcggatggccagtccttcgtgttcccggccatcgtggagacgagtgtcagcagtccgacagccgtggccagcggaagtggcagtatcgggagcaccaacctgagtctgaacgccaggaggagcagcaaccacctcagcttgtcgacggaccggcggagttctctgtactgtgataccctgcatgccggcgactccggcatcgattcggtgcaggcctcgccctcgccgaacgccttcatagctccgccgggcgttcacaacctgccgctaggccagacgggcggcgggtcctgccatgtgtcgcccaccagcacgcccacccagggatcacccaatttgtccttggggcgcaggagcatgcggaacagcatatgcgtggtgcccagtggcaacgggcggaggaagtcgagcgccctgctgcatccggatcacgcccgactattcgccctgcgaatgaaacatgcggcggcgctggagcgggcacaaacctctccggatcagacctccatcgaggacgccaacgagttccacgacaatggactggccaccaacctgcggctgtgctcggcctcctcgtcgacgacgtcgtcgctgacatccgtggccgcggtcagcctgggcggtgccggtggtgcgggtggtgcgaacactacctcctccggctccgcctacgctgtgggcgcggcgggcgtccagcagcgcgtctccgatccctggctgcagccgcaatccgatcgggaacgggactcccggcacgacggcaggcgcaggtcctccacgatgaccgctcgctactccctgttcgatgccctggacctggagtacgtgctcttgagggccgctgcccgcggttccgtgggtccctacagcctcagtgagtccatgcacaagctcaccttcacgcaatctttggcattcccggccctggcacgtggcctggccaccaaaaggcggaggtcggccacgcacaccagctcacggcccctgaatccccatgagtccggtctgaatacctgcgccaaggtggtcaccgccgtcgtcctggttgccctgtccttcatggtgttcctcatcgtctacaagttcgtgcggacgtgaggtttgctcctggccccgtcgccagagctcccagtcacatatcaggccaactacggagcggaggaggggtccacatcgtcctccatcatctcgtcggcgggccgcagtctgggcaagcacatgtcggggttcaggagcaaattgggtctgcgtcaggccgacttcgagtgatccttgcgaagatcctttgaacggacattaaagcactggtcgccaacatttgtatgaaactctagggattacatattttcctcgaaaagtacctatgaaaatcgtttcgtgttggtaaaaaacggctgaccagtgaaatttttgtgataaactatcaatgaaagcaaatttttccacaaaagaaaccccaacagtggagcatatgtaagttaatgaaataacaaattaaaggcttaaacatttagtaaaaacagcttcaagaggcttgccagagtttcatcaaatttataatatacttatgaataatatttttttataaatataaaaatcgcagctcgcatttcctaggctcctatttagcgaagatttttgaatggaattccaaatccagtttcattgtttgcagttgaagtgcctaactaattttaaacaaactacaaattacattaatactcgcttaattttgttctcttcttaaaaatcgaatttagaaattggcagctgcttggaaactaaaactgcttatgcgctgcagtagtccaaataatttttccaatagataaacttttttgaagggaaattagaagtggtggaggaatttgagaggacatatgatttaatattgatttggaagcattattttatattacagcacattaatatcaaacaaagaattaatttccttttaactcataatttgtgattatttttttattattattattcgcttgtatgtgggagcttcaaagtcaattaaaacccatagcaactggctattattttaaccttatgccttactcattcgttatcctcacaagctccaaaacac

SEQ ID NO: 33701 - DNA, 1428 bp, DROSOPHILA
atgtttccagccaaacaagaaaaaaggcgcgagctgcgcctgaagcgattctggcgctcccccaagaccacgtcctcggaggactccaatggctatgagagtcccacgagaacgaaagcgtccagtgccggcggcagcagcgatgcccagagattcaaccacctgcactacaccagcctgtcgcagggatcgggcacctcgtcctcggcgggcggagccactgcatccggagcggggccgacgactctggggcagtccggcaacagcaagccctcctgctcgctgccacttttgcaggtgtggcccagccaggattcgccgcgcggcgaagcggatggccagtccttcgtgttcccggccatcgtggagacgagtgtcagcagtccgacagccgtggccagcggaagtggcagtatcgggagcaccaacctgagtctgaacgccaggaggagcagcaaccacctcagcttgtcgacggaccggcggagttctctgtactgtgataccctgcatgccggcgactccggcatcgattcggtgcaggcctcgccctcgccgaacgccttcatagctccgccgggcgttcacaacctgccgctaggccagacgggcggcgggtcctgccatgtgtcgcccaccagcacgcccacccagggatcacccaatttgtccttggggcgcaggagcatgcggaacagcatatgcgtggtgcccagtggcaacgggcggaggaagtcgagcgccctgctgcatccggatcacgcccgactattcgccctgcgaatgaaacatgcggcggcgctggagcgggcacaaacctctccggatcagacctccatcgaggacgccaacgagttccacgacaatggactggccaccaacctgcggctgtgctcggcctcctcgtcgacgacgtcgtcgctgacatccgtggccgcggtcagcctgggcggtgccggtggtgcgggtggtgcgaacactacctcctccggctccgcctacgctgtgggcgcggcgggcgtccagcagcgcgtctccgatccctggctgcagccgcaatccgatcgggaacgggactcccggcacgacggcaggcgcaggtcctccacgatgaccgctcgctactccctgttcgatgccctggacctggagtacgtgctcttgagggccgctgcccgcggttccgtgggtccctacagcctcagtgagtccatgcacaagctcaccttcacgcaatctttggcattcccggccctggcacgtggcctggccaccaaaaggcggaggtcggccacgcacaccagctcacggcccctgaatccccatgagtccggtctgaatacctgcgccaaggtggtcaccgccgtcgtcctggttgccctgtccttcatggtgttcctcatcgtctacaagttcgtgcggacgtga

SEQ ID NO: 33702 - protein, 475 aa, DROSOPHILA
MFPAKQEKRRELRLKRFWRSPKTTSSEDSNGYESPTRTKASSAGGSSDAQRFNHLHYTSLSQGSGTSSSAGGATASGAGPTTLGQSGNSKPSCSLPLLQVWPSQDSPRGEADGQSFVFPAIVETSVSSPTAVASGSGSIGSTNLSLNARRSSNHLSLSTDRRSSLYCDTLHAGDSGIDSVQASPSPNAFIAPPGVHNLPLGQTGGGSCHVSPTSTPTQGSPNLSLGRRSMRNSICVVPSGNGRRKSSALLHPDHARLFALRMKHAAALERAQTSPDQTSIEDANEFHDNGLATNLRLCSASSSTTSSLTSVAAVSLGGAGGAGGANTTSSGSAYAVGAAGVQQRVSDPWLQPQSDRERDSRHDGRRRSSTMTARYSLFDALDLEYVLLRAAARGSVGPYSLSESMHKLTFTQSLAFPALARGLATKRRRSATHTSSRPLNPHESGLNTCAKVVTAVVLVALSFMVFLIVYKFVRT

SEQ ID NO: 33703 - DNA, 2309 bp, DROSOPHILA
cttcctgcagaacgaggagatcgcctgcgacggcctgctgctccgggaaagctccacgggtccgcactcgtgcaccctggtcttcctgcttacctacttctttggcatggcctcgtccatctggtgggtgatcctcagtttcacctggttcctggccgctggtctgaagtggggcaatgaggccatcaccaagcactcgcagtacttccacctggccgcctggttgattcccactgtccagtccgtggccgtactcctgctctcggcggtggatggcgatcccattctgggcatctgctatgtgggcaacctcaatccggatcacctaaagacctttgtgctggccccgctcttcgtttacctcgtaatcggcaccaccttcctgatggccggctttgtgtccctcttccgcatccgctcggttatcaagcaacagggcggtgtaggagctggtgtcaaggcggacaagctggagaaactgatgatcaggattggcatcttctcggtgctctacacggtgccggccaccatagttatcggatgttacctgtacgaagcagcctactttgaggactggatcaaggccctggcctgtccatgcgcccaggtgaagggtcccggcaagaagcctctctactcggtcctgatgctcaagtacttcatggccctggccgtgggcatcacctcgggcgtgtggatctggtctggcaagacgctggagagctggcgacgcttctggcggagactcctaggagcgccggaccgcacgggcgccaaccaggcgctgatcaagcagcggcctccgatcccgcatccctatgccggatctggaatgggaatgcccgtgggctcggcggcgggctccctgctggccacgccctacacccaggcgggcggagcctcggtggcctccaccagccaccaccacctgcaccaccacgttctcaagcagccggcggccagccacgtatgacatggagagtcggggggagcatcgaccatgggcggcggtgggggcggcggtagcacccttggcggcggcaccctgggccacggcaccgcgatgagcagcagcacggtcggcatgggccctctccccggcaccctgatgcatggcgcctccggcggaggcgtgggcggcggcaatcccggcaacgtttacggcaatggcaacaacggagtgggcggacagaataccgctcccggctccgtgatcgactcgcgggccgtgtccgtggtggtcacgctgcccggcggcccgggtgcccagcatcctggccaggcgctcagcgactatggtcccatatagttaatggtacgcccggacaccgcgcactgggtctcgaccagcagttttagccagctgtagccgctcaaattggtcgactcgcacgcccggcctctgtctcactcgcacttctaggctctcactcgcacactccatccccatctcgctcgctcccgctttttggttagggcactcttagcaaaggttttccagaaatgccatataaattcgagtagccgtagtttgattgttgagtgaaaagcgccgtttttccaatacccatcgatttggcggaatcggaaatcactctattacgttttctgaatttaacatttatttttcttgcaacttttcgaatctttgaaattatttggaccacaacttttacaaagaaattaaatccaatccaaattatttgtaacactaaaagaagtgattttctgtactatacctataatttttagcgttaataggttcataatttatttcaattccgccaaattgcttctgagttgaaaatggtaataagagcaacaataagcattgagatgtgttagacaaccaatctgcatacaagattctagtccaaaaaaacctttgtcttcaaaagcagatgagcaaagagcttggtcgtagcgaaagggtactagccacagtaaaaattcaagatcgaatccagttgaagcgcgtttgttctacctgccattaactgatttcctatctgaatattcatattgccaccttttctgttgttaatcccttccacaaacactttcctcaacgaaatagactgagaaacgcaaaaccaattaataaaccgccacgtagagcactcggggtaaagtagcgagcggaatctgcccacactgccaagtcagagccacgagccatatttcgaaattacaactaacttttaatcaaactaactacactattaaccttaacctaacgtaaacacttaacattacgaacgcatacaaaaattaaataaaaaagaaaaagaaaatgaaacacttcgaat

SEQ ID NO: 33704 - DNA, 309 bp, DROSOPHILA
atgggcggcggtgggggcggcggtagcacccttggcggcggcaccctgggccacggcaccgcgatgagcagcagcacggtcggcatgggccctctccccggcaccctgatgcatggcgcctccggcggaggcgtgggcggcggcaatcccggcaacgtttacggcaatggcaacaacggagtgggcggacagaataccgctcccggctccgtgatcgactcgcgggccgtgtccgtggtggtcacgctgcccggcggcccgggtgcccagcatcctggccaggcgctcagcgactatggtcccatatag

SEQ ID NO: 33705 - protein, 102 aa, DROSOPHILA
MGGGGGGGSTLGGGTLGHGTAMSSSTVGMGPLPGTLMHGASGGGVGGGNPGNVYGNGNNGVGGQNTAPGSVIDSRAVSVVVTLPGGPGAQHPGQALSDYGPI

SEQ ID NO: 33706 - DNA, 2354 bp, DROSOPHILA
caacataatagctaagcagagtgagcaactaactactacaggttattaatgaacttcctgctaagatactttatatactttccagtacaagcactggagagttcaaatggggatcagttcagcgaatttctcagcgacgaggaagtgggcagcgaggaggccgacgacgaagacctcgaccaggacttcagtagacgcaataaaaagatgaagaccttccacgcatagccgctgatccaatccaaagtgctgcttacaggcgtgttccggcttccgttttcaccgacattctgaattcttacgtggatttagttcaactttgagttgtgttatacgaaagcaatagccctcgaaaagttgtgaaggaaacggttccaaattcgaattaaagtgaaaattaaaattatgtggaaatgagaacagtaacaagtccgataatcataatcatcattagctgtaagcccaaaatgtaacccacccaatcgaccttaatttgtatgcgtgcgtcttttctactttcaacaaattgtcactctgtgcgcaaagaataaagtaaactagtaagtacatatttttagaaaaaaacaggggcttcttgttgatgaattctattatggaaattggaaaatataacggaccaattgagtaacatgagtgctgcttttgaagaagtttataaatgataaaaggattgacattttatgcgattagggctaaataaaatcagcaatttttgcaagtaatttgatcacttgatactggaaccttcccttatttatatctggaatctccttttgcttattactcgagaactataaagaacgagctgaaaaaactttaacgtacgtatctgtctttctaatattggtttgaacttaagaaatatatttaactttatggttttaagccaaaagtgaaccgcattccgaaccaaatacaaccttcgactacactaaaccatacaaatatgtgggtatatattttataaaattaccaacaactacttaaactttagggttatccagaggattaagaacacgacgaggatgaagaggaacatgtagcacatttggcgagcaccaccgccctgtttggccagtcgcaccacccgcgtcatcgcgttgcccagaaatccactcgtccggtccatgtcgtcgtcgatgccgcgcagcagcttgtcctggtagcgcacctcattgcctatatcgatggtgagggacttcagggccccgatcttctgcttcaactcctccgccgcctgctcgttttccgcctccaaggcgtcgtggctcgcaggatggggccctgaagggtgctggtttaggggctggtacgggtagttgttgcggcgcatactgctccccgagtgtgccagtttggcatccggattgctgcggatcgggtgaatttaacgaaattaattaattataaattaatacaatgctcacaaatctcagttttcgaagtgacacgtaaacgtaaacatgtaatctcacccagcggcagaacagctgttgggatatacgcttcttggctcaacctttgtggttgactgtgcattgacccttgacctcgtgttgtgatttccagaatcggttgactaatgcctctacttattaaacgaaactttttaaattctcatgcaattcaatttttagtcgccgagcagtgtgaccaaagcggagtagcaaaattattccgtagcaatgcgtgtggcagagattacgattttcaattaacccattgcttgccaatacgcttttaatatcgtaagttctttctataagtttccaaaacttactatatatatatatatatattgttttaagatttcataaaaatttgattagggaaatcgggacagacaacgagacagtcggcggtcggcaaaaattcacctccaaataactaaaaaataaataaataaaaatcgtccccatgttcaaaattccacagtttcaccatcgccgctaaaaaaaaatttgtattatatttaggtgttcattaaaatatggtacgtacagttattattacacatattatgtgtaagaattattagtttattatatataatgcaaaaacaatattagtttaatattaattaaatagtaattaggcaattcaaacattatttgtaattatttcaaataaaataaataaaatatattcataaaaatatgggacatatgtaaaatatgtcaaagaattatttaataacaatgcataaaatactgttattagcagttcgttttaatatgcaaacaaatttaatcaaatataaataaagcatgtttttagtagatagtaaaaacatatatggttatatgtggatcctaagtactacttttaaatgt

SEQ ID NO: 33707 - DNA, 354 bp, DROSOPHILA
atgcgccgcaacaactacccgtaccagcccctaaaccagcacccttcagggccccatcctgcgagccacgacgccttggaggcggaaaacgagcaggcggcggaggagttgaagcagaagatcggggccctgaagtccctcaccatcgatataggcaatgaggtgcgctaccaggacaagctgctgcgcggcatcgacgacgacatggaccggacgagtggatttctgggcaacgcgatgacgcgggtggtgcgactggccaaacagggcggtggtgctcgccaaatgtgctacatgttcctcttcatcctcgtcgtgttcttaatcctctggataaccctaaagtttaagtag

SEQ ID NO: 33708 - protein, 117 aa, DROSOPHILA
MRRNNYPYQPLNQHPSGPHPASHDALEAENEQAAEELKQKIGALKSLTIDIGNEVRYQDKLLRGIDDDMDRTSGFLGNAMTRVVRLAKQGGGARQMCYMFLFILVVFLILWITLKFK

SEQ ID NO: 33709 - DNA, 4659 bp, DROSOPHILA
gataaatattctaccaggtgtaaagataatctttaactattacaaatattgaagttttaagcctaaaacaggattctcggcccactgctcaaagccagcttgattttatttgtcacgttgtcctgtgtgtgaagccagtgcctcatgttgttgccactgctcaagcggctctgtgtgtgcgtgccctcgtcctgcaggtcctgtggatccccgcacccgtctttggccacgtttcagtaattttcataactggctgaatggtgagcggagcggcgggaggtgtaaagaagctcaaaagacaaccaggagcaaagctgagcaattgccaagaggcggacgagtacgcagaatgtggacaaaaacattttcggttgctacaccgccctcatcctcataaattaaatgggggccaaattcaggagaggggaagcacgagtaaatatttttttagctcctccgcttattgtcctgtgcatttgctaaggtgtctgtcgtcaggcttgtttgcattatgcggcgttaatgacatccaaagtggcagccgtcgccccaaggaaagtctccactgtcgccgccatctacgacataattcacagatgccccacactctgaaaagttaatttccttaaggaacagctcgaggattctagcgaaatacttctgaaggtcgtccttgataccgcctcctgcagttggagtcgtttgtccaggtcttctatgcttgcaattggtcttacactgtacacaatgaaaaaagttgtaatttgcaaaaacaaaattttacatttattgtaatgtttgtttgttagttaatgtcttttagatatggttagagttaattactttgtagccatttaaaaaaggctttttataatttattgatccaatttggtgtcctcctcactttgatagctgttctaatttttctcatttgcatagcgtctgcatcactattcatttttttaagtgcattccgtcttaatgacgctttccgcgccgctcacttgggaaactccttgcgccgcttcattatcttggtaatcccggccaccatggccacctcgggcagtgacagcttggcatcctcctggaaatcgcagcgtctgtttaagtgcagacaggtccgttccggattcaaggacagcggcatctgcaaccaactgacgtagtcgattttcaaagagcctgtgagcagctggtcaaagggggtgttcccaatgaagaacatggacctcagcaccgaggtcttggcctccttgatgttctgaccctgtatgccttggaaaggactggggtcattgtcgccagttcccagttgctcgagcagccagtccttgttgaacttcaaatagttgtataccactttcagggcctgttttccgatatttgtggtcaaaacatcgctgaccaggacttcggctatgtaatcagcgattcccacatccagttccatggcatagttgttgggtggactgtggctcaggcgatcggactccgcattggtcagggccaagtcgtccattttgatggtactcacggcactcattcccccagcccctcggttattggaccctgcagttccaccaaagtccgtgtccaagttgatactctctttggcctgtttaagaaacagctcgatctgatccgtatgcttgtcatcctcgtcaatggagcagatggcctccgatatggagtaacagatggcagccttgtccagatctttagctaatcataataggatgtaaataaaaaaaatcaaggaaggtgtatgaaaagtttacataccctgctcatacatctctgctgttttgatcaattctgtatagagtgcagcaaaaaccacctgcaacagcactgaatctcccaacggcctggtggatactggaatgatgtcctgcagcaaggaggcaattttgtacagcccctcgggcaggcaatcccagatctcagagacacacgttagggccaaggacatggcctggtacatactggctccgttctccacggcattcaccaacatatccaccacacaatcgagaacagggtacatgaagtgcatgatggcctctaaccagggtgttcgcttctggttccacacctgtcgcttgtccaggcaatcactccatcctgcaatcgcgtgttcctccagtgttttgataaggcaggacttgatatctactgccttgcccacagccaccaccaaataggtgagagataggacgatctggtagttggactgaccaactggatctgtatgaaagtaataagtaacatttaagttacaaattctagacaataaaattctagatcttaccaatatctccagctatagaatctgtgacattaaagcactctccacgacacaaaaatgcctcgcacttttgaggggcaccctcagcgcttgtaaacgaaatctttgccacgtttttgaagttttccgatgagggtaagtactgcatcaggtggcgcattataatgccagtgagataggcatccctcatcagtagaatcttcaaaaggtaggaccaatctgcctcgggaaaggcgagtaatacccgcaggtccaacgaaatagctgtgttggtagagagatcggagaattcggtgacccactgacaggactgctccttgggaaagtatctgggaagggcgaagatgatccaggcactgggcaatccgtgacgggaactaaacatttccatgttgtccaatcccttacgaaacacctggataacaatatataccaaaggatcttgatctaatatatgatttcacaagtttttacagattttaaagatgcatagaagtcttacttcataccttggagagcactcccaatggcgatcctcttaggagaaggcagtagaagagctccttgcacttggcgtggatatcccttatgataacgctctggttactgagctgcagcccaacataggcctccccactctcacagatgtgaggcaacagttcggcgatgcagagcaacatgttgcatatgtccaccagatggagagtcgatcttgccacactggttactatctgagtgtatcgaacagtgagcacgcttagcgtttcgttcagcatgccagcgaatatcttttgggccattttcggtggcactgaattccacagatcggtttgcgaacccctcatgtaatgccaccacatctggacggtgtaggagcccctttcggactcgaaaaacggttgggtatcctcccagtgcagacagtcggcatcctgcattatgtaaagtaaaaggagccggcaatggagatccagaagtcgttccgccagagcctcggacatctgggaatactgcttgaaactgagcttgagcgctccacccttttcatcgcccttgggtggacatatggtagtggtagctgcctgcatatagacgctcaacgagttcttgaccagcgatgctgccccaatggtggcagtgaggacagataggtccgcgtgatccaaggactcctgggagaggcgatgtatgtgctccaacagtaagtcagcagacttcgtgaccagctgcacgaacttatccggatcggaggtcttcacggtgacacttgactgaggaacacagcgtcttaaataaaattcccttattaattcaaataaattaaacttacaaaatctccttcattcatctccttttctgtgtgcaaaagtccagatggcttgcggtacgaggcaaagtactcatcttcccacctaagtaggttgaaaaatatctcctatgaattgattatcaacaatttaaaacaaaagtcaagtgccccgacttttggatacccttattatgctagtggaaatgaaaacgggaaaaaattgtaacttttgttttagacaatcgataaaaaggcctcgtagtctagagtgggcgtggcagttttgtgcggtgtgtggtagaacgtgttgaaatttagctaagtaagaggtatctgatagtggaagaagtcgattatggttttcttgtgataaaaatagtatatgcgaaaataaattttgatctgcaatacatgtgtacaatttcaaattcttctggaaaatcagcattgattgtaataggttatcagagacttttttcttgaagtttatgctggattgacattctgcaatggctgataagtatttatttctatatttattattatatttttatataatgtatatgtagaactggaaacggctgataatgttttaaaaagagtagccgagaagcatttataaaggacaccgagctaagtcaaacttagtatgaaaactttaattcaagagcaatgcacagcgaactagaaattgttgcggtgctcacaagtctactgattttcttatcgggaacaggatcggcgcaattcttggggaacatctgtggagaaagaagggatggcctgtcgccagatatagttggtccctggacggccatcctgcaccatttcggacgcatcgttggcgtgggaaccctgatccacgagcgatttatcctgacagatgtacattgtggtgactccattggagttattagagcacggttgggagagtacggaagaattggttctgagctggcagaagaccacatagtcgctgcattcttcagtaacgccaactttaatccggaaacgcaggcgaataacatgggcctaatga

SEQ ID NO: 33710 - DNA, 2382 bp, DROSOPHILA
atgaatgaaggagatttttcaagtgtcaccgtgaagacctccgatccggataagttcgtgcagctggtcacgaagtctgctgacttactgttggagcacatacatcgcctctcccaggagtccttggatcacgcggacctatctgtcctcactgccaccattggggcagcatcgctggtcaagaactcgttgagcgtctatatgcaggcagctaccactaccatatgtccacccaagggcgatgaaaagggtggagcgctcaagctcagtttcaagcagtattcccagatgtccgaggctctggcggaacgacttctggatctccattgccggctccttttactttacataatgcaggatgccgactgtctgcactgggaggatacccaaccgtttttcgagtccgaaaggggctcctacaccgtccagatgtggtggcattacatgaggggttcgcaaaccgatctgtggaattcagtgccaccgaaaatggcccaaaagatattcgctggcatgctgaacgaaacgctaagcgtgctcactgttcgatacactcagatagtaaccagtgtggcaagatcgactctccatctggtggacatatgcaacatgttgctctgcatcgccgaactgttgcctcacatctgtgagagtggggaggcctatgttgggctgcagctcagtaaccagagcgttatcataagggatatccacgccaagtgcaaggagctcttctactgccttctcctaagaggatcgccattgggagtgctctccaaggtgtttcgtaagggattggacaacatggaaatgtttagttcccgtcacggattgcccagtgcctggatcatcttcgcccttcccagatactttcccaaggagcagtcctgtcagtgggtcaccgaattctccgatctctctaccaacacagctatttcgttggacctgcgggtattactcgcctttcccgaggcagattggtcctaccttttgaagattctactgatgagggatgcctatctcactggcattataatgcgccacctgatgcagtacttaccctcatcggaaaacttcaaaaacgtggcaaagatttcgtttacaagcgctgagggtgcccctcaaaagtgcgaggcatttttgtgtcgtggagagtgctttaatgtcacagattctatagctggagatattgatccagttggtcagtccaactaccagatcgtcctatctctcacctatttggtggtggctgtgggcaaggcagtagatatcaagtcctgccttatcaaaacactggaggaacacgcgattgcaggatggagtgattgcctggacaagcgacaggtgtggaaccagaagcgaacaccctggttagaggccatcatgcacttcatgtaccctgttctcgattgtgtggtggatatgttggtgaatgccgtggagaacggagccagtatgtaccaggccatgtccttggccctaacgtgtgtctctgagatctgggattgcctgcccgaggggctgtacaaaattgcctccttgctgcaggacatcattccagtatccaccaggccgttgggagattcagtgctgttgcaggtggtttttgctgcactctatacagaattgatcaaaacagcagagatgtatgagcaggctaaagatctggacaaggctgccatctgttactccatatcggaggccatctgctccattgacgaggatgacaagcatacggatcagatcgagctgtttcttaaacaggccaaagagagtatcaacttggacacggactttggtggaactgcagggtccaataaccgaggggctgggggaatgagtgccgtgagtaccatcaaaatggacgacttggccctgaccaatgcggagtccgatcgcctgagccacagtccacccaacaactatgccatggaactggatgtgggaatcgctgattacatagccgaagtcctggtcagcgatgttttgaccacaaatatcggaaaacaggccctgaaagtggtatacaactatttgaagttcaacaaggactggctgctcgagcaactgggaactggcgacaatgaccccagtcctttccaaggcatacagggtcagaacatcaaggaggccaagacctcggtgctgaggtccatgttcttcattgggaacaccccctttgaccagctgctcacaggctctttgaaaatcgactacgtcagttggttgcagatgccgctgtccttgaatccggaacggacctgtctgcacttaaacagacgctgcgatttccaggaggatgccaagctgtcactgcccgaggtggccatggtggccgggattaccaagataatgaagcggcgcaaggagtttcccaagtga

SEQ ID NO: 33711 - protein, 793 aa, DROSOPHILA
MNEGDFSSVTVKTSDPDKFVQLVTKSADLLLEHIHRLSQESLDHADLSVLTATIGAASLVKNSLSVYMQAATTTICPPKGDEKGGALKLSFKQYSQMSEALAERLLDLHCRLLLLYIMQDADCLHWEDTQPFFESERGSYTVQMWWHYMRGSQTDLWNSVPPKMAQKIFAGMLNETLSVLTVRYTQIVTSVARSTLHLVDICNMLLCIAELLPHICESGEAYVGLQLSNQSVIIRDIHAKCKELFYCLLLRGSPLGVLSKVFRKGLDNMEMFSSRHGLPSAWIIFALPRYFPKEQSCQWVTEFSDLSTNTAISLDLRVLLAFPEADWSYLLKILLMRDAYLTGIIMRHLMQYLPSSENFKNVAKISFTSAEGAPQKCEAFLCRGECFNVTDSIAGDIDPVGQSNYQIVLSLTYLVVAVGKAVDIKSCLIKTLEEHAIAGWSDCLDKRQVWNQKRTPWLEAIMHFMYPVLDCVVDMLVNAVENGASMYQAMSLALTCVSEIWDCLPEGLYKIASLLQDIIPVSTRPLGDSVLLQVVFAALYTELIKTAEMYEQAKDLDKAAICYSISEAICSIDEDDKHTDQIELFLKQAKESINLDTDFGGTAGSNNRGAGGMSAVSTIKMDDLALTNAESDRLSHSPPNNYAMELDVGIADYIAEVLVSDVLTTNIGKQALKVVYNYLKFNKDWLLEQLGTGDNDPSPFQGIQGQNIKEAKTSVLRSMFFIGNTPFDQLLTGSLKIDYVSWLQMPLSLNPERTCLHLNRRCDFQEDAKLSLPEVAMVAGITKIMKRRKEFPK

SEQ ID NO: 33712 - DNA, 2766 bp, DROSOPHILA
atctgattttcgttagttcacagcatgtcgtcgaatctggaagttctctctgcgaactggactattctgctggtggcactactgtctgttcttgggggagttttcgccaaggatgatgcctcagtgccccggctgatcaccctccaaactggaagtcccgctccagccccgccacaggaagtgatcatagaggaggatcacgatcatcaacattatcatccgccacactatccgccaagctattcgtatccgtatcctcagccacagccatgcggttgtccgcccggtcctccaggtccacctggtccaccgggacagccggggcagaagggctatcccggccccaaaggatccaagggtgatcccggcgagaaggggccgcgtggagataagggccaccccgggatgcctggaatccctggccaacctggtcctcagggtcctcctggatatcccggaggttcatatccaccgtatccgtatcctccacctcctcctcctccatcacatggacatggaggccctaaaggccaccagaggcactactataactactatgatgaggacgagtatgattacggcaatgagcgttcttttggtctgagaaaaaccgaagaattcgacgaccagcccttcattttggcctttagtgaacgcagaaatccgtttagcacaaaaaacaataaaagacgaaattaaaataacattatttaaaacgaaatagctttgataattatttctgtaggtaaaaagcagatacccaatacttaaaaggaactttcaaaattcttttgaagaatgtcctttttgacttttgagtggcttcgtttataaatgacaccaaaaatcatacaaagtgtgggtttatcgattacctataaaaatataccacgcactcagcgtttaaatcgaaacctctttacaaactgtatattattagacatttgttaagtcgtttaaaatctcacattacattaggcagaaaagctggcttaaactattagcaaacatcgtcgtctagggcggtgtggtcgtcgccctcctcctccgcttcctcatccaatcccgcttgcgtggcaccaatctccgcgaaatcatcctccatggtatccacaaagctcgacaccctatcatcgcagaacaaacagacattagaaacaaataacaaagacattcgttggctggcatcacttttcaaagtcgcactgcggcaggagaccctcctccttcgaggcgctgaatcggagcagcgtgcacagtctgaggagtccgaggagtatcaggaacatcccggccacataactcagccacagattgtggggatacaggatcaggcagatgccgatgaccgcataaacaggagtgggtcgccaaccgccacaaatcgctgaaagtcgccagcaggccaagcagctgcaggaccttcgctggtaattatccctgaaacaaattgaattcacaaatatgtgaacagagaaaaatttgcagagaaaaatctgagcaaaggcacttgatatagagtattgtatataatagtaaagtatatcatattatagtataattagggtttaattagttttacaactactaggcttggtaactagaatttctatatttcataaataataactgctaattatcaaataatatatatacgaataactataatttatgaacatgttatttggtaatcttgaatagttttcttactctgcgcactgaagttgcaggaagatagtcacaagccacttgatctcgataaacattaccagcacggctgaaaaactaaccagaaattagtatagttatgggggatatttagatccgtgacttacactatataaagaccggcccgatagccatgcatgtagacatcaacgccaacgccgcagataactgaaatgaaaaatggctaaagaaaggttcggtgcggggggtcctttttggcgggttgaaacgaggagtgttatccttgaacgagcctataaaataatgtgagtgtgtctaggcaaatatatttataagcatatttattgagctgggccttttttgtttaccatgctttggccataaaatgtaatacaaaaccaatgaatggaaacgaggtgagctcaagaagtttatcgcaattttactgaagcttacatcatttgcaatagagtattttaagaaggcaatgtcctacacattacgaaataacataatgataattaataataaatagcttggaagaaacttcaatattcatgacgaacttaaattttataacttaaaaggtttctatatttttgtcgaacagccctccgcagggcattcatattctaaccacattatggttccgcttcacattttgtcttagccaaatccactttgagtgtataagatatggttagatgtggttatggagccaccacgcccagtggtccataaaaatacaatctaattaagttgtttttattatgccgggtcgcgaaaaaccaatcagattagccagttagatatatgtatatgtatgccccatatttaagcacaactgcagaaccgaaaccaaaccaattacattaaatgctgtcaacggagataaaaattgaaaaagcggaaatcgaaaaaacatgcaaaaattatctggataattgaaagcggtgggggaaaaatagatgccgggcaagaggaaaacttggcgaatggctggcgcctaaaggctaacaacacagctcattgtcgaccgtatggaaaagttgctgataaggggaaaatcgggctggg

SEQ ID NO: 33713 - DNA, 432 bp, DROSOPHILA
atgtttatcgagatcaagtggcttgtgactatcttcctgcaacttcagtgcgcagaggataattaccagcgaaggtcctgcagctgcttggcctgctggcgactttcagcgatttgtggcggttggcgacccactcctgtttatgcggtcatcggcatctgcctgatcctgtatccccacaatctgtggctgagttatgtggccgggatgttcctgatactcctcggactcctcagactgtgcacgctgctccgattcagcgcctcgaaggaggagggtctcctgccgcagtgcgactttgaaaaggtgtcgagctttgtggataccatggaggatgatttcgcggagattggtgccacgcaagcgggattggatgaggaagcggaggaggagggcgacgaccacaccgccctagacgacgatgtttgctaa

SEQ ID NO: 33714 - protein, 143 aa, DROSOPHILA
MFIEIKWLVTIFLQLQCAEDNYQRRSCSCLACWRLSAICGGWRPTPVYAVIGICLILYPHNLWLSYVAGMFLILLGLLRLCTLLRFSASKEEGLLPQCDFEKVSSFVDTMEDDFAEIGATQAGLDEEAEEEGDDHTALDDDVC

SEQ ID NO: 33715 - DNA, 4432 bp, DROSOPHILA
tcccttcacccgagtcgacttgtgtgtgcgcgctcgacgttcaagtgaaactttagacataaaagccagacccctcggaatcctttttttctgtgtccaccctttcgggccgcattgttgttgctggctaaagccgtgcagacatttggacccaactacttgaagttttatgccccgtttccttacttatttttcccttttttcctgccacatgggaggactttatggcgcatacgtgtgggttcctttgggcgcatattgaaaagccagcattgtttgtgactttgaaacaaactgagggcgaaagcacattttcttcttagccctcaacctaatggcaggtgccaggaaaataagaggctggaaaaagcgagcgtgaataaaactgttatcggtctgcgtgctcaaaagcgcacttgattgctcaaatcctttgtgtatccccttttaagccttttgttttccattatgcgccggaagtgttgtaaacacttcagcgcaggacaccagccgaagccgatgccaaagcgaaagccacagcaacaataacagtagaccagtggcaactgaaagggggaaggaaagtccagttccaagacgatgtctcaagcggtacttctttcgaagaaaaaaccaaattaactttctgctgagacaaatgttcgagccaaggaaaagaaacgaaatttggatgacaacaaatttaaaactgttttgagggactgaaaatatttagagagaaacaagttatacggattacatcgcatacccttgcgaagggtatgctgatttcagtcagagtttgcaacgcagacaagaagacgaccatctgaaatatatatattattaacgagtattaacatccgatttccacttgctgagtaacgggtatttgttagtcgaagaactgcaatttttgcccaaactttcttagctttattaacattacagttttattttatgttttcaacgtgccggatacattattatcagttcagttttagtctactatttcctttttgatgacatctatggtggcccttcggtgattggccgtaatggggtacactttctttagcatattatccgcctcaccagtggtcatggcaaacacctgaatcattcccgtctcatgaacacgggctaccaccccgggaattgtcttgtccacgtagtagacatacttcatatggggttctggacaaatagcgcatgactcgatgaactccggcaaagagatgccccatggaaagtgggcacaggaaatgagacgaaggtgtagaagcttgtttgagggatcggctttaaagttcggctttccagcaatcctaagcaatagatcccgttgggtttctgccagcatcgcatggcctcttccattgattatcaagacactgccatcggaccaaatccaggcaatttgtgaggcctcataccgcgcttggatcacatctatgtctctattgtagacggcgttgcttaggttattaaccgcaattccaagacacaaatttctgttcatatttagtgtgcaatacgttttgcaaaaattcatctcgacgcgcaggcgcagttgctccaccttgcgcctgttgggacgccttaggattctgatcctctggaggcactggtccagatgaactggcagaggcggaagcagcacacatcttctcaaattctccgccgactttaatccaaaccgcttgttccacttggagcggattctcttagcttggggatccctaaactctgtcatattttggtcgacgatgtcctcaaagtcctcgaggcgaactgtgaagctgttctgccatccagattccggtgagacttttttattgctttctcccaggactcggggtttcagttgttgcttgctaatctcggattcgaaatcaataccctcgggttctgcagaatctgttttgctggaactgtcctcattgatgagaagttgcagttgttgggaaatggtttcactgcattgctgtagccaaccctgtatatctgcctcgtcctctggcttggggggtaatggtttaatgtctttgacctcaaggataacaggcttttctggtttattctcaataaatggagtttctttttctggttccttttccagaatattatcgatgggaatcttctcgtcgagtacagatttccacggctcaggctcaacaaaatctggtttctgtgccaattccaataattttggtggaaactttttccaaacattcttatcctggggtataagatccttgggtttcagtaaatcaaacagaagatcccgattcttttctggatctctggctagtctaaatagcatatcgtactcatctatatcactgtggggttcgcttagcccttccttttttatccattccttgatggcccgctgctcttcgatttcaatggtaaagttagcaaaggagacttcttcattgtctagaatccgaggcttttggggttcatttccttttctttgcttttcttttaaatcggattcttccatatcattatgaggattgtggagcacctcagactctaaccactgattcaagaccctcagctcattctctccaatctgtctatcccagccagtttcgaaaatatttttattcgttttcgtcggaaacttattggaattttgagagtccgttgaaattggaggcggagttttggatacctccgaattcgtcatgcaacacaatggccatacggcatccgagagctttataattcccatcttcacattcaagtaactgccccatatatcctccggcgatggcgtatctatgtcaatatcatccacaaagctcctggaaatgggtgacatcggtcgaaaacggcgatcaaacaaccaaagtgaatccattggaagatttagttctatatagacgggggctcttgaaacatcttggagtttagttggaaatgttattgcctctttagggaatcgtcgggtcttggcaatcctcgatgtctttggaggtttcattggactgtcttcgtagacgactttcatgggatccgcatgttcgtcggggccaaagtccataacaaccttaccagcacggaacttggtgggcagcggctttgggtcacgtctacttaaatcgaaataaattttaattaatcgtttccaaaattaaatgcatatggcttaccggcataatagttgctttactattggaaaagcgctgaatacgtagttatatttatgtatatatattaattatgatcgtatttttaaatttctcacctggaggaggtatggttattatattcctggaattcatcctgcttgtcgatggtgtctgtgctcttcctcttacggttgttccccttgtcatcgcggatcgtacgagtattaagaaactcaagatcttcgcactcatctgaatctgaatcaaacatcgaaggtcgtggcattttgtgagaaatgaatttgaatttattttcaaatgtcatttttctccacgtactctacaactctataagtgttgccgccttaagttattataatatatcctatcggaaataatttaattacatattggcttaaacaatcgaatacttattaaaaacaaaatgggcacatagattgttattttttggtatattagcattacatttgacttcctttttcaaaaacgttgtctctaaatcctaaaatttgatttcgttcttaaaaaattaaattaaaacaagaggagggataggaaatagagagaatgtatttaacagtaagaaacatgcgcttgcagacttgacgacgttttttttttataaaaaataacgcaagaagacggtacacggaaataaagcataataatgtgccacgacaattcagcgtctgtgaaaaggggggcttgggggaaaagcgacgcgtgccaaacgggaaaacactcataacgcttcgctccccattttcccggtcctcttcttcttttgagtcggaccctcgtggctttctcctgtcaatatgcttcccgctcgacttgtgctataattgtgtcttccccctgcggaacgcctgccatctacacccatacccataagagtgtgtgtgggtgtgtgtgagtgtgtgtgcggtgttaaggggtggagataatgccaaccaggacactttcagttacttagccctagaaactggggagcgtccgttgctcggggaccgaaggactgaaggactgaaggtctgaatctgaggcaaacgtttttcgccctgctttgtcctgttgtttcaccaacttacaagtggccgagaaaggatatctcagctgaagccaaaataattagctgggggctaagcaggagttgcaaaaaatgagaaggccacgaggggcagctcgaagagataaaaggaggataaaacagagacaaaaatggtaaaacgaatacaggtgagggaatacctaaggtttccctc

SEQ ID NO: 33716 - DNA, 2280 bp, DROSOPHILA
atgccacgaccttcgatgtttgattcagattcagatgagtgcgaagatcttgagtttcttaatactcgtacgatccgcgatgacaaggggaacaaccgtaagaggaagagcacagacaccatcgacaagcaggatgaattccaggaatataataaccatacctcctccagtagacgtgacccaaagccgctgcccaccaagttccgtgctggtaaggttgttatggactttggccccgacgaacatgcggatcccatgaaagtcgtctacgaagacagtccaatgaaacctccaaagacatcgaggattgccaagacccgacgattccctaaagaggcaataacatttccaactaaactccaagatgtttcaagagcccccgtctatatagaactaaatcttccaatggattcactttggttgtttgatcgccgttttcgaccgatgtcacccatttccaggagctttgtggatgatattgacatagatacgccatcgccggaggatatatggggcagttacttgaatgtgaagatgggaattataaagctctcggatgccgtatggccattgtgttgcatgacgaattcggaggtatccaaaactccgcctccaatttcaacggactctcaaaattccaataagtttccgacgaaaacgaataaaaatattttcgaaactggctgggatagacagattggagagaatgagctgagggtcttgaatcagtggttagagtctgaggtgctccacaatcctcataatgatatggaagaatccgatttaaaagaaaagcaaagaaaaggaaatgaaccccaaaagcctcggattctagacaatgaagaagtctcctttgctaactttaccattgaaatcgaagagcagcgggccatcaaggaatggataaaaaaggaagggctaagcgaaccccacagtgatatagatgagtacgatatgctatttagactagccagagatccagaaaagaatcgggatcttctgtttgatttactgaaacccaaggatcttataccccaggataagaatgtttggaaaaagtttccaccaaaattattggaattggcacagaaaccagattttgttgagcctgagccgtggaaatctgtactcgacgagaagattcccatcgataatattctggaaaaggaaccagaaaaagaaactccatttattgagaataaaccagaaaagcctgttatccttgaggtcaaagacattaaaccattaccccccaagccagaggacgaggcagatatacagggttggctacagcaatgcagtgaaaccatttcccaacaactgcaacttctcatcaatgaggacagttccagcaaaacagattctgcagaacccgagggtattgatttcgaatccgagattagcaagcaacaactgaaaccccgagtcctgggagaaagcaataaaaaagtctcaccggaatctggatggcagaacagcttcacagttcgcctcgaggactttgaggacatcgtcgaccaaaatatgacagagtttagggatccccaagctaagagaatccgctccaagtggaacaagcggtttggattaaagtcggcggagaatttgagaagatgtgtgctgcttccgcctctgccagttcatctggaccagtgcctccagaggatcagaatcctaaggcgtcccaacaggcgcaaggtggagcaactgcgcctgcgcgtcgagatgaatttttgcaaaacgtattgcacactaaatatgaacagaaatttgtgtcttggaattgcggttaataacctaagcaacgccgtctacaatagagacatagatgtgatccaagcgcggtatgaggcctcacaaattgcctggatttggtccgatggcagtgtcttgataatcaatggaagaggccatgcgatgctggcagaaacccaacgggatctattgcttaggattgctggaaagccgaactttaaagccgatccctcaaacaagcttctacaccttcgtctcatttcctgtgcccactttccatggggcatctctttgccggagttcatcgagtcatgcgctatttgtccagaaccccatatgaagtatgtctactacgtggacaagacaattcccggggtggtagcccgtgttcatgagacgggaatgattcaggtgtttgccatgaccactggtgaggcggataatatgctaaagaaagtgtaccccattacggccaatcaccgaagggccaccatagatgtcatcaaaaaggaaatagtagactaa

SEQ ID NO: 33717 - protein, 759 aa, DROSOPHILA
MPRPSMFDSDSDECEDLEFLNTRTIRDDKGNNRKRKSTDTIDKQDEFQEYNNHTSSSRRDPKPLPTKFRAGKVVMDFGPDEHADPMKVVYEDSPMKPPKTSRIAKTRRFPKEAITFPTKLQDVSRAPVYIELNLPMDSLWLFDRRFRPMSPISRSFVDDIDIDTPSPEDIWGSYLNVKMGIIKLSDAVWPLCCMTNSEVSKTPPPISTDSQNSNKFPTKTNKNIFETGWDRQIGENELRVLNQWLESEVLHNPHNDMEESDLKEKQRKGNEPQKPRILDNEEVSFANFTIEIEEQRAIKEWIKKEGLSEPHSDIDEYDMLFRLARDPEKNRDLLFDLLKPKDLIPQDKNVWKKFPPKLLELAQKPDFVEPEPWKSVLDEKIPIDNILEKEPEKETPFIENKPEKPVILEVKDIKPLPPKPEDEADIQGWLQQCSETISQQLQLLINEDSSSKTDSAEPEGIDFESEISKQQLKPRVLGESNKKVSPESGWQNSFTVRLEDFEDIVDQNMTEFRDPQAKRIRSKWNKRFGLKSAENLRRCVLLPPLPVHLDQCLQRIRILRRPNRRKVEQLRLRVEMNFCKTYCTLNMNRNLCLGIAVNNLSNAVYNRDIDVIQARYEASQIAWIWSDGSVLIINGRGHAMLAETQRDLLLRIAGKPNFKADPSNKLLHLRLISCAHFPWGISLPEFIESCAICPEPHMKYVYYVDKTIPGVVARVHETGMIQVFAMTTGEADNMLKKVYPITANHRRATIDVIKKEIVD

SEQ ID NO: 33718 - DNA, 2600 bp, DROSOPHILA
tccgccagagcctcggacatctgggaatactgcttgaaactgagcttgagcgctccacccttttcatcgcccttgggtggacatatggtagtggtagctgcctgcatatagacgctcaacgagttcttgaccagcgatgctgccccaatggtggcagtgaggacagataggtccgcgtgatccaaggactcctgggagaggcgatgtatgtgctccaacagtaagtcagcagacttcgtgaccagctgcacgaacttatccggatcggaggtcttcacggtgacacttgactgaggaacacagcgtcttaaataaaattcccttattaattcaaataaattaaacttacaaaatctccttcattcatctccttttctgtgtgcaaaagtccagatggcttgcggtacgaggcaaagtactcatcttcccacctaagtaggttgaaaaatatctcctatgaattgattatcaacaatttaaaacaaaagtcaagtgccccgacttttggatacccttattatgctagtggaaatgaaaacgggaaaaaattgtaacttttgttttagacaatcgataaaaaggcctcgtagtctagagtgggcgtggcagttttgtgcggtgtgtggtagaacgtgttgaaatttagctaagtaagaggtatctgatagtggaagaagtcgattatggttttcttgtgataaaaatagtatatgcgaaaataaattttgatctgcaatacatgtgtacaatttcaaattcttctggaaaatcagcattgattgtaataggttatcagagacttttttcttgaagtttatgctggattgacattctgcaatggctgataagtatttatttctatatttattattatatttttatataatgtatatgtagaactggaaacggctgataatgttttaaaaagagtagccgagaagcatttataaaggacaccgagctaagtcaaacttagtatgaaaactttaattcaagagcaatgcacagcgaactagaaattgttgcggtgctcacaagtctactgattttcttatcgggaacaggatcggcgcaattcttggggaacatctgtggagaaagaagggatggcctgtcgccagatatagttggtccctggacggccatcctgcaccatttcggacgcatcgttggcgtgggaaccctgatccacgagcgatttatcctgacagatgtacattgtggtgactccattggagttattagagcacggttgggagagtacggaagaattggttctgagctggcagaagaccacatagtcgctgcattcttcagtaacgccaactttaatccggaaacgcaggcgaataacatgggcctaatgaaactgctgcgaaccgtagtatacaaagagcatataattccggtctgcattcttatggactcacggatgcagacgttcgccgatgaactggactatttcaatggaactacatggaagaactcggacaaatcaccctatgctgaggtccaaaactgtgatccgaatgccgcaggcatgtggaaaactggaccatggccagttctgtgccggccacaaagatctggactcctgtgacgaaccatctggcgcagccttgacccgtgaaattgactacattgggccaaaccggacagttctgtttggaatcgcgaactccgtcgaggtgaagtgctccaactcgcgaacttacaccgatgtggtgcaattgcatcaatggatcagtatggtaatctattcctccaacaccaatgatggtatggacaaaccacacaatactactcatctgcccgaacctgtttttgaattaaagagcacaagcttttcaaccaattctaggataaaataaagcttacataaactgtttattttcattttactaaataaatatatagcatttttttaaaccattttcttagaaatcgaaatgtaagttttacctaccatcttattaatttaatggccgcaaaggaagcgtagcgtggaaaatccagctttccacccacaactccggagcaaattggttcctggagtacccgctgatgtgtctgttatgtggagatgggttacgtaatttccaacaaagtcagtattagggtattgcacctggtaaaactcgagatcacgctgcagtaaaatgggcactctgtccattaagtttccctcttcgagcacctccattatgtaggtcctgtttcaaacactttaacaattaactttcaacggcaaacaaactgctaaatatgtgccaactaacaaacattttatttagttcacttgttgccagggaaacagaagattaagccaatcgaaagcgtaaatcggatatgaacagcgatattttatcaggacattcgaaaaatgcgaagcttaactgataactaaaacaaatatgaataataaatacattatactgaaattagtgcaacagtatcaataggttcgcatttagtatactaattatttgcgatggatcctagggaaatgatcaaaaccaacacataaaatattcgactaaccatctgaaagtatgctactttttcatgaccacgctgcactcaacctctcaattctttta

SEQ ID NO: 33719 - DNA, 600 bp, DROSOPHILA
atgcacagcgaactagaaattgttgcggtgctcacaagtctactgattttcttatcgggaacaggatcggcgcaattcttggggaacatctgtggagaaagaagggatggcctgtcgccagatatagttggtccctggacggccatcctgcaccatttcggacgcatcgttggcgtgggaaccctgatccacgagcgatttatcctgacagatgtacattgtggtgactccattggagttattagagcacggttgggagagtacggaagaattggttctgagctggcagaagaccacatagtcgctgcattcttcagtaacgccaactttaatccggaaacgcaggcgaataacatgggcctaatgaaactgctgcgaaccgtagtatacaaagagcatataattccggtctgcattcttatggactcacggatgcagacgttcgccgatgaactggactatttcaatggaactacatggaagaactcggacaaatcaccctatgctgaggtccaaaactgtgatccgaatgccgcaggcatgtggaaaactggaccatggccagttctgtgccggccacaaagatctggactcctgtga

SEQ ID NO: 33720 - protein, 199 aa, DROSOPHILA
MHSELEIVAVLTSLLIFLSGTGSAQFLGNICGERRDGLSPDIVGPWTAILHHFGRIVGVGTLIHERFILTDVHCGDSIGVIRARLGEYGRIGSELAEDHIVAAFFSNANFNPETQANNMGLMKLLRTVVYKEHIIPVCILMDSRMQTFADELDYFNGTTWKNSDKSPYAEVQNCDPNAAGMWKTGPWPVLCRPQRSGLL

SEQ ID NO: 33721 - DNA, 2675 bp, DROSOPHILA
tataaacaagcgaatagctacttataacaattaattgcaaacgcagctacctcaacgttttccgaccgaaaacacgaataagagagaataatagttaaacaaagtaaatttataattaaagaaactatttaatatgtttattgcatagcaaacatgtgtaaaacaaaagcaaaacaacaaataaaacgaactttaaaagttacaactatttacatacatatgttaacaaaaacagaaacttctcgaacataactaatgtccacaaatccaaatgacttagactgaagcgtgagtatgcaaaaagtgttatgagatctgcccaaaaaccagaaatttgttgaggtttatgtgggcggggctcttgtcatcatgagttccactttacacttacaaaagaataataaagaagccacagttaaataaaattgcgaacagacattcttagcatgtctcgaaagtgttttcttttgtgcttcacagggacggacaggtggtatctcaggtgttagcaaattacacattagttattcaaaatggttaatgtttccgtttaaatgtaaaaatcatcatctcggtcaccaccagtcattgctctggttccatatgaaatttgtgtaaaagtttatgttatttttacgcgcagaaatgatatacatatacctgttaattgatctatcctagaatacgagaattcacttttcatggctcgatcacaaagtccgacatccatttggtgtgaaagttctttcatcagcccaaaaactcaactcattcattgaatattatgcaaatcagatactttataaataaatggcttggtttattaaacaagagaaattagcatacgatacaaatataatgcgatcgtaagacaagacatatagatctcaaatgagctatcttaacgggagtttgaatgattctcctctgttgccatttttcaaacgcatttatccacataaaagaagtgactgcgatctgattttcgttagttcacagcatgtcgtcgaatctggaagttctctctgcgaactggactattctgctggtggcactactgtctgttcttgggggagttttcgccaaggatgatgcctcagtgccccggctgatcaccctccaaactggaagtcccgctccagccccgccacaggaagtgatcatagaggaggatcacgatcatcaacattatcatccgccacactatccgccaagctattcgtatccgtatcctcagccacagccatgcggttgtccgcccggtcctccaggtccacctggtccaccgggacagccggggcagaagggctatcccggccccaaaggatccaagggtgatcccggcgagaaggggccgcgtggagataagggccaccccgggatgcctggaatccctggccaacctggtcctcagggtcctcctggatatcccggaggttcatatccaccgtatccgtatcctccacctcctcctcctccatcacatggacatggaggccctaaaggccaccagaggcactactataactactatgatgaggacgagtatgattacggcaatgagcgttcttttggtctgagaaaaaccgaagaattcgacgaccagcccttcattttggcctttagtgaacgcagaaatccgtttagcacaaaaaacaataaaagacgaaattaaaataacattatttaaaacgaaatagctttgataattatttctgtaggtaaaaagcagatacccaatacttaaaaggaactttcaaaattcttttgaagaatgtcctttttgacttttgagtggcttcgtttataaatgacaccaaaaatcatacaaagtgtgggtttatcgattacctataaaaatataccacgcactcagcgtttaaatcgaaacctctttacaaactgtatattattagacatttgttaagtcgtttaaaatctcacattacattaggcagaaaagctggcttaaactattagcaaacatcgtcgtctagggcggtgtggtcgtcgccctcctcctccgcttcctcatccaatcccgcttgcgtggcaccaatctccgcgaaatcatcctccatggtatccacaaagctcgacaccctatcatcgcagaacaaacagacattagaaacaaataacaaagacattcgttggctggcatcacttttcaaagtcgcactgcggcaggagaccctcctccttcgaggcgctgaatcggagcagcgtgcacagtctgaggagtccgaggagtatcaggaacatcccggccacataactcagccacagattgtggggatacaggatcaggcagatgccgatgaccgcataaacaggagtgggtcgccaaccgccacaaatcgctgaaagtcgccagcaggccaagcagctgcaggaccttcgctggtaattatccctgaaacaaattgaattcacaaatatgtgaacagagaaaaatttgcagagaaaaatctgagcaaaggcacttgatatagagtattgtatataatagtaaagtatatcatattatagtataattagggtttaattagttttacaactactaggcttggtaactagaatttctatatttcataaataataactgctaattatcaaataatatatatacgaataactataatttatgaacatgttatttggtaatcttgaat

SEQ ID NO: 33722 - DNA, 675 bp, DROSOPHILA
atgtcgtcgaatctggaagttctctctgcgaactggactattctgctggtggcactactgtctgttcttgggggagttttcgccaaggatgatgcctcagtgccccggctgatcaccctccaaactggaagtcccgctccagccccgccacaggaagtgatcatagaggaggatcacgatcatcaacattatcatccgccacactatccgccaagctattcgtatccgtatcctcagccacagccatgcggttgtccgcccggtcctccaggtccacctggtccaccgggacagccggggcagaagggctatcccggccccaaaggatccaagggtgatcccggcgagaaggggccgcgtggagataagggccaccccgggatgcctggaatccctggccaacctggtcctcagggtcctcctggatatcccggaggttcatatccaccgtatccgtatcctccacctcctcctcctccatcacatggacatggaggccctaaaggccaccagaggcactactataactactatgatgaggacgagtatgattacggcaatgagcgttcttttggtctgagaaaaaccgaagaattcgacgaccagcccttcattttggcctttagtgaacgcagaaatccgtttagcacaaaaaacaataaaagacgaaattaa

SEQ ID NO: 33723 - protein, 224 aa, DROSOPHILA
MSSNLEVLSANWTILLVALLSVLGGVFAKDDASVPRLITLQTGSPAPAPPQEVIIEEDHDHQHYHPPHYPPSYSYPYPQPQPCGCPPGPPGPPGPPGQPGQKGYPGPKGSKGDPGEKGPRGDKGHPGMPGIPGQPGPQGPPGYPGGSYPPYPYPPPPPPPSHGHGGPKGHQRHYYNYYDEDEYDYGNERSFGLRKTEEFDDQPFILAFSERRNPFSTKNNKRRN

SEQ ID NO: 33724 - DNA, 4631 bp, DROSOPHILA
aaaactcgaatgaacgttttgaaaaaggggaaaagggaaaccccatggaaagcaacacaactattacaattactttctgttatatgagattagtattttttttgaagacactaaacatgtggcccctgctgtacacctgaaccatgcaaagcgagcatgaggcgaagacaggtggaaaggtggcgttacgggtaagagcattttgcccgctggaacttggccgtatgtgctccggcaatttatgtccaaggtgcgtgccaccgaaatgaaccggtgaacctggacgttacgctcgtttcttgggggaaagtccggcagttgaccaacctgtgtcctctttcctggttctgcgcttaacgtgttgccattaaattttatggtcaggtcttcctctctttgtccgtgtttgcattttgctcaattttgtcgccgcagaacataaaaaagggagtcaggatggggctgaaaaagaagcgaaggaatattgcactgtggacgacatgtgaaaacatatttttatgggaccccaaagggtaattggacattgcacgggatatcctagctggctaatgagtgtgtcgagcctttttagataattaattgagagcttttcaaatcatctgtgaagtataatgaccacacacacacaataaggcaacgaaacgttgaagtgtgattgcactaatgagtagattaaagtcagctggagataacatcttaataaatccaagataattgaaatatcctttcgagatagttgtataatttgtaattctccattcgggaatatttgtttcattggcttcaagtgaaaccaattgtgccgcacttcatccagcgaaactttgacggctaactcgcttaatgcgcggcttaagccaaactacgagtaagatattttgtctgtggcaacttgaaagttgcaagtaattagtggcacttgagcaactactaggctgtcgggatacgaaaatggggcagggcatacccagatagctggatgctccaaaagttatgtagatcacgaaaatcagtcccttgagaacaaataacttttagcaatcttaaaatattatttctaagtattctaatcgttatactttattagtattttagttctatgactttctttaaaaaaaaaaaaaaaaaacactgatcttacaagctcgctttccacctatcctctttcagacccatcagcctagtgctggagccaatcctgaaggagcccggcgacatctcctttacgtggctcgagattcaccgcaccaagaacgcgctgctgcagcagttggacctgcatgtgaacgctagcgtgaccacgggcatgggctcccagacctcctcccagtccgcagccggctccaacacgggcattgggggactgggcaccagtgggtcaggatctgctgccaatgccgggggctctgctggcggagcaacggccaacgagacgctgaacgagttcggattctttcccaaggagtccgactgcgaatacaaatgtcctgaaattgatgcatgcattgcggccagcttgtggtgcgatggtgagtacagattgccagtcgaggccacagaccatttctcagggatttgccgaatgatgggtttttgggatggaaccactacatgcaaagcagtgcatagaagacgacgtgaacaagaaactttcgagcgttcatcaattcgggtcaatgggcaactacttaagaaaagggcttctgaataaagaacatacatgttgaattatcaagcaaattttgcatttaaagtaacttaaggtacgaattcttactcaaaattcagtagaaacgttcttaggaaaattaataccactaaagagctagcaataggcttatctccttacattggcatgcttggtctcaatgattgtactttgggaattttgatatcactatggagagtcctggatccccatcttcgcctggagctttgcactatttgtacgtgatttggcgctcagtcttggggatttgggttacccatttgcagcgtgccgccggcagaaggcaaccaaaaatttcacttgtggctggcttgtctgttaatttcgaagcgggctgtccacgtccttgtaatcaggcaaagtttcctgactgctgcaccaggctgcagtgcaccactcctgctggttgtcggttgctagttgttagttgcttcgttggtcggttgtcgttgtcggcggttgctggttgctggttgttggcgattgttggccgactggcgggatggcgggatggcgggattgggccggttgttggacaaacccgcagcggcaaaaccccaaaatgtcttgcagaaaaagtttatcccccagtccggcaccaggccaacacgaaatggccgcaacagctgtggcagacttattttcaatgcacttgggagatgaagggcgcaaaaaagtagatgccaagtgggaaagtttatagactaggaaataccgttttgttaggaatccgccgttcattttgtatttacatgaacctaccaatacatatttaaaagtcatatattatcctccaagtgaatgtaattattttaaatttgctgctggaatagtaaatactttaatatgtacattgaagattgtgtgatatacaagtataaaattgcattgattttcctgcattttcctacttatactccagaagccgcacagactctttaaatcttacgctcggtggaaaaaatacaaaggctagcctgggctttgccttttagcttcaattatttatgggcagccaggcgcgtctgcatctggagctggttaaccgcaaaatccagggcatcaaacaagctttggaccccacgggccactcgagtgacactgcattcaatttgtaaccttagaataggccacccagctgcgctgctcctcccaaaccccaatctgctttcaatttttcaatcagcgcctgtacctctatctaggatactgaatctgttcctacactgacaaaaagattcttttcaaatattaccttcaaaatatctatttgaaactatatgcaaaataaaaaagatacatccaactagggattgtattgttgaaacttcttaaatatatattgcttgtcactaagactatttatggataatttgaaagagattcttatagacctgcttagaccttaaaaatatttttaagcggtgttttggggtaatgaacaaatatctgaatcaaaagctgtaacagattaattccacctaagaagtgaccgcttttttctaaaagtgtccttataatctctccttttcaggccaccacaactgccccagtggtttcgatgagtcggaggaggagtgcggcaccgctcgcaagttgctggaactgccaggcggagttttcgccgcccttggatgcattgcagcagccctgaccgcctgcctgatattctgcatgttcggcctgatgaggaagcggaaaaagtcggtggtgcagaagggcgccggagtgggcggcatgggcggaatgggagtgggtgggatgggcgtgggcatcgggttcatgaacggagcgagcaacggcaacgtgtccgccgccagcatcggtaccttgaagaaggacttcaagaaggaggcgctgtacatcgatccggcctcctgacacggactacagccggtcgaatatatccacgtggaccgggagaccaccgtgtgatatgttgccgccggctgtggcattccctatgatcatgtggagctttccatggagctggcctgaccgatggatcagtccgctgatcccgttcaaaatctggcctggagattttaaagatacagagtcgacgcctggaggtatgagaacactaaatgaacctacattttaagccgataactttttctaaacgcttctgggagtaacaaattgcgcactagcgaagttgtgtgtatgtagtcataaggaaaatactgttattaagttgcgtatggtttttagtttgtatatataatttaattttaggcataaataatttgaaaatcgttgaaggagtcagaactgtgcacagaactttgtgcaagaactttttgaatgtagactttgtttcctatcattaatctttcaatatcagaaaattatcttggagttcaaactaaaaatctttataatttcatgcattaaaggtttccaaattaaaatcaaaatacataaacttttcacagtaaataaaattttaaaattcacgtcttaaggaatgtgtatattaagcaataaaatcacacacaactttttaaaactcaaaatgttcgagtaatattaatttattgctagtcacatggttgcccgtgctgacccttgcataattgttttagttcgattatgagagttaacaatttttcactttaagactacatacacaaacgaaaagaggacataaaactattgtaaattaggtacctttaaaccagttagatcagctagagaacaacaattcgtgggcggatcgtagatgacttcggcatattaccacatagcacacagcacccattaaagaaagtaaaccaatgacatttagcaactaaatgaaagatcataaactacaatgaaattgtatagaagagcaactcaaagagcagatccctatgcgcagggccactctggcact

SEQ ID NO: 33725 - DNA, 717 bp, DROSOPHILA
atgctccaaaaacccatcagcctagtgctggagccaatcctgaaggagcccggcgacatctcctttacgtggctcgagattcaccgcaccaagaacgcgctgctgcagcagttggacctgcatgtgaacgctagcgtgaccacgggcatgggctcccagacctcctcccagtccgcagccggctccaacacgggcattgggggactgggcaccagtgggtcaggatctgctgccaatgccgggggctctgctggcggagcaacggccaacgagacgctgaacgagttcggattctttcccaaggagtccgactgcgaatacaaatgtcctgaaattgatgcatgcattgcggccagcttgtggtgcgatggccaccacaactgccccagtggtttcgatgagtcggaggaggagtgcggcaccgctcgcaagttgctggaactgccaggcggagttttcgccgcccttggatgcattgcagcagccctgaccgcctgcctgatattctgcatgttcggcctgatgaggaagcggaaaaagtcggtggtgcagaagggcgccggagtgggcggcatgggcggaatgggagtgggtgggatgggcgtgggcatcgggttcatgaacggagcgagcaacggcaacgtgtccgccgccagcatcggtaccttgaagaaggacttcaagaaggaggcgctgtacatcgatccggcctcctga

SEQ ID NO: 33726 - protein, 238 aa, DROSOPHILA
MLQKPISLVLEPILKEPGDISFTWLEIHRTKNALLQQLDLHVNASVTTGMGSQTSSQSAAGSNTGIGGLGTSGSGSAANAGGSAGGATANETLNEFGFFPKESDCEYKCPEIDACIAASLWCDGHHNCPSGFDESEEECGTARKLLELPGGVFAALGCIAAALTACLIFCMFGLMRKRKKSVVQKGAGVGGMGGMGVGGMGVGIGFMNGASNGNVSAASIGTLKKDFKKEALYIDPAS

SEQ ID NO: 33727 - DNA, 3169 bp, DROSOPHILA
ttaaagatacagcaaaaatggtttttatttctgctcgaagtcatctaacttaactcaattccggttgtaattggatagttgcagcagcctaaaagtaggcaacattttatcttcgccgccggaagagcaataaaaaccgtagcctaccttccggctgcgtttggcatcacaaccaagtcgggaaaattagaagttaaccgaaggacttttctaatttgtcagctggcactgtttgttttcattgttttggccagggcttaaaaaaataaaataaaataaaaattagtcagtgggggaacacgactttgtgactgcaccttggctgccgggcgagcaccgagtgcagagtgcccaatttggcacgcccaagggccctcacaaataaataaaacgcagctggagaaactgaagagctgcaaactggcagccggaagctgggaattttttggcagagtgcagagcgattcgtgtttgctttaaacttgacaaaattaatcaaattaaacactcgactgcatcgccagacgtgcacaaataacgaaggagcagagcgaatttcccaggggcaggcgccaaattcaaattcgccaaagccagcccccggccccctctcacacacacacacacgcacacaatacaaaggcaaatgggggagcggcaagtgggcgttggcgtggccgtgggcaggaatgggggcggcattgacggcatgcacggacaaacagacaaccgcaataagcttgcttagcctttttgacgtcgctcctcgttgacaaatatgaactgcaaatattgtgatgccaaattgaagccgccgcgcattgtgcaattccgcgctctccgtgcagtcataaagaactttacgaaatatccataagctcccctaaattaaatacacatgtgcacaagctggcactgtcaatattaaagagtttccaaaaataaattaaacgtggcacagtttattcctctagcggaatatttattgaagttgaatattatgtcagatgtaggacaaatcattttcacagaattttttatcagcccacatatcatttttcaataaaactatttacaaagcttgcaaatactttataaactgagcagagctttgaaaatattaaaagtagctaacattgcagttcgctttaatataccattttattgtaatcttattgaaggctacagtttttcacagtatttcaactctcttattaccatttcccctgacagaaactggagttccacacgcataccggcaccgccctgtttcccgctcagtttgctctgaactacgagtttgtggacacggagcagggcggcgagacgtgggcgggaagacggggagaagatccggttccgccactctgctcaagaattttcaagaagcgtaagggcaacattcaggttcccaggaatgtgtttctgtacggacgaggcggagccaagaacataacctgcttgtatcgctttgaagcgggtccttcggagagggtgaaactggtcctgcataacgtgtccttcggagaaggtacagcctgtaccactgactcggatctgcatacaggcagaccccgctgcaatcaactggatccggagggccgcatcacggagctgcgactgttcgatgttccatttagggacgtgaaaatccaactgggctgcttctgcgataactccagtgccttgtacagcaatgcaccgctcactttcgtttcgcattcgaggattatggagctgtccttcacggtcacgagattaaatatatcggaggactttgcggatgtcttcttctcggcttcctacgaattcaagagacaaccggactgcaggaagcagttgaaactcaaaggagccggaggggaggacgaactcaagtatcctcttaagactcaggacgcaagctgtgaaggcctggcctggtacatcgaagcacaatcggccgagaggtcactcttcgttcagacctggggcgcctatctgcccgtggatcccacctccgaggatgccatgcggtgtcacaccaagaaccgcttgatgatttactccggacgacccctgcgacccatgagggtggtgtgcccggcacaaagtggtccgcggccaatgtcgctgcacatcttctccgaggactggaccaatggacagcccttgttcatgaacaagtaagtagaagaagctggcttaaatatatatttaattttcaaaaatataatagtttttatttggtttttctgcttgagcccatgtggtttgaataacttaactaataaccttaggaaacaaacaacgattgacccttttgagaaagattgtggaaaacatttgtgtgctttatttatttgctagtagaggagactgaattatttacaatttcacgctctggtgtcgtgtcgcccaagaagtctgcccgaccaattacccatgctctgggaaaaattcgaaaatattccaagaacaaataaagaaagagcaggacttgaaaacattcatgcctaatggcgcatggactccctgccattatgaagagcatgtgagctagtccactcgagcaactgaagactacacaaaaagcctcttaggtcgagtattttgggaatttttcactcaaaattaattgcattttaatagttgctaatatttcaaaaaacttgtgcacttatttgcaccggcatcaggctgctcaggctcgccgctttccccatccccttctccatgaagctccatcaaaaagtcctgcttaaaaatgcaataacaggaaatggctacgacggcaacaaaatacaggaaattgagcgcaaagaaatatgctatataggagatgaaaaaatgaaaacgcaaacgagacgaagtccaggcaaacaaacatggccgtcagacatgaacatatgtatacagccgcggttaaccaattaggagttttgaattccagaaaaaagaattaatacaaatatgcactttatttactaagattcatttacatttggattcgttggttggtttcagcaagcgtacttgagctttcaggcagaaaagtgctcatgctttagcatactgagtcttagaatagcaaagtagctacaaaaaatttaaaatcaaagttaagttaaaagttaaaatcaaagttaaaaaaaaaaaactcgaatgaacgttttgaaaaaggggaaaa

SEQ ID NO: 33728 - DNA, 945 bp, DROSOPHILA
atgtcagataaactggagttccacacgcataccggcaccgccctgtttcccgctcagtttgctctgaactacgagtttgtggacacggagcagggcggcgagacgtgggcgggaagacggggagaagatccggttccgccactctgctcaagaattttcaagaagcgtaagggcaacattcaggttcccaggaatgtgtttctgtacggacgaggcggagccaagaacataacctgcttgtatcgctttgaagcgggtccttcggagagggtgaaactggtcctgcataacgtgtccttcggagaaggtacagcctgtaccactgactcggatctgcatacaggcagaccccgctgcaatcaactggatccggagggccgcatcacggagctgcgactgttcgatgttccatttagggacgtgaaaatccaactgggctgcttctgcgataactccagtgccttgtacagcaatgcaccgctcactttcgtttcgcattcgaggattatggagctgtccttcacggtcacgagattaaatatatcggaggactttgcggatgtcttcttctcggcttcctacgaattcaagagacaaccggactgcaggaagcagttgaaactcaaaggagccggaggggaggacgaactcaagtatcctcttaagactcaggacgcaagctgtgaaggcctggcctggtacatcgaagcacaatcggccgagaggtcactcttcgttcagacctggggcgcctatctgcccgtggatcccacctccgaggatgccatgcggtgtcacaccaagaaccgcttgatgatttactccggacgacccctgcgacccatgagggtggtgtgcccggcacaaagtggtccgcggccaatgtcgctgcacatcttctccgaggactggaccaatggacagcccttgttcatgaacaagtaa

SEQ ID NO: 33729 - protein, 314 aa, DROSOPHILA
MSDKLEFHTHTGTALFPAQFALNYEFVDTEQGGETWAGRRGEDPVPPLCSRIFKKRKGNIQVPRNVFLYGRGGAKNITCLYRFEAGPSERVKLVLHNVSFGEGTACTTDSDLHTGRPRCNQLDPEGRITELRLFDVPFRDVKIQLGCFCDNSSALYSNAPLTFVSHSRIMELSFTVTRLNISEDFADVFFSASYEFKRQPDCRKQLKLKGAGGEDELKYPLKTQDASCEGLAWYIEAQSAERSLFVQTWGAYLPVDPTSEDAMRCHTKNRLMIYSGRPLRPMRVVCPAQSGPRPMSLHIFSEDWTNGQPLFMNK

SEQ ID NO: 33730 - DNA, 2863 bp, DROSOPHILA
aggtagatttaaaattgtccttaagacttagtagcttgttttatttgtttgcacttcttagactttaattacatggattaactttacagaattaaatgcacaaatgttgctttttcatcgtcaagcaaatcaactaaatgaaatgaacagaggcagcggacttaaacggctgtcagttagtttctgggccgacacttcgtctggctccggagtctgtaactttagttcagtttcttcagccaagccacagctgtttgcaactgtctttttcattattaacacagtcaacaataatcagggcctaggcggaatggagcggaatgtggggcggggcgaagaaaacataaacattgtcagccaggaggcgtctaggaaaaatatttaatgcctgcaaacaacaacaaggagactgtgaggaatgcaaagactgcgactacaactacaaagccgacgagtgtggagcctttctactggggacagtgacaaacgacaaataactcacacttacaactgtttgaatatgacatgtgacaaacggagggcgagcggcaaactaacaaggaaaaacaacagagagccaaagggaaagcgtggaaaacgcgtggagtgaatggcacgaatcacacccaagtactcgagaaaaacattcgtaacattcaagtgaggaaatcgaattttatagtattcaaaatttcaaatcataggaaaccatttcaaaggatacaaatgctatttaagtatattcataatatgtgtaatcatctttaattaattaattaattaattataaatataaaattgcaattattaattcccaagaataagcattagaagttggtatagttttcttaaaacatgaaattctgcctgctaatttctctcagtgcaggttaaaataatgccaacaaacgaattaaacaataacatgtgttcgctttcttttcgctctccaattgtcttcctgcagagcgatctgccaccttggataacgcgcctgaggatgtgggacagctatggcacatatgtgcccatgaaatcgacaagttcaaccaccggccaaccgccaccgccaccccccgttgcctcatcggcggacgggggcaagccaaccctcctaaaccagagcaactacggcagctactactacagcgccagcaatccgaagctgaatcggaatctgcgagtgaacatcgacaatgcctggaatccggtggacacctacatctacggccccacgcagtcgagtgtgttcaaccaggagaacaagtacagcggctatcagggtggaggtcctggcggaggatcgactggatccgctggctccggcaagacaatctccggggtcaaggacagcctcaactacatttccagcggcaagtcctccaaggaagtctcggcagctgccgtcgtcagctcggatcgcaatagtgcagtggccctgatgagcaccaagggcaagcgtcgcctcatgctggagatctacgactacgagactccgaagctgtgcgatcacactgccatcggaagtggagtgagcggaagtagtgccgtgatggggggcaataagcagagaccctgcagtccgctggagagctacgtgagcaccggaagggatttggtaagtaaatcaaaagattcaatttggatagatgtcgataaatggaatgtagtaaacgttttcttcagatttgtccgacatcagttcatttgttatcaatgcaaacagacatcttgatcatttattcagctaaataagactatgattagcattaaaaagcccttatataccatcatttattatgttttgaaatatgtttaaagatacagcaaaaatggtttttatttctgctcgaagtcatctaacttaactcaattccggttgtaattggatagttgcagcagcctaaaagtaggcaacattttatcttcgccgccggaagagcaataaaaaccgtagcctaccttccggctgcgtttggcatcacaaccaagtcgggaaaattagaagttaaccgaaggacttttctaatttgtcagctggcactgtttgttttcattgttttggccagggcttaaaaaaataaaataaaataaaaattagtcagtgggggaacacgactttgtgactgcaccttggctgccgggcgagcaccgagtgcagagtgcccaatttggcacgcccaagggccctcacaaataaataaaacgcagctggagaaactgaagagctgcaaactggcagccggaagctgggaattttttggcagagtgcagagcgattcgtgtttgctttaaacttgacaaaattaatcaaattaaacactcgactgcatcgccagacgtgcacaaataacgaaggagcagagcgaatttcccaggggcaggcgccaaattcaaattcgccaaagccagcccccggccccctctcacacacacacacacgcacacaatacaaaggcaaatgggggagcggcaagtgggcgttggcgtggccgtgggcaggaatgggggcggcattgacggcatgcacggacaaacagacaaccgcaataagcttgcttagcctttttgacgtcgctcctcgttgacaaatatgaactgcaaatattgtgatgccaaattgaagccgccgcgcattgtgcaattccgcgctctccgtgcagtcataaagaactttacgaaatatccataagctcccctaaattaaatacacatgtgcacaagctggcactgtcaatattaaagagtttccaaaaataaattaaacgtggcacagtttattcctctagcggaatatttattgaagttgaatattatgtcagatgtaggacaaatcattttcacagaattttttatcagccca

SEQ ID NO: 33731 - DNA, 660 bp, DROSOPHILA
atgtgggacagctatggcacatatgtgcccatgaaatcgacaagttcaaccaccggccaaccgccaccgccaccccccgttgcctcatcggcggacgggggcaagccaaccctcctaaaccagagcaactacggcagctactactacagcgccagcaatccgaagctgaatcggaatctgcgagtgaacatcgacaatgcctggaatccggtggacacctacatctacggccccacgcagtcgagtgtgttcaaccaggagaacaagtacagcggctatcagggtggaggtcctggcggaggatcgactggatccgctggctccggcaagacaatctccggggtcaaggacagcctcaactacatttccagcggcaagtcctccaaggaagtctcggcagctgccgtcgtcagctcggatcgcaatagtgcagtggccctgatgagcaccaagggcaagcgtcgcctcatgctggagatctacgactacgagactccgaagctgtgcgatcacactgccatcggaagtggagtgagcggaagtagtgccgtgatggggggcaataagcagagaccctgcagtccgctggagagctacgtgagcaccggaagggatttgatacagcaaaaatggtttttatttctgctcgaagtcatctaa

SEQ ID NO: 33732 - protein, 219 aa, DROSOPHILA
MWDSYGTYVPMKSTSSTTGQPPPPPPVASSADGGKPTLLNQSNYGSYYYSASNPKLNRNLRVNIDNAWNPVDTYIYGPTQSSVFNQENKYSGYQGGGPGGGSTGSAGSGKTISGVKDSLNYISSGKSSKEVSAAAVVSSDRNSAVALMSTKGKRRLMLEIYDYETPKLCDHTAIGSGVSGSSAVMGGNKQRPCSPLESYVSTGRDLIQQKWFLFLLEVI

SEQ ID NO: 33733 - DNA, 3230 bp, DROSOPHILA
atacccgttactcagctattgggaatgcaaacgcgaaatattgggggattaaattatattaacctgtttggcggtcttagggcattagagtgggcgtgacaaaaagttatttggcaaatcgatagaaatttatagtactaataaagttataaataatatcgaacaatttttaaaaaatctaattttgttgtgtttgtttttattgatcagtcgacgttcttacagaagaactagcgctttataaaccaatggagaagtgtaagccagaggagcggagtaggccaaagcagcagcagcgtacttggccaccacaggagcagcggcgattccattgtagttcctagcgataacttggttactggtggcggtcacagcggcagcgggagcagagtaggccaggggagcaccttggagtccatacttggcagcagcgcaaattggtatctatgttttaaataaattggtttgtaccaaaatattttgcatcgaatccgcaaagttcaacgcacacaggaaaatcgatatatcatatattataatgccaattaatctcacaatatcttagttcaaagtggaatgtaagatagcagaggcaaaatatatttaagtttagtcgtcgtttggcggttttgaaaggcataaaacaagaaaggggcccaggaaagctttttcatcagtgagagtatcctataaacatatgcattttaagaaggattatatctaatttaaaccatgtttaatacatgtaatatttatttaaatattggttattgtttcgttatatgttaaatgtttaatgttaaaaagtttaagggaagagacaaacactacttctactttcaacgacttatccgcttttccacaacccattccattgcatttctagtgtgcaacttctttttcgatcattcctgccaactgcactcctgatcctatcgatagtttcctatcacgctgccaccaccatcatttttgacatacatttgtaaatttatttcgtcaagtgatcacatgttgataatttagatgaggacctgcgcagcagcagaggcgcagctgattggagcggagttggccaaacgcgaagggtaggcaaaaggaagcaatctcagaagcagcatcgataccattgctgttcctggcgataacctggctactggtggcggtcacaactggagcgggagcagctaccacggcagcaggagcagagtaggccagaggagcagagtaagccagaggaccagtgtacgccagggcagcacacaggactccaggcttggcagcagcgcaggcgacggttatcaggacaaggacggcctgtaaacaaatcagcttgattagtttaatcctctatggatcctttctgaagaacgtacgtatttgaacatggtgaaatatttgtttggtttgcttcttcggaagcctagaaactcttgatatcccactgctcttcgtggagcatatttatacccgaatgtttgctcagatctgactcatgatcgcactcattcagttcatttaaatgcggtgacagtctcccgttaccatttaccatctaccattttcactttgccgtagtttatgtgatttcccactgctgactgcagaatgtggaataactcttggtggccacggaatgcgatggcctgagatcacaggcgcagtcccgatgcggcgcataaatagtggtatggaatgtgttgggcgacatcaggttcaagttttcgaaccgaaagcaccagatccataatccaaatgtttaaatccgtaagtttgagatcttagcttgctgccctataaactaattgtattttattcacaggacgtccttgtcttggccatcgtctcctgctctgctgccaagcctggactgctttggactacactgctcacgtggttcctctgcttcactccggtctgactgtcgtggtagctgctctcgctccagttgtgaccgctgccagttatcaggttatcgccaggaactacaatgtaattgctcttgctcctgtgattgctcctgtgattgctcccgtggcttttctctggctgtgcctctcttggcccagtacgcagccgctcctctggctgctccatgacctactcctcgcctttggcttactccgcaccactgagctacgccgttccatttacacagctccctatctaaattactaagctgtgatcacctcggagacaatgataataaatggagatataataagacgttattcaattgtatattcttttgcaaacacgcttcaaattagtatttattttaatgaaaaattatatctgaacgtacacgaagatgattcctagataatttcccagcatttatgaacaattattccgagaatgcacactagcgccacctaacgactgatacatttcttaatcacagccctataatctgttgaatctaactacaaaatatccgaacttctgagctttgaagatccccagatcttagacggtcatagatcccaattaatttcttttttgtgcgaaagcacttcattcaacgttttacataatttttatagaatccaataaggccttttattctgggcgttagagtgggcgtggcactgcgtctttatctctagaatctgtatgctaaatctcagcctagcttttatatttcctgagatatcgacgttcgtacgggcagacggacatggctagatcgacttggctattgatccttatcaagaatatatataatatatatatataaatatatatatatatatctgcctgttacattcaacgaatctagtatacctgtttaagcaatgagtaagtaaatacttttaaattaatgtaaagttgccaatacttgcctaacgaaataaattaaaaaagttttatttaactgcaataggtattgattttaaattccaagatttagaattctattaagcacaattaaaacgtgtttattttgcagaaacgtttctactgctccaactgtatatgtacatgctgcttgggcctaataattaaccttgctgataaccctcatcaaatcaccaaactgccgtccacacaattccatggtgctccattatcaaatccctgttggatgtccggtgcctgaatcaacacaattcaaaagcccacccagaagtcgaaacccgttttcggcaccatcgttcattcatcatcgccgcctggcacttggcaaatttacacaagccaggtaaacggatagacagaaggacgga

SEQ ID NO: 33734 - DNA, 792 bp, DROSOPHILA
aacgtcttattatatctccatttattatcattgtctccgaggtgatcacagcttagtaatttagatagggagctgtgtaaatggaacggcgtagctcagtggtgcggagtaagccaaaggcgaggagtaggtcatggagcagccagagcagaggaaccacgtgagcagtgtagtccaaagcagtccaggcttggcagcagagcaggagacgatggccaagacaaggacgtcggatttaaacatttggattatggatctggtgctttcggttcgaaaacttgaacctgatgtcgcccaacacattccataccactatttatgcgccgcatcgggactgcgcctgtgatctcaggccatcgcattccgtggccaccaagagttattccacattctgcagtcagcagtgggaaatcacataaagttcttcagaaaggatccatagaggattaaactaatcaagctgatttgtttacaggccgtccttgtcctgataaccgtcgcctgcgctgctgccaagcctggagtcctgtgtgctgccctggcgtacactggtcctctggcttactctgctcctctggcctactctgctcctgctgccgtggtagctgctcccgctccagttgtgaccgccaccagtagccaggttatcgccaggaacagcaatggtatcgatgctgcttctgagattgcttccttttgcctacccttcgcgtttggccaactccgctccaatcagctgcgcctctgctgctgcgcaggtcctcatctaaattatcaacatgtgatcacttg

SEQ ID NO: 33735 - protein, 70 aa, DROSOPHILA
MEQPEQRNHVSSVVQSSPGLAAEQETMAKTRTSDLNIWIMDLVLSVRKLEPDVAQHIPYHYLCAASGLRL

SEQ ID NO: 33736 - DNA, 2390 bp, DROSOPHILA
ttatggtgacatcctgaaagttaccagtcacccctcgccgtaagtcagtctgctctttggggttttttatatttcttattgccattcgtcgttttattgttgtcataatgtggtggcctgttgccgctcttctggcctgtattcccgtgtttcttgtagtactttggagctattgccactattgactagctgcagccgctcccctgctccactgctccttgccttttctcatttctgcattttttagtgcttaatgccaggacacggacacagagctgaaactgatgggaatctgcttgctcgcccagaatttccactcctttactgcattttttataggcaacacacaaaggtgtattttacttgccatgaacagggattgcatacattgtttctgttcagcgggcttttgtccgtgtttcctggctgctccatgcgtcaaatgaggatattcaatttgaacttgatatgcattttatgttgttgcccccggagaaactggatgctcaacaagcgtattggaaatcagagcaatcatcatccgatgggtcaagggtctaaggatacggcttggatatgagcggcttggatatgagcggcttggatatgcagccgcatttacatataaactcatattctgcttatgcctgggaattagataattccacagaaagtagtttttattgtgtgcagagcaaaacaattgcgaaaataagaaaagcgaatgaatttgtttgcaaaaaggtttgtaaaatcataatgataatccaacttgaggatatatgttcctacaatctacgtttattgatttggcagatttattaggtgcagagatgcatttattggacgtcagagcaaaacgccgcactgagtgcgatgcaaaataaattatttactcgaattacatctgctatgcccgcaattcacacagcccaaagtctcacgtttcgactgcaattttcccctgctcctgctccttccactgaaaatgggatcctgaatgccttcgcctaacaatacgcacgcaattaccgcaggacgagcagccgaaaagggcgaaaacttcaactcccaaacgcttgacgaaagtttcacagttgtcctgatgacgaccatcatgatgatgatgatgatgatgctgttggcgatggctatgacgatggcgatggcgctggacaaactttttcagagctctaattgcccaagtggctttcgagttcgagttcgagtcgagcgtcgccacgtaatggagaaaggagccccaaacttttgcccaattcagcagaactgcgagcacaacatcttcttctgccgctggacaggattcaccgcctccacttctatttcactcacaaaatgcacaatcaaagctgaccgttggcgttattaacgcaaatgaaagtggtgcaataccgctacacctgcggccaaaatagtagtgtatcttacatagaacattcattatttttagcttaatttgtaacgagcatacttaacgaaatagtataaacttatgttggaagggaactgaaaaaaagaatagaaatggaaatttaaatgagattaaattgctattagcatggatttatgttgataaagtgcattgtaaatcatcaaaaatgaaaaaatgaattattaatcattataatttttttagatgtttgattatgcttttcaacaataattacacaaattagacactgctctaaccatatctgtatgttggtggtggcaggagtgggtgttacctacatatatttcaatttattagatggtcaaccatcactgtgtgtgggaggatgcacttggcctaatgaagttctgggctcggtggatagggttggggaaaccataaactccaacttccagctccttttcacatatgcagtcccgtaaaacttacggctcaaaggccaagactttgtctccgcagtctgcatatttacattttaccttttcggtcttttgggaaggagctttagcatttgcatcctgcacttaacttctcggcaactgcgtaacttttgactctgtgtcaaaaaggatagagtttacgggaactgggtaagaactgggtcctttaaagacctttggatctaagattggttatccactcaacctatgaactcgactttttaagtgctgactctaaagccaatctaatgcatcagcaagattctttattctcactgaaaatacaaatacagatacactgaaaataacagagtagtagatgtttttaaattattaatccataaggtattattactctaatgtcttggaagtaatgcttaacttgctgatttttttatataaaaaaggtacttggagtcttacttttagctgagatttagacgcttgatcaggcaatttcaacttcattattagtt

SEQ ID NO: 33737 - DNA, 390 bp, DROSOPHILA
atgccttcgcctaacaatacgcacgcaattaccgcaggacgagcagccgaaaagggcgaaaacttcaactcccaaacgcttgacgaaagtttcacagttgtcctgatgacgaccatcatgatgatgatgatgatgatgctgttggcgatggctatgacgatggcgatggcgctggacaaactttttcagagctctaattgcccaagtggctttcgagttcgagttcgagtcgagcgtcgccacgtaatggagaaaggagccccaaacttttgcccaattcagcagaactgcgagcacaacatcttcttctgccgctggacaggattcaccgcctccacttctatttcactcacaaaatgcacaatcaaagctgaccgttggcgttattaa

SEQ ID NO: 33738 - protein, 129 aa, DROSOPHILA
MPSPNNTHAITAGRAAEKGENFNSQTLDESFTVVLMTTIMMMMMMMLLAMAMTMAMALDKLFQSSNCPSGFRVRVRVERRHVMEKGAPNFCPIQQNCEHNIFFCRWTGFTASTSISLTKCTIKADRWRY

SEQ ID NO: 33739 - DNA, 2559 bp, DROSOPHILA
acttgcctttagcattgtctcttgtttaaattgtggattccgcagagaacgtgacggtcctctaaagaattatcattcatagagcacacctcctatagtgtagtaaataaaattgaaagtgaattgagatcaaggctttaccaaatattttcttaaattatacaacagttagtagaaatggagcttgctaaaggtcaatatattattagtatttttttttaaatcaaacccggatgtccaaaacaataaatgttgcaatgtcgccggccagcagaggagttccccaaatcattcgagtgtgttcatgtgtgctttctactgctgaccgaagccggcacgtgttcaaaatgcttaattggccgggaagcctggactagtctctatatacatacatatatatttttgtggctgccaacaggttttcgatgaaaattcctggggccaaagagcaagggttaggttaaagtgtgagaaatgttgacttaaattattgttatcactatttttgcctaatttctgacccggaaaaccaataaatctctacctgtgcctttgtggtcaaagggtctacattgtgtctataccgatggctttggttgtggagaacagttgtagaaaatgtactaatatgtttgccagcagcagctattaacccacttgttggcatcgaccacatccacccaataatagaaaattccccatgaaatccgaattgcatttaaaaaccatttctgtataattaatcggcgagtgcaattgactgcccttcgggttttatgccgtccatcgaagacctaaaacttgcgaactaccaactaatatttttcagacactaataatggcccaatgggttgcggcgcacttggaatattaagtaaccgtcgcgtgggacactgagtggtataaatacgccgcggtctgccttcgattgtcatcagtcagctctttgctttcaagtcaatccaagcttagctttcaaatccgaaaaacaaaaaccatcatgttcaaatacgttagtttgggattgccaagtagctgaagtatatgtattgtagtttactatcttattcttctacttttaggccgttgtcatttgcgccctgatcgcctgtgtggctgccaagccaggattgctgcacactcctctggcagctctgcccgctccggtgattgctgctcccgctcccgtggtcactgccgccagtagccaagtcgtggccaggaccttcaacggcatcgccgctgctccagtgattgcccaagttccggtggctcctgctccagttttgcggaccgtagcagctcccctagcagctcccctagcagctcccctagcagctcccctgcgcgctccagctcccgttgccttcgccgctccagtcgctgctcccctggccgctccaatcctgaacagagtggctccatttgctgctcccattgccacccccttcgctgctccgtacgcccatccctatgctgcgcccgttttggccaaatacgctgctccactggcttatgccccagcacctttgaactatgccgcgcccgctttgtggtaaaggaaaatcgcataccccgggattaagcaaccgtttgtgtgctcagtgactgatagcccttaataaaactctttaaaattggtaaaaaaaaaaaaattgttcgctcttgttggtttggctgtctggtttttcaggtatttggttaaagccctttgacaaaaagatttatggtgcagaaaaagatctggctattagcttttttcacaaatgtatttttttcaaattacatcacacaatcgcacatcggtagaaaaaatttaacaggcattcaaaaactcttaataatagttcttaaataaaaagctggaacattgtttaacacttttaaatattaaaagaactttaatgcacatgatctgatacatttaatatttaaattgttaattttttatatatataagaagtaatggcattttaaaacaactggtttcgttacatttacattcgctcagttttcatagcaatattagatacatatattttatatttttaaaacttgaagggtatttggatgcctggctatattctccgcatcccatacatactgaatcccctaaaaaaaattctggccactcatagagagtcaatcgcttgtgtcgcttcgtcgcttttatccacgtcatttgtgtttcattgtcccacattggcttcgtctatggttctaaggacgagttatggcccattggtgatgtgtgtgtatgtggttttctggggataagtgggtgcccgagtgggtttataggtggctcaggttgtggagaaggccactctgggatcggaatcgtttttcatttccctttcatcgatatttgccattcatttggcatttgacaaacaatgcaagaagcgaagcgcaatgaatgcccaataaaagttcaaattatggtcgtgtttccacttttcaagttaaaggcaaaatggtcatggagctttaaggtaacctaaagctaaaatttcggcagaagcaacgccacatagggaaaaaaggaaattaagaaag

SEQ ID NO: 33740 - DNA, 489 bp, DROSOPHILA
atgttcaaatacgccgttgtcatttgcgccctgatcgcctgtgtggctgccaagccaggattgctgcacactcctctggcagctctgcccgctccggtgattgctgctcccgctcccgtggtcactgccgccagtagccaagtcgtggccaggaccttcaacggcatcgccgctgctccagtgattgcccaagttccggtggctcctgctccagttttgcggaccgtagcagctcccctagcagctcccctagcagctcccctagcagctcccctgcgcgctccagctcccgttgccttcgccgctccagtcgctgctcccctggccgctccaatcctgaacagagtggctccatttgctgctcccattgccacccccttcgctgctccgtacgcccatccctatgctgcgcccgttttggccaaatacgctgctccactggcttatgccccagcacctttgaactatgccgcgcccgctttgtggtaa

SEQ ID NO: 33741 - protein, 162 aa, DROSOPHILA
MFKYAVVICALIACVAAKPGLLHTPLAALPAPVIAAPAPVVTAASSQVVARTFNGIAAAPVIAQVPVAPAPVLRTVAAPLAAPLAAPLAAPLRAPAPVAFAAPVAAPLAAPILNRVAPFAAPIATPFAAPYAHPYAAPVLAKYAAPLAYAPAPLNYAAPALW

SEQ ID NO: 33742 - DNA, 2424 bp, DROSOPHILA
gttagattcaacatattatagggctgtgattaagaaatgtttcagtcgttgggtggcgctagtgtgcattctcggaataattgttcataaatgctgggaaattatcgaggaatcatcttcgtgcgtttttaaagcgtatttaaaaaatatacaattgaataacgtcttattatatctccatttattatcgttgtctccgatgtgatcacagcttagtaatttagataaggagcggtcctgaagcagcggcgtagctcagtggtgcggagtaagccaaaggagaggagtaggccagtggtgcagccagaggagtagccgcgtacttcgccaccacaggagcagccagaggagcagcaacgggagcaatcacaggagcagcggcgattccattgtaattcctggcgatgacctggctactggttgcggtcacaactggagcgggagcagctaccacggcagcaggagcagagtaagccagaggagcagtgtaagcaaggggagcacccaggagtccaggcttggcagcagcgcaggcaacgagagcgagaacgacgacagcctgtgaacaaattaacttgattagtttaatcctttgggtgtcctttctgaagaacgtacgtatttgaacatggtgaaatatttgtttggtttgcttcttcggaaggctagaaactctttgatatcccactgctcttcgtggagcatatttatacccgaatgtttgctcagatctgactcatgatcgcacgcatttaaatgcggtgacagtctcccgttaccatttaccatttaccatttaccatttgcactttgccgtagtttatgtgatttcccactgctgactgcagaatgtggaataactcttagtggccacggaatgcgatggcctgaggtcacagacgcagtcccgatgcggcgtataaatagtggtatggaatgtgttggacgacatcagacaagttcaagttttcgaaccgtaagcaccagatccataatcataatgttcaaatccgtaagtttggaatcttagcttcctgccatatttactcatcgcattttattgacaggccgttgttattctggctatcgttgcctgcgctgctgccaagcctggacttctgggtgctccccttgcttacactgctcctctggcttactctgctcctctggcttactcagctcctgctgccgtggtagctgctcccgctccagttgtgaccgccaccagtagccaggttatcgccaggaactacaatggaatcgccgttgctcctgtgattgctcccgttgccgctcctgtggtggccaagtacactgctgctccttttgcctacgcttctcctttggcctactccgctcctctggcttacacttctccattggcttataaaactcttccggctgctgctccagttcttctgtaagaacgtcgactgatcaataaaaatacaaaaaaatgagataaatcagtagaaattacttcaatgggccagtggtactgaggactaccgcacaatttaaattgaattagccactgacagctagccgtgctcataaacaacggtaatgactggcctctggaactccaacgcctcgtttgcggatgcatatcacgtagccagtggacaagttattggccaccggcagccgtcgctggatgcgtgatatttaaaagtggccaaaatggtttgttttgaagttgttgggcgactgaaatatgtaattaagtcaaggtcgcggagcagtcgaggtcgggctaatgaactttccagtgctaattgaaagaaatcaagggcttaaaaagtaatgacattttaatttaacggtactaggcagttaagtattaacactcagatggtagttacgaacaaattttaagccatggaaaaataagccattaggctgaaagaaacaatcttttcttggttgcttatcaaattccaggtaggtgttaagattttactctataatgtagatatgtactcagtttttaagttttaatggagtccgaatattgccatgatcaacattttatttttaataattgataagtgtgctgaaaacagaaaaggttaggaacgagaaatgtatatatgtatgtaaataccattaataaaatgtctacctacttatggcacacttatatttgacttaataatacccattactcgggcatactagattgtttaaacgtatgtaacagaggaaaggagcccttctgatgtcaattacttatgaattattgatcaggatcaagtctgttcattcgtctgtctgtcccagcgtccctgtccttgtttgttcccttaaatcgataataggtacctaatagtcgcaacacttgcctttagcattgtctcttgtttaaattgtggattccgcagagaacgtgacggtcctctaaagaattatcattcatagagc

SEQ ID NO: 33743 - DNA, 369 bp, DROSOPHILA
atgttcaaatccgccgttgttattctggctatcgttgcctgcgctgctgccaagcctggacttctgggtgctccccttgcttacactgctcctctggcttactctgctcctctggcttactcagctcctgctgccgtggtagctgctcccgctccagttgtgaccgccaccagtagccaggttatcgccaggaactacaatggaatcgccgttgctcctgtgattgctcccgttgccgctcctgtggtggccaagtacactgctgctccttttgcctacgcttctcctttggcctactccgctcctctggcttacacttctccattggcttataaaactcttccggctgctgctccagttcttctgtaa

SEQ ID NO: 33744 - protein, 122 aa, DROSOPHILA
MFKSAVVILAIVACAAAKPGLLGAPLAYTAPLAYSAPLAYSAPAAVVAAPAPVVTATSSQVIARNYNGIAVAPVIAPVAAPVVAKYTAAPFAYASPLAYSAPLAYTSPLAYKTLPAAAPVLL

SEQ ID NO: 33745 - DNA, 2481 bp, DROSOPHILA
atccgcttccaattagttatacaatatcaagcgccgattctgcataatgtttaaatcccttcactttctttacactcgtataccctcttctcattctgcgccagacaagaagttgaactttctccgttcttccgaattccatacgcgccgtccaatatttttcctagccacatacattgttgccacaactgttttcttggaccgccgcaaatggaaaagacccatcttggcactcggatcctggtcgaaccacctctctacaggtgcccacgctattctcctgaaattgacaaccagctctgttgcctctttcagtccaaaatgcctgacccgaagaattcttcttgtgttccgattatagttttagaaaccagacacagatggcggcccaaaaccttctatccccctagaaggcactgtcaccaactttagctgcctcaagcgctacaaatctggggtcggaaactattccttctacctttcacccacttttccttgaatatagtacatataccgattttactctggggcaataacatatatttaacatatatttaaaacatatattccgcaatcgcaataaaaacctttttaaagacacggatattctgtaaataggcaaccaaacgcaaattgggccatcggttctaagacaggttgattgtgccaaatctgtggctcatatcggtcacaggtcagctttgaccttgacataattgccaaggtctgtactcaaagccgaaaaataaaataaacctataatacaaatcaatttcgcacaatttaatgtaacaaacattggacagcagcaactgccgctgagctgacaataatttttatgaccattacgtgacctgcgttcgaaattttcaaatgccccccatcagtaggttgtcgatttcgacgctttagtatgccagcggtaaatccaattagcgaagccccaaaaaatgggagaaattggagttcgtttgattttttttattacttttaaagttttctaaagaagaacaggagctgatggcaaggcactgtatgccaaaggcgaggtgtaagccaaggaggaaatgtgggccaatggagcagcagcgtacttggccacaacaggagcagccaatggagcagcagcgtacttggccaccacaggagcggccaatggagcagcagcgtacttggccaccacaggagcggcaacgggagcaatcacaggagcagcggcgattccattgtagttcctggcgataacctggctactggtggcggtcacaactggagcgggagcagctaccacggcagcaggagctgagtaagccagaggagcagagtaagccagaggagcagtgtaagcaaggggagcacccagaagtccaggcttggcagcagcgcaggcaacgatagccagaataacaacggcctgtcaataaaatgcgatgagtaaatatggcaggaagctaagattccaaacttacggatttgaacattatgattatggatctggtgcttacggttcgaaaacttgaacttgtctgatgtcgtccaacacattccataccactatttatacgccgcatcgggactgcgtctgtgacctcaggccatcgcattccgtggccaccaagagttattccacattctgcagtcagcagtgggaaatcacataaactacggcacagtgcaaatggtaaatggtaacgggagactgtcaccgcatttaaatgaactgaatgagtgcgatcatgagtcagatctgagcaaacattcgggtataaatatgctccacgaagagcagtgggatatcaaagagtttctagccttccgaagaagcaaaccaaacaaatatttcaccatgttcaaatacgtacgttcttcagaaaggacacccaaaggattaaactaatcaagttaatttgttcacaggctgtcgtcgttctcgctctcgttgcctgcgctgctgccaagcctggactcctgggtgctccccttgcttacactgctcctctggcttactctgctcctgctggcgtggtagctgctcccgctccagttgtgaccgcaaccagtagccaggtcatcgccaggaattacaatggaatcgcctctgctcctgtgattgctcccgttgctgctcctctggctgctcctgtggtggcgaagtacgcggctactcctctggctgctcctgtggtggcgaagtacgcggctactcctctggctgcacgactggcctactcctcgcctttggccttactccgcaccactgagctacgctgctgctcctgcaccatttctcatctaaatttttatgctgtgattatctaggacgataaatataataaaaaggaacgcttaatatcgattttatgacctcacaaaattgctgaagtactagatctttggctttgcaaaaaaaacccgatacttgtagaataagtctgttttgagcggtttgtgggcgtggccaatacatggaccaacaaactt

SEQ ID NO: 33746 - DNA, 426 bp, DROSOPHILA
atgttcaaatccgccgttgttattctggctatcgttgcctgcgctgctgccaagcctggacttctgggtgctccccttgcttacactgctcctctggcttactctgctcctctggcttactcagctcctgctgccgtggtagctgctcccgctccagttgtgaccgccaccagtagccaggttatcgccaggaactacaatggaatcgccgctgctcctgtgattgctcccgttgccgctcctgtggtggccaagtacgctgctgctccattggccgctcctgtggtggccaagtacgctgctgctccattggctgctcctgttgtggccaagtacgctgctgctccattggcccacatttcctccttggcttacacctcgcctttggcatacagtgccttgccatcagctcctgttcttctttag

SEQ ID NO: 33747 - protein, 141 aa, DROSOPHILA
MFKSAVVILAIVACAAAKPGLLGAPLAYTAPLAYSAPLAYSAPAAVVAAPAPVVTATSSQVIARNYNGIAAAPVIAPVAAPVVAKYAAAPLAAPVVAKYAAAPLAAPVVAKYAAAPLAHISSLAYTSPLAYSALPSAPVLL

SEQ ID NO: 33748 - DNA, 3379 bp, DROSOPHILA
ttaataataaattatctttaattgaagacttcgctttttattgtggctgtttacgaattgtttgccgcccttattgattttatacgctccgagaagcaaaagagttccacggaattactcaaaaacatgatcgacgaatgggactctttgtttgccaaggaagtcaatttagtgctctttaagtcatattacctattgacccacgaggttagtgtggatccaggatttcaggcatgctatgaggccttactagaacaaataacaccggtcatagagcgactggactacagctttgtgtactcggtaatcaagtgaaatattttgttgtttttctatggctaataacttcaaaaacctttttacacttcagttctgcaagtcaaatagtaacatcaccttggaccacctctgcaatttcctgttcaagcagctttatagtgtccagcactcagttcgattaagtgctgtacactcgcttcgccaattaacgccacactttgtggcggacgacatagagctgaatgagaaacaaagtgagagtctagacgccagcacaacgatttgcaagtggcacttcctcaatcgctttgaggactatctaacacgctacgatgcactgataactaaatacctggaagagttcacgttcaagctatcagagctggatgatctcgaacccatagacagacacaatgcactgagttaccttttcttatgggattgtattatcaatgcttgcgctaagtctccagttgcattgcgcgctgtttacaccaattggctgaatgataacaaatacgaagaggttggaaacgatacattaaatttactaataattttaaatttacactttcaatttctttgctccacagaatttccttcacttccttttccgcgcaatgcccgtggacatacttaagaaccacggtgccaaggtccacagcaacggcgtttacaaagagctgacctggtctcagcagaagggtaagctgaacattacttagattattgtttcctccgatatatccgtattgagaacgtcgggcaagtagtcctccccatatccatagtcgtcatattcagcggctccgtgctcgacatcgttcatcatttcctctgcatccgcctcatcggatacagaaatgaaatctgacaagggcacaaactgttcgggatcgttctctgccatcatctgtcgttttacaggtatttgctgaggtgtcaagtaaatgtttaagtttgatatgaacttgttgacccaaacggttaggttgttggccaatatcctctgatactcttgcaaattacttgtcgtatagaattcttgatcttttgatgatttcaattagttaatttttgaagtgtcccagttagattcaacttacctgtaaattctcgaagtctctcaagaattacgcaacatagaggggagttctcgtcaacaataaactgatcgttgagtagaaagtccttcatttcctcgaacagtacgcaaattatcttttgcatctgcttgcgctggcgcaaaatgattcgtttttttagacccttgcatcgtcgcttttggacacgcttcgctgccttgcgctgacgcatctcctcctccatgtattccagcgccttctccattgacatggcttctaccggaggtttgggtttcatctggttctctagagccgctatatgacgaggcgagaggtagtccttaaagaaattgtatgtgtcactcactcgcattgggtgaggatcggcaagtcgttcaacccgtgctgtacattggttaacgtagatctttttggtgtagtagcgcgcctgtttggccaactggggtgaggagaagtccttcttgggtgtagctagaaaacatatgtgttcctcgcgggacaacacgtcccggtcgatgattatttgtcccgtgtgttggcagggcacatagcaaggatggtagcggggacagacacagatgaaccttcaggccaatgtatatattgtattggttttaatcgaatcgtttattgtttatagtaaaaaaggaaagttaaaagtctgatttaatttatgaaaaaacattccaaaagccaaagcaattccgaaaatatgcatgtattggatatggaaaaacttgatacttacttacctgtacaatgcttgcgtctcattgggggaaaacttaactaagcggcgaatgcgtttggcacgagtctcgcgcacatgaaccatggccaggcgagcgtttaactcgtccgctacggttggtccatcctgctgaaactcctcaggcttgtgctccttgcgcgtatcgcattgcgtcttcaggaagtttatggcttcggccaccgaagtctcgccctcaagttgaatgcgctttggctgcggcatctcggagggtatatccttgaagtttattgggttttccatgctttcaaatagaacggaaatacaaaaaaaaaaaaataagaagcggatcaatacacagaacggtaggagactaatgatttaaagtgaactgttttctatataaacataatttgactactcgcagcctggcttgccttgttacatttcttgatccattttgcagatcgacatctacccctggagcgatatgcctgccacttgtacacggaggtgctccgcaagctgcctgccgtggtgcgcaggtggtggaacgccactcagtccaggcagaagaacttcatagacaacctgaccacaaactacgtgagttctttgatttgcagcgaggagctcaaagcgatcgccaatcgcaaggagaagcacgagaatatgcaggtaagcggatgtgtcctttcaagtctttattcttgctctggggtgcttagccgaagggaaaaaaccacggtgatgctaatcagcagtatgataatgacaataacgcgaaatatctcaagaggcaccatatctctgctagaagggatataagtgtgctttcgctatatatttaaatttccgttgaataaaaaaactttggatattttgtaaatcccaaacaatcatagtctactgaactatgtgactaaagttgacatttctctattctaggttaccgttcattcctccacccgcgaagtgctagcggtctacgccatcgatgaggcacgcatggaacttgtaataacgctggctcccaattatccactgggagctgttaaggtcgagtgcggcaagcagatcggcggacgtgcttcctcccgaaatgtcggcatgcagttgaccatcttcctgacacaccaggtatattgatattgatacatttcgtatgttactcgatgtccgctgaataataatattaaaattgtcttatgcagaatggcaccatatatgacggcctaactatgtggaaaaacaacttagacaa

SEQ ID NO: 33749 - DNA, 1155 bp, DROSOPHILA
atgccgcagccaaagcgcattcaacttgagggcgagacttcggtggccgaagccataaacttcctgaagacgcaatgcgatacgcgcaaggagcacaagcctgaggagtttcagcaggatggaccaaccgtagcggacgagttaaacgctcgcctggccatggttcatgtgcgcgagactcgtgccaaacgcattcgccgcttagttaagttttcccccaatgagacgcaagcattgtacaggttcatctgtgtctgtccccgctaccatccttgctatgtgccctgccaacacacgggacaaataatcatcgaccgggacgtgttgtcccgcgaggaacacatatgttttctagctacacccaagaaggacttctcctcaccccagttggccaaacaggcgcgctactacaccaaaaagatctacgttaaccaatgtacagcacgggttgaacgacttgccgatcctcacccaatgcgagtgagtgacacatacaatttctttaaggactacctctcgcctcgtcatatagcggctctagagaaccagatgaaacccaaacctccggtagaagccatgtcaatggagaaggcgctggaatacatggaggaggagatgcgtcagcgcaaggcagcgaagcgtgtccaaaagcgacgatgcaagggtctaaaaaaacgaatcattttgcgccagcgcaagcagatgcaaaagataatttgcgtactgttcgaggaaatgaaggactttctactcaacgatcagtttattgttgacgagaactcccctctatgttgcgtaattcttgagagacttcgagaatttacagatcaagaattctatacgacaagtaatttgcaagagtatcagaggatattggccaacaacctaaccgtttgggtcaacaagttcatatcaaacttaaacatttacttgacacctcagcaaatacctgtaaaacgacagatgatggcagagaacgatcccgaacagtttgtgcccttgtcagatttcatttctgtatccgatgaggcggatgcagaggaaatgatgaacgatgtcgagcacggagccgctgaatatgacgactatggatatggggaggactacttgcccgacgttctcaatacggatatatcggaggaaacaataatctaa

SEQ ID NO: 33750 - protein, 384 aa, DROSOPHILA
MPQPKRIQLEGETSVAEAINFLKTQCDTRKEHKPEEFQQDGPTVADELNARLAMVHVRETRAKRIRRLVKFSPNETQALYRFICVCPRYHPCYVPCQHTGQIIIDRDVLSREEHICFLATPKKDFSSPQLAKQARYYTKKIYVNQCTARVERLADPHPMRVSDTYNFFKDYLSPRHIAALENQMKPKPPVEAMSMEKALEYMEEEMRQRKAAKRVQKRRCKGLKKRIILRQRKQMQKIICVLFEEMKDFLLNDQFIVDENSPLCCVILERLREFTDQEFYTTSNLQEYQRILANNLTVWVNKFISNLNIYLTPQQIPVKRQMMAENDPEQFVPLSDFISVSDEADAEEMMNDVEHGAAEYDDYGYGEDYLPDVLNTDISEETII

SEQ ID NO: 33751 - DNA, 3417 bp, DROSOPHILA
gatgcttaagaagaggaaatcgcgtttagagaacgttttgataactatgaagcttaagtgtctggatgcacaaacggcacaggagcaacccattgacttgtcatacctgctgtccggacgcggcgcccggcagcggaagacccagcagtccagtagcagttctacggccaactcaacataaccgatgtaacgcgagtagattaagccgtgtatatacgcctaaagttagaggcattgattaatatttatggaacttcaattaacaattagcatttagccatgtaagatgtaacggtgatagtagtaatcctaaagtgtacattgttatgaacaaacttcgtgaaaggactccggtcccggctaggatggaacagattatgaattatggttaatataaggatttatttaaatactagtgcttacgccaccgcaccaagcccccaatttagatgaatttcttttgtttttaattgtttatattggctctccatattaattttgttttacaaaactatccccctctcgtctttgcaattgaaggcgtttgacttttgcattgttattttaaattattgtattatgttatggctgcttaattatgtaacacccgagtaggacaacttattgcgctattagtttttagttattttccaattgttattaactgctaacaaaaattttaaaagtgaaataaaaaatatatttttattaatcaaagccgaattttaaatgaaccgcctgtttaacacaagtgttggattgcctaactgtcgcgttattcaacactgcttgcatgggcgtagtgaagtttctgattcgggggacttcgaatttaagattatgaatcactttgttcttgtatcgcaaaaattcatttgcttagagtttttctgcatttttttttgggattaaaataataatccccccttaaatgtgtttgcttacgcccatgactatgcaaacagatgttcagtgaagttgaattggattgaattgaatcggccatgctgtgtaatatatttaaacgctcgcttcaagcgaatataaggaatgtgaataacttaaatgtgctgcggttgagcagttccagtggtccccgaggagagatccaggacgcactggacatagaggccaatctattcgggaattcagatttaaggcatgagccgatgaacacgagggaagctttacgcaagaatcgatttgccggtagaaaaccaaaggtgccatttgcctcagttgcatctcgcaacctctcagctccatctaatcctgcaccacgagtggctccaactcccgctccagtaattaaggacaatgagctgaatctggagtttgtgcgtctcactctgcaggatccacttaccagcaccctactaaccacagtgcgctcccgcaagcgccgtgataagaaccggcagatcatcgtcgaaggccgtcgtctcatccaggaagccctgcaatgtggtctcaaaatggaagtactcctcttctcccagaaagatcagttggctctggtcaaggaggaagtaggcgtggcacaggtggagacgggtaccaagatttacaaagtgccgcagcacgacctaaagacgtggtcatcgctggtaactcctcccggtctgatggctatcttcgacaggccgtcggacaaaggcttggagaaaaacctggcggagcaacagcgtctgggctctcagccctttcccattacagttgtgtgcgacaacatcagggagcccaacaatctgggcagcattataaggacctgcgccgcgctgccctgcagtcaggtggtggtcacccacggctgctgtgatccctgggaatcgaaggccctgagaggaggctgtggcggtcagtttagagttccaattcgggatgatgtaacttgggatgagctcgcgctaaccattccgccagaggcggccgacgactgtcatgttttcattgccgagaccaaccaaaggaagcgggagaacaaccagaccattgactatgcagatatcaagggtcttggagcccataacttgctcattattggcggagagagtcacggagtcagtgaggaagcttaccggtaaggggggaaacgaataagttataaaatggaatgctaattatgtttttatattgtcagtttcttaaacttggttggaggtaagggaaagtgcatctacatcccgctggcagctggcatcgatagcttgaatgtggcatctgctctgacgctgttgctttttgaactgcgccgaaaactcattcatcaggcatcagaaaaagaataagtttggaatagcaaccgatataattaaatgtattttctttaattgttaatttctatgacaaagtgtataaatcgcagttaaatcccatcaataaacttgagtatatttgttatgatcctttcgaaaatacaattttcatcttgtgtcaggcataatataaatttattgctaggctgtttcacaaatatagtaattaataattacatttaattcaactattagcttcgatttccttgtaaacctcgcgcttatactcgtccagaccaccttcgatcgctctgactgtgcgattgccacacacccagagttccttgcagacgaccttaatgaggcgttcgtcgtgggaaaccaggattacgccgccctaagaaagacagtacacatgtatttcatggtgtaaatttccactaaagtccactttaccttaaaggcatttatggctcggcccaaagcatcaatggtttcaatgtccaagtgattagtcggctcatcgagcaccaggaaatttggctccgctataaaataaatatattatgttgatgttaatgttattgaaagaagatggatagtcactatcttacccatgcacatctttgctaaggccactcgtgatttttgtcctccagataaactggcaatgctctgcagtgccagtggtccggatatgccgaagctgcccaactgccggcgatactcttcgtccgggcgaccaggaaacagttctgccaaaactcccacacacgttacattcatattcagatggtccacatggtgctgcgcaaaatatccaattcgaagaccgcgatgcaggacaatgtttccgtgaatagtgctcagttgaccgacaataatcttcagcagcgtcgactttcccgctccgttttctccgacaatgcaaattcgagagtccgatgtggctgagagattgacgcccttgaagatgggcagtggatcttctggattgtaacggaaagtaacctccgaaatggccagcacgggaggattaaggggttccacttcggggaatttgagcgtgaccacagtctccttttccactggctttagttccggcctgcaaagcgaacgtagatgttttaaatttcttccagtcattattttaatttatatt

SEQ ID NO: 33752 - DNA, 1357 bp, DROSOPHILA
ggccatgctgtgtaatatatttaaacgctcgcttcaagcgaatataaggaatgtgaataacttaaatgtgctgcggttgagcagttccagtggtccccgaggagagatccaggacgcactggacatagaggccaatctattcgggaattcagatttaaggcatgagccgatgaacacgagggaagctttacgcaagaatcgatttgccggtagaaaaccaaaggtgccatttgcctcagttgcatctcgcaacctctcagctccatctaatcctgcaccacgagtggctccaactcccgctccagtaattaaggacaatgagctgaatctggagtttgtgcgtctcactctgcaggatccacttaccagcaccctactaaccacagtgcgctcccgcaagcgccgtgataagaaccggcagatcatcgtcgaaggccgtcgtctcatccaggaagccctgcaatgtggtctcaaaatggaagtactcctcttctcccagaaagatcagttggctctggtcaaggaggaagtaggcgtggcacaggtggagacgggtaccaagatttacaaagtgccgcagcacgacctaaagacgtggtcatcgctggtaactcctcccggtctgatggctatcttcgacaggccgtcggacaaaggcttggagaaaaacctggcggagcaacagcgtctgggctctcagccctttcccattacagttgtgtgcgacaacatcagggagcccaacaatctgggcagcattataaggacctgcgccgcgctgccctgcagtcaggtggtggtcacccacggctgctgtgatccctgggaatcgaaggccctgagaggaggctgtggcggtcagtttagagttccaattcgggatgatgtaacttgggatgagctcgcgctaaccattccgccagaggcggccgacgactgtcatgttttcattgccgagaccaaccaaaggaagcgggagaacaaccagaccattgactatgcagatatcaagggtcttggagcccataacttgctcattattggcggagagagtcacggagtcagtgaggaagcttaccgtttcttaaacttggttggaggtaagggaaagtgcatctacatcccgctggcagctggcatcgatagcttgaatgtggcatctgctctgacgctgttgctttttgaactgcgccgaaaactcattcatcaggcatcagaaaaagaataagtttggaatagcaaccgatataattaaatgtattttctttaattgttaatttctatgacaaagtgtataaatcgcagttaaatcccatcaataaacttgagtatatttgttatgatcctttcgaaaata

SEQ ID NO: 33753 - protein, 407 aa, DROSOPHILA
MLCNIFKRSLQANIRNVNNLNVLRLSSSSGPRGEIQDALDIEANLFGNSDLRHEPMNTREALRKNRFAGRKPKVPFASVASRNLSAPSNPAPRVAPTPAPVIKDNELNLEFVRLTLQDPLTSTLLTTVRSRKRRDKNRQIIVEGRRLIQEALQCGLKMEVLLFSQKDQLALVKEEVGVAQVETGTKIYKVPQHDLKTWSSLVTPPGLMAIFDRPSDKGLEKNLAEQQRLGSQPFPITVVCDNIREPNNLGSIIRTCAALPCSQVVVTHGCCDPWESKALRGGCGGQFRVPIRDDVTWDELALTIPPEAADDCHVFIAETNQRKRENNQTIDYADIKGLGAHNLLIIGGESHGVSEEAYRFLNLVGGKGKCIYIPLAAGIDSLNVASALTLLLFELRRKLIHQASEKE

SEQ ID NO: 33754 - DNA, 3299 bp, DROSOPHILA
atttaaattgttgtcacgtactaagttcttaataggttacgttatgtgtttatttaactcattttgattagaagtcgagaaaaatacggcagagccacacgcgcaccgcatactcgtcgctcgattcccgttacaaagttcaactttaactcttgcgcctttgttattaaagccactcgactttcggttagctggggtggccaaaacagcaaacagcccacatccgctaatgcataaaatcccccacacagatgttcggctctcccgaactaattgtttactcaagtgtaattaggtaagaggaatagaaaataggcaaatatcaacagaaaggtaaatacatacgtgctcacaattaaataatttctatatcattatttagttcagcattaattaggagttaaatttttcatacgttcacatgtatgtacataacaacatggaaagttgtttaggtgacttgcaaaagtatattgtcttcattctttgaatccgacgattaactgcgtgccttaaagaacttttaactaaacgatagagaacattattgtcctcttgtccgactctttgataccagttacttagctcaacgaccaagaagtttctacttcttagcagttccagctaactgtttatagctcctaagatttcgatgattatacggacaacaaacagacggacattgagagactgcacttatactttatagggtcggaaatcaatcttgtatcaaccttgaacagactagacttaccatatagctaaatcttgcaaaatctgtctttaaggatacaatgcaaattggagttcgttatttattagttgatggtcaacagagaattttgaattaaatttctaaacgcttaacacacaaattttgctatatgaaacttgagattttgtcctaaaatagccccaaaaatgggttccgaaaggttggcccgcgcctagatcgacgtccttggatgttggcgactttgtagtaaacctggcaacatgattagtgcttaggcatgttcatcttaaacggcttcttcaggtctgcggcaatctttttttggatggccggcggaatgttcttggccacccccggctgagagctgaggaaggagatttcgaagagcgagggccggctggagtagacattgtgtaacatgctgatgaaccagaagagcaggtcgtccatgttctcgagcgtgcactgggcgaagacggctcccgcatcccggccgtgttggtgggagtcgaagagggcgacgatcgaggctcggaaatcgaaggttaccatcaccgttcgactgtccgctatgatggcggcgaagaggttagtgggtacattgtttcgcacgctggcgtgctggaacatctggagtgttatctggaaaacccgcgacaactgcacagcaacgttccggttgtacatgggattgctgggatcggcctccatgtgcgtgtaaaaccactcctccagccggaagttcatcttgtgctgcgaccgaatggcggcgatagcatccggaatgttgaggttgagattcctggcgtgcggcgtattagttgtaatcacattgtggtacacgctgtttccgtcgttaatggcgttgccgaagagctcccatccccgcagcggcagatcggagaccctgtgatagaatctgtccgccttggccaccttgtcggccagtattagggaaatgatggtgcaggagttggtgccgctccgctggaactccccgaatcgcgactgacagaagtcgcgcggaaaccaccagatgttcaggttgtcgatctgctcgtgaatggccatggcgccgggtttttgatcgcccggggatcggttgttggtcctcggatcctgtgttcagcgacgtcttaatcttaggttgcgtttccggatcctggtgctccggagacgcagtggtaaacccggccctggcgctgtttccgtagtgccactgtcacatagttcgcaagtgcaatgacccctaggcttcaaggcgcacgtgtgggtatagagttggtggtttatgtggggatctagtgatcgaacccgtcaacagcactatgtcctcggattcgggatcgagctcaggattgccgcaactcctctccactccactacgctctaagcacgggctttggatttcaagtaaacatcgaattttgagtgtcttttgccggaggagcgttcgacgggtaaaggtgaaaactttcgagtcggaaagacaaaaatttctagaccaacaactgacaaataacgaacatgatgtgagatttcagacctacggggatctgattatgaaaatgagagcccatttgacgcaatttgaaaaggtattgctacgttcttataggtccttgaatatagtatttccattttacatttaaagtaattgtaatagttgaaactatatgattattccaacaaattttaaggtgttctagctctatgtgagcattacaccttactatgctaaaggagtacattcagagtttttcaattagcttagttaaaaactcatcaatgaaattgaaatggtttttagattttgtctacttcagcgcaacagctatttacatccatgataccgacttaagtattttttaacttaaataggttgtttatagaccaatctatatacgtattaaacaagaagatctgctaatctagattctaggaaagacgatttccgccttagccacacataaatgtattcaaatgccattcttggaaacgcgtttcgcattgtgtcaaaatggtgcgcaaatatttatcagtggcgcccaaatttagctagcccagccaagtagttctaattttaaattgcaacattgaagaatatacagcttaaaaaacaaaaacaaatatggtttgcgaagtgtgtcgaaaatgcaaatttatggctggctgcttgagcattttgttgattgagattggggtgctctaaagattacccgcgtctaagtggctacactttgaattcctcgtgaatatttgtttgaaattatcaggaaaatttgtgaattcctaaggttttcctaagtctcttatcatgtcttaaggattggttttgcttttaattaaactcagcttatggcttttcaaagcaattcgatattaatcaattttatgttctattgctggaaatttaatgtgctccacagttaaccgatgtcccagtcgtttgtggcaacttttttttaaattaactataatcaaatagttgccctacattccgttatatactggctttcgcatttcttttattcttttaattaaacttacacgtgagcctgtt

SEQ ID NO: 33755 - DNA, 1299 bp, DROSOPHILA
taatcagatccccgtaggtctgaaatctcacatcatgttcgttatttgtcagttgttggtctagaaatttttgtctttccgactcgaaagttttcacctttacccgtcgaacgctcctccggcaaaagacactcaaaattcgatgtttacttgaaatccaaagcccgtgcttagagcgtagtggagtggagaggagttgcggcaatcctgagctcgatcccgaatccgaggacatagtgctgttgacgggttcgatcactagatccccacataaaccaccaactctatacccacacgtgcgccttgaagcctaggggtcattgcacttgcgaactatgtgacagtggcactacggaaacagcgccagggccgggtttaccactgcgtctccggagcaccaggatccggaaacgcaacctaagattaagacgtcgctgaacacaggatccgaggaccaacaaccgatccccgggcgatcaaaaacccggcgccatggccattcacgagcagatcgacaacctgaacatctggtggtttccgcgcgacttctgtcagtcgcgattcggggagttccagcggagcggcaccaactcctgcaccatcatttccctaatactggccgacaaggtggccaaggcggacagattctatcacagggtctccgatctgccgctgcggggatgggagctcttcggcaacgccattaacgacggaaacagcgtgtaccacaatgtgattacaactaatacgccgcacgccaggaatctcaacctcaacattccggatgctatcgccgccattcggtcgcagcacaagatgaacttccggctggaggagtggttttacacgcacatggaggccgatcccagcaatcccatgtacaaccggaacgttgctgtgcagttgtcgcgggttttccagataacactccagatgttccagcacgccagcgtgcgaaacaatgtacccactaacctcttcgccgccatcatagcggacagtcgaacggtgatggtaaccttcgatttccgagcctcgatcgtcgccctcttcgactcccaccaacacggccgggatgcgggagccgtcttcgcccagtgcacgctcgagaacatggacgacctgctcttctggttcatcagcatgttacacaatgtctactccagccggccctcgctcttcgaaatctccttcctcagctctcagccgggggtggccaagaacattccgccggccatccaaaaaaagattgccgcagacctgaagaagccgtttaagatgaacatgcctaagcactaa

SEQ ID NO: 33756 - protein, 268 aa, DROSOPHILA
MAIHEQIDNLNIWWFPRDFCQSRFGEFQRSGTNSCTIISLILADKVAKADRFYHRVSDLPLRGWELFGNAINDGNSVYHNVITTNTPHARNLNLNIPDAIAAIRSQHKMNFRLEEWFYTHMEADPSNPMYNRNVAVQLSRVFQITLQMFQHASVRNNVPTNLFAAIIADSRTVMVTFDFRASIVALFDSHQHGRDAGAVFAQCTLENMDDLLFWFISMLHNVYSSRPSLFEISFLSSQPGVAKNIPPAIQKKIAADLKKPFKMNMPKH

SEQ ID NO: 33757 - DNA, 2470 bp, DROSOPHILA
aagtgcaaataatctagaaaatataggtagaggtcgtcgtggaatgcgaactagttgaattgaacgtttataatcatcactaggtgttccccaatgttctcatccactcccaccaggattattacgccctgtaaccactgaacattcgcttagcgcctgctctaggctaattttacatttccggaaacataaagattacgttgtcaggcgaataatttacatataataggttcacatttaatgaactattcagttttcctggcaaaatgcacaatcacaacactttcacatttcattgtacgtgtatgtacatatgtgcacacacggctgctttgcgtttgtgcgtataggtgcgggcttaggtcagccagcatgagccattcgctggtctccggttacgcccttctttgagccaccacaactcctggttagaagaggcgccttcagatacgtaattagaacacaatttacctgttccggagaatccttttctcgtcttaatcatgcaaggggacgggagattttacacgttgtgaggaacggggatgccggactgtcaaaatgcaatgcacacagctgacgcgctatcgatagcgatatcaaccgatagcagtaattccaatccaattgcatttaatttaaacatgaaagaaaataagaaaaagtcgcgcaaaacggccaataagacaaatgaaacgtcagagggtcagaaaaagaagatcattgaactgctgcacgagtacaacgacctaaaggatgccacccagcgcgtcctggaagccttggccaacctaaaatgcgtacccgtcggatcggtttacgctacatacaacctgccccgcgacgaataaagtttgtgctttttagactgttatatttatgtacttgttgtaaacaacttgtaatacaacggagtgcatgtaaatgccttctggcttggcagttccatgagacttctgctaataaatccacctaaaactagtcattgcatttgttccacctattggccagcatgaaaataggaccggcatcgttcattgaaggtcttgtaggaacgatctttaatgatgtcctcgacattgagctcggcctggagaacccgcagctggaaaggatcataggcatcagttaagagtaagacttaggtatttcggttaccttgcgctgctccgccctaaactggttatccgtatccacatcatccggctgggtctcccgcttttcccttagcttcttcagattactagccgaaattgttatgcaactgcgtatgctttcttgctgcaaggagaagctatctgtcaagatccccgtgtgttgtacttaatcaggatttaccctggccaagtgtgactcctggagcttcgcgtacagatcgcgacaggtgctttcactgttcacttgacccttaaacgactccgttggcagggcatttagtgcatatataatcttgtcgtccacatctcgcatcttcttcagtgcctcctgtttggaaacttaaagccatttagtatgccggctactaacccaaacaacaatattccaacccccacctggaagccgagaaagtctaagcacaatgccgccatttaaaccaggtaggaaaacaagaaaacactttaaaaaataataaaaacaaaatgatatatgtaaaattgccggcgcaatgtgcctctaatcggggttgccacctgggcggtgcaatcgattagcacgattatggacaatcgatgtggatgataaagactagttgaacaaaacaaaacaaaatagcaaaataattcaagatgccgctaaaattcgatgatattcacgagaaaattgaaaccggcgtctaccaattggctgttaatgacaaaagcacacggagcactgtgtggcgggtgtatcgcaagatcaagaaggacgatggtagctttctggagcacgtactgttctgcatcggctgcaggagcattatgtccttcacccacaaatccacaacgaacctgaggcgtcaccggtgtcacctgcagtatctcaagaaacaggcattctgctgctacaattccaagggcgaatccaacgacagaaaggaggagacggaccaggagcatcatgaggaacatgatgaccaacaatccatgtcggatgagttggaaacaaaaccctctcctgccgatgttgccgcctttgtgggggaagcggtcagcggcggagattccactgcagcttcagcccgtattccggacattcccgagatcgcgctaccactcgacgcaagtggggtcgaggagtccaatgtttatgcacagacctggtcccttgagtaccgcaaactcagcgaggaccaaaaattctatgccaaaaaagctatagacgaaatcttcgtattgggcaggctacgacgccttactctgaatacggttccaacggcggagtagaatagttaatcaggattaagtaggacttaatttaagctaatatacat

SEQ ID NO: 33758 - DNA, 360 bp, DROSOPHILA
atgcgagatgtggacgacaagattatatatgcactaaatgccctgccaacggagtcgtttaagggtcaagtgaacagtgaaagcacctgtcgcgatctgtacgcgaagctccaggagtcacacttggccaggcaagaaagcatacgcagttgcataacaatttcggctagtaatctgaagaagctaagggaaaagcgggagacccagccggatgatgtggatacggataaccagtttagggcggagcagcgcaagctgcgggttctccaggccgagctcaatgtcgaggacatcattaaagatcgttcctacaagaccttcaatgaacgatgccggtcctattttcatgctggccaatag

SEQ ID NO: 33759 - protein, 119 aa, DROSOPHILA
MRDVDDKIIYALNALPTESFKGQVNSESTCRDLYAKLQESHLARQESIRSCITISASNLKKLREKRETQPDDVDTDNQFRAEQRKLRVLQAELNVEDIIKDRSYKTFNERCRSYFHAGQ

SEQ ID NO: 33760 - DNA, 3423 bp, DROSOPHILA
atcgaggatcattccaaccagaccatagcccgaggcattcaagtagatgtcaccccagtcgtatggttcagctgtggattgccttgacaataagctttagttgaatgtatttaattacctacatgtgtccacctgaatggtgcagttgtacaactcgcagaaaatgagcattagttgaatatctgttccatcaatggttacatccgtcgtgttcataaaacgatcataatataatggtggcttttcctaactcacataactggaattactgcgatatattctggtagcgaaaacttattaaaactcacataatccaatagcataaaaggcttgtagtcgaagatgcctatgactacctcgcgtcccttgaggtttcgcatcttgctggacattgcactctgggtttcccaagtagctttcgtacccttggcatcgaaacgctggagtatgtaaaactcaacaggctccgggtttttgttaaagtttcgcggaccgacaaatcggttcgttttaatttcaaaagtgcttgagttcaggtattgtgaagtaattaccaagatgttaggttgatctagcaattcaaatggtgagcatgtgtaattatttcaattcactgcacttatcctaccttggaatatataaccggacagataactatcttttttgtcctcaaactctttagtgtaaacgaacataaaacgatttcgcagagatctccaaatggagtagatgctggcgtgataaaaatatctggcgaattcgggaatctgctcctgaaatgctatgaaggtcttacatacaaaagtaaaataattaaatttattaattacaaatttaaaaaaaaaagggaataaccaaaaagtcttcaaacttaaaatttaacatcagctgctccgttatgttatcgatagcagatttattacgatataagccgcataaaaacgggaaatatcgtattatcaacttggaaacagttgaactgcaaaatagtttcaggacaatggacaaactgggattaggctgccccttctccttcctggtcggaagaccgcagagtatgagtgggggacccggtttcctggatctcaactacgactgctaccatcagatattttcatatataaatgtgctggaggaccagctaaatctgggccgggcccatccactattccaggttgtactgacggacattttgcgaacgcgccacaaaaaaatcaatgtgcggcttctgaaaaccattccggactgggagttcctgctgcagctgtgcggttccgaagtgtccaggtgcgaagtgccccatggtagctgggatgagccgtttacctacccctttctggggctcctgggacggcactgccccaaactgcgacaggcagtcatcatatttatgcacgccgttacagagtcgccgccgaaaagtggggacaggggccacatcatgcagctcctcctggagctacccagtctaaccaatctcactctgatcgatgccagatctgcacagcgtgagtacgaaaaccacgagcgcttcatattaattgtttcataccactcacacttttatcgtttaactctggtcaatattttaacttgaaaaagatattgcttaatctaaaattactttagattattttccctaaacttcattcgagtcggtgaatagaatcctttttataagcttaatatatatctgaattactattgcagtagatcaattgcggcacttcagtaaactggaggccttggacttggatggaatcgacccaaacctcagcaacgcctccttccaacaaatgtttgaaagtatggcttccctgaagcgactgcttctcaatttcggaccggatcgcaggagatctcaccaggtcccgttgttggcagataagtttcccaacttggatcaccttactctcgaaaactttgatatgagcttcccggagttgggtgaatttaaaggtctccgatccctgcgcctaatctcacgttggacagcagaagtggacaacgacttttataggtcggtggccaaaagagttagtaacctccaaaagctacagctcatatccgtccgcgttagaggtgaccaagtgcatcacatcctggcgattaggcaactcaacgctctggactgtgataactggccagctcaatcggtgtcccagttgggccagttgaaagatctcgagtgcctggccctggattgcattgactcacctgcaaacccaagtcgccaacttatgttgctagtacaaaattgctataacctaaatcatctgagattgggaaaacattggaagatgcctatcgaggatgtaaatcaatttttggacaatgtggctgatgcaggagcggatcggaaagaccggcttttgctaacgctcgatttcattaagacaccggatactcggaaaaaggtataatttaatggatacacaattatttggaacaaccaaaatttaccaaaaacccttcagttcacagataagttcaggaatgataaacacttgcaagtgagttttgatggagccacatgtcatcactgtcagcgggatacctactctaagtgtgatactatctttgactagttttactttagcaaaagactcacctcacagtgcgacctttcgatggcaacagtcagtctaagagtccaatcgttgtaggggattcccttcccctcgaactcatcctcctttattttgtaatcataaacatcttgatcggaacgattggcccatctgtgccagtccatgattattaatggcattggatgaaccgtttccagacgaaaatcaaacgccgggtgccaaaaaatacaagtggcatgcgagtccgcgaagaactgctgagctaactatattttttaaaaggttgtccatgctgaacaaaaggacaacataccaaaaaaactaagcacagtgctaaagtaatatgactctaccagcaagttttccatttcacagattttttcccttgaagtgtgcctgaggaatttatattattttctgtgtgtattattattatacatatacattctgtttttgtatatatatatatagtgcttggtagctcaccctgtgatgcacccgactaacaaaactccgccgacgcaaaatgaccgacgcgaatggaagaatatttcattttatataaggaaaaagattgcatacgctactaatacgttttccatgaattatgtacatatttaacaaattaggagcatgcaccggtaaccaataaaaggccttgtaaatctgttaaaatatttattgttataaatacgtttaacaagtacggtaaataataaacaaataaaatgtccatattaaataattttaaaattacaatctaagcataaccgggcgtggaaaacagaggaatagcgtaattataaagacctaggcatttgtaattcttttg

SEQ ID NO: 33761 - DNA, 1221 bp, DROSOPHILA
atggacaaactgggattaggctgccccttctccttcctggtcggaagaccgcagagtatgagtgggggacccggtttcctggatctcaactacgactgctaccatcagatattttcatatataaatgtgctggaggaccagctaaatctgggccgggcccatccactattccaggttgtactgacggacattttgcgaacgcgccacaaaaaaatcaatgtgcggcttctgaaaaccattccggactgggagttcctgctgcagctgtgcggttccgaagtgtccaggtgcgaagtgccccatggtagctgggatgagccgtttacctacccctttctggggctcctgggacggcactgccccaaactgcgacaggcagtcatcatatttatgcacgccgttacagagtcgccgccgaaaagtggggacaggggccacatcatgcagctcctcctggagctacccagtctaaccaatctcactctgatcgatgccagatctgcacagctagatcaattgcggcacttcagtaaactggaggccttggacttggatggaatcgacccaaacctcagcaacgcctccttccaacaaatgtttgaaagtatggcttccctgaagcgactgcttctcaatttcggaccggatcgcaggagatctcaccaggtcccgttgttggcagataagtttcccaacttggatcaccttactctcgaaaactttgatatgagcttcccggagttgggtgaatttaaaggtctccgatccctgcgcctaatctcacgttggacagcagaagtggacaacgacttttataggtcggtggccaaaagagttagtaacctccaaaagctacagctcatatccgtccgcgttagaggtgaccaagtgcatcacatcctggcgattaggcaactcaacgctctggactgtgataactggccagctcaatcggtgtcccagttgggccagttgaaagatctcgagtgcctggccctggattgcattgactcacctgcaaacccaagtcgccaacttatgttgctagtacaaaattgctataacctaaatcatctgagattgggaaaacattggaagatgcctatcgaggatgtaaatcaatttttggacaatgtggctgatgcaggagcggatcggaaagaccggcttttgctaacgctcgatttcattaagacaccggatactcggaaaaaggtataa

SEQ ID NO: 33762 - protein, 406 aa, DROSOPHILA
MDKLGLGCPFSFLVGRPQSMSGGPGFLDLNYDCYHQIFSYINVLEDQLNLGRAHPLFQVVLTDILRTRHKKINVRLLKTIPDWEFLLQLCGSEVSRCEVPHGSWDEPFTYPFLGLLGRHCPKLRQAVIIFMHAVTESPPKSGDRGHIMQLLLELPSLTNLTLIDARSAQLDQLRHFSKLEALDLDGIDPNLSNASFQQMFESMASLKRLLLNFGPDRRRSHQVPLLADKFPNLDHLTLENFDMSFPELGEFKGLRSLRLISRWTAEVDNDFYRSVAKRVSNLQKLQLISVRVRGDQVHHILAIRQLNALDCDNWPAQSVSQLGQLKDLECLALDCIDSPANPSRQLMLLVQNCYNLNHLRLGKHWKMPIEDVNQFLDNVADAGADRKDRLLLTLDFIKTPDTRKKV

SEQ ID NO: 33763 - DNA, 4002 bp, DROSOPHILA
caacctaaaatgcgtacccgtcggatcggtttacgctacatacaacctgccccgcgacgaataaagtttgtgctttttagactgttatatttatgtacttgttgtaaacaacttgtaatacaacggagtgcatgtaaatgccttctggcttggcagttccatgagacttctgctaataaatccacctaaaactagtcattgcatttgttccacctattggccagcatgaaaataggaccggcatcgttcattgaaggtcttgtaggaacgatctttaatgatgtcctcgacattgagctcggcctggagaacccgcagctggaaaggatcataggcatcagttaagagtaagacttaggtatttcggttaccttgcgctgctccgccctaaactggttatccgtatccacatcatccggctgggtctcccgcttttcccttagcttcttcagattactagccgaaattgttatgcaactgcgtatgctttcttgctgcaaggagaagctatctgtcaagatccccgtgtgttgtacttaatcaggatttaccctggccaagtgtgactcctggagcttcgcgtacagatcgcgacaggtgctttcactgttcacttgacccttaaacgactccgttggcagggcatttagtgcatatataatcttgtcgtccacatctcgcatcttcttcagtgcctcctgtttggaaacttaaagccatttagtatgccggctactaacccaaacaacaatattccaacccccacctggaagccgagaaagtctaagcacaatgccgccatttaaaccaggtaggaaaacaagaaaacactttaaaaaataataaaaacaaaatgatatatgtaaaattgccggcgcaatgtgcctctaatcggggttgccacctgggcggtgcaatcgattagcacgattatggacaatcgatgtggatgataaagactagttgaacaaaacaaaacaaaatagcaaaataattcaagatgccgctaaaattcgatgatattcacgagaaaattgaaaccggcgtctaccaattggctgttaatgacaaaagcacacggagcactgtgtggcgggtgtatcgcaagatcaagaaggacgatggtagctttctggagcacgtactgttctgcatcggctgcaggagcattatgtccttcacccacaaatccacaacgaacctgaggcgtcaccggtgtcacctgcagtatctcaagaaacaggcattctgctgctacaattccaagggcgaatccaacgacagaaaggaggagacggaccaggagcatcatgaggaacatgatgaccaacaatccatgtcggatgagttggaaacaaaaccctctcctgccgatgttgccgcctttgtgggggaagcggtcagcggcggagattccactgcagcttcagcccgtattccggacattcccgagatcgcgctaccactcgacgcaagtggggtcgaggagtccaatgtttatgcacagacctggtcccttgagtaccgcaaactcagcgaggaccaaaaattctatgccaaaaaagctatagacgaaatcttcgtattgggcaggctacgacgccttactctgaatacggttccaacggcggagtagaatagttaatcaggattaagtaggacttaatttaagctaatatacatactctgtacatattgtgtttaatctttaaagtcgtatccctaagtctgggatatatcggaataaactatttgataaattgattctttcatatttcctttaaatttataatcaattttgattttacaatgttggaaattattggatgttttgcgatatatttttattccttcggcattttttataggaacaatcgatacagtttttggatatcgatatattgttttgagcttctcagcattttttatattcttcttactattcaattgaaagcagttctaattgtaataacaatgagtaatctggcgagacgaccactgcatggtaacgaacctggggctctttcccagtcaaaggacgatgtggaccaggaccactcctacaataggcagccggtacaaagctacgaggaagggacatcttcggccgacgaactggaagaaagtgaatcccatgacgaacccagtattcccaaacccaccgatcagtccagaagacgcagtatttcaacttctaggccgagttcaaggcaggagcagcacaattctatcaatgaacatcacaacggcatcggtattaaactagcgcttgccggtgttctatttggtttattggttgtctatgggtacggatccagcattatagaggagaaacagtgtgactttaaggatctcaggacaaagtatccccagcagcaggaaaaagtatggagagccctgcaaaaggggatcgaggggctgattaacaaaaaggacaagcaccccagtgtatttttgttcctgcaccaggatccaaagctggagaaactgatcgatgaaattgccattgaggcttcaatgtgctttggtaagaaaagcgcaatattcatttaaaatttctaatgtaacccactatgcgctcgccatttgaacaggtggtccccgaaagctgattcacatgaagaaggagcacatgaaggaatacggtttggcgattgaacaattcaaatcaaaaatcaacgatggaaaggtttttttaatagtgaacctaaatgaagtgattaccctgaattctttcgttctgcaatattctgaaagctttcttattacagattgcgccgaatggagctcgagccctgcacacaatctgcgatacctacagccctctggtggaggatgcagtcatcttcctctcccttcgaacattcaacacaaccgccgtgaacaactccgtcaatctagccacggatactctgtacgatctgtgggaccaggagttgggggaccacgagctggatcctttaattactcgagttactgatcaggtgctccatttgagttaaactgaaagacactattcaaaatctttttacaaagcttataaagcaataaataaagagaattttgttggctctcgatgataaatatataagttaacaagtaacatcaggaaaagctgcgtgtgacgacgaacgacacacgaagctatacttcggatgctggtcggcggccgtgatttgtgcgagatagggtaatctttctttgtattacttagttctgaactgacagccgaaataaagtgatgttatcgtaagatacctgccgtgaatatcaagtcggagctacgaccctgctaccggcttattccagttggtcacttcagctatagtcaccgatcgtggccaccacctggtcctgatccgcactctgtaccacaccacagctacagaggcgacaacgaggtgactgtgttgtgggcagcaactcgccgcaacacactttagctactacgtgagcagcaacgtgccacgttgacatccccttgcaacaacggtgcaggcggaggatttcgcgggcaactaccttgccgcgtccatctttaaatcatatcttatatgtaaatatacttccatgtttcagtttagttttgatattgtagatgtatatagaaaataaaaacaattaaactacccctgtcccctccagagttctccgagaaatgtcagaaggctacaaatcatgccgaagcaccaaagcaggattaggccaataaaattatcaatgccaagtttaacaggtcctatatctaggttcgttttctcagatgccacgatgcgattttggcggtgcgcattcatgtattcggcggcgatcttccattcccagaatttgtcaaagcccgaggaatgccaagccagaatgaagtcgttgtaggcatttaagtgcggccacagtcgcggcacaaacgccaccgtaaatgcaaagtaaatatcatccaccataagtttcagccgctttagggcatcgttttctattagctcggtgttgcccaaatgaccaaac

SEQ ID NO: 33764 - DNA, 1404 bp, DROSOPHILA
atgccgctaaaattcgatgatattcacgagaaaattgaaaccggcgtctaccaattggctgttaatgacaaaagcacacggagcactgtgtggcgggtgtatcgcaagatcaagaaggacgatggtagctttctggagcacgtactgttctgcatcggctgcaggagcattatgtccttcacccacaaatccacaacgaacctgaggcgtcaccggtgtcacctgcagtatctcaagaaacaggcattctgctgctacaattccaagggcgaatccaacgacagaaaggaggagacggaccaggagcatcatgaggaacatgatgaccaacaatccatgtcggatgagttggaaacaaaaccctctcctgccgatgttgccgcctttgtgggggaagcggtcagcggcggagattccactgcagcttcagcccgtattccggacattcccgagatcgcgctaccactcgacgcaagtggggtcgaggagtccaatgtttatgcacagacctggtcccttgagtaccgcaaactcagcgaggaccaaaaattctatgccaaaaaagctatagacgaaatcttctcaaaggacgatgtggaccaggaccactcctacaataggcagccggtacaaagctacgaggaagggacatcttcggccgacgaactggaagaaagtgaatcccatgacgaacccagtattcccaaacccaccgatcagtccagaagacgcagtatttcaacttctaggccgagttcaaggcaggagcagcacaattctatcaatgaacatcacaacggcatcggtattaaactagcgcttgccggtgttctatttggtttattggttgtctatgggtacggatccagcattatagaggagaaacagtgtgactttaaggatctcaggacaaagtatccccagcagcaggaaaaagtatggagagccctgcaaaaggggatcgaggggctgattaacaaaaaggacaagcaccccagtgtatttttgttcctgcaccaggatccaaagctggagaaactgatcgatgaaattgccattgaggcttcaatgtgctttggtggtccccgaaagctgattcacatgaagaaggagcacatgaaggaatacggtttggcgattgaacaattcaaatcaaaaatcaacgatggaaagattgcgccgaatggagctcgagccctgcacacaatctgcgatacctacagccctctggtggaggatgcagtcatcttcctctcccttcgaacattcaacacaaccgccgtgaacaactccgtcaatctagccacggatactctgtacgatctgtgggaccaggagttgggggaccacgagctggatcctttaattactcgagttactgatcaggtgctccatttgagttaa

SEQ ID NO: 33765 - protein, 467 aa, DROSOPHILA
MPLKFDDIHEKIETGVYQLAVNDKSTRSTVWRVYRKIKKDDGSFLEHVLFCIGCRSIMSFTHKSTTNLRRHRCHLQYLKKQAFCCYNSKGESNDRKEETDQEHHEEHDDQQSMSDELETKPSPADVAAFVGEAVSGGDSTAASARIPDIPEIALPLDASGVEESNVYAQTWSLEYRKLSEDQKFYAKKAIDEIFSKDDVDQDHSYNRQPVQSYEEGTSSADELEESESHDEPSIPKPTDQSRRRSISTSRPSSRQEQHNSINEHHNGIGIKLALAGVLFGLLVVYGYGSSIIEEKQCDFKDLRTKYPQQQEKVWRALQKGIEGLINKKDKHPSVFLFLHQDPKLEKLIDEIAIEASMCFGGPRKLIHMKKEHMKEYGLAIEQFKSKINDGKIAPNGARALHTICDTYSPLVEDAVIFLSLRTFNTTAVNNSVNLATDTLYDLWDQELGDHELDPLITRVTDQVLHLS

SEQ ID NO: 33766 - DNA, 2207 bp, DROSOPHILA
aaaatatacctgctgttcgttatcggtgttgctctccactccggctgatgttgaggatgtagccggctcaagaaccacattgcgtcgcttaaagagctgctgttcgcgtttgttttttcgcaactggatgcccacctcctcgcgacgacgacgcatctctgtggagtccaaggcggcatttttataacgctgtttgtggctggcagacatttcgtcgtcttggcaattcaaaagcttgaaatagttaaaaaaaatatttctttgagaacagaataatttaagtcgtaaagacaggtttcagataaaaagtgagtgcgacttgattttcgccgctactgtgatcaaatgctaaacgaaagtgcaaataatctagaaaatataggtagaggtcgtcgtggaatgcgaactagttgaattgaacgtttataatcatcactaggtgttccccaatgttctcatccactcccaccaggattattacgccctgtaaccactgaacattcgcttagcgcctgctctaggctaattttacatttccggaaacataaagattacgttgtcaggcgaataatttacatataataggttcacatttaatgaactattcagttttcctggcaaaatgcacaatcacaacactttcacatttcattgtacgtgtatgtacatatgtgcacacacggctgctttgcgtttgtgcgtataggtgcgggcttaggtcagccagcatgagccattcgctggtctccggttacgcccttctttgagccaccacaactcctggttagaagaggcgccttcagatacgtaattagaacacaatttacctgttccggagaatccttttctcgtcttaatcatgcaaggggacgggagattttacacgttgtgaggaacggggatgccggactgtcaaaatgcaatgcacacagctgacgcgctatcgatagcgatatcaaccgatagcagtaattccaatccaattgcatttaatttaaacatgaaagaaaataagaaaaagtcgcgcaaaacggccaataagacaaatgaaacgtcagagggtcagaaaaagaagatcattgaactgctgcacgagtacaacgacctaaaggatgccacccagcgcgtcctggaagccttggccaacctaaaatgcgtacccgtcggatcggtttacgctacatacaacctgccccgcgacgaataaagtttgtgctttttagactgttatatttatgtacttgttgtaaacaacttgtaatacaacggagtgcatgtaaatgccttctggcttggcagttccatgagacttctgctaataaatccacctaaaactagtcattgcatttgttccacctattggccagcatgaaaataggaccggcatcgttcattgaaggtcttgtaggaacgatctttaatgatgtcctcgacattgagctcggcctggagaacccgcagctggaaaggatcataggcatcagttaagagtaagacttaggtatttcggttaccttgcgctgctccgccctaaactggttatccgtatccacatcatccggctgggtctcccgcttttcccttagcttcttcagattactagccgaaattgttatgcaactgcgtatgctttcttgctgcaaggagaagctatctgtcaagatccccgtgtgttgtacttaatcaggatttaccctggccaagtgtgactcctggagcttcgcgtacagatcgcgacaggtgctttcactgttcacttgacccttaaacgactccgttggcagggcatttagtgcatatataatcttgtcgtccacatctcgcatcttcttcagtgcctcctgtttggaaacttaaagccatttagtatgccggctactaacccaaacaacaatattccaacccccacctggaagccgagaaagtctaagcacaatgccgccatttaaaccaggtaggaaaacaagaaaacactttaaaaaataataaaaacaaaatgatatatgtaaaattgccggcgcaatgtgcctctaatcggggttgccacctgggcggtgcaatcgattagcacgattatggacaatcgatgtggatgataaagactagttgaacaaaacaaaacaaaatagcaaaataattcaagatgccgctaaaattcgatgatattcacgagaaaattgaaaccggcgtctaccaattggctgtta

SEQ ID NO: 33767 - DNA, 207 bp, DROSOPHILA
atgaaagaaaataagaaaaagtcgcgcaaaacggccaataagacaaatgaaacgtcagagggtcagaaaaagaagatcattgaactgctgcacgagtacaacgacctaaaggatgccacccagcgcgtcctggaagccttggccaacctaaaatgcgtacccgtcggatcggtttacgctacatacaacctgccccgcgacgaataa

SEQ ID NO: 33768 - protein, 68 aa, DROSOPHILA
MKENKKKSRKTANKTNETSEGQKKKIIELLHEYNDLKDATQRVLEALANLKCVPVGSVYATYNLPRDE

SEQ ID NO: 33769 - DNA, 2675 bp, DROSOPHILA
ggtgtaagttatgatcacgaaggttttgaataggtaaaataacctatcctgttttcattagtatatacaatttatttatgaatatctacatacatacatttatatctgtagatttagaagatgtaagaccaattcttacggaaacagattttcagttcatgatacaaaattgtgtaattttaaggaactttaccgcatatgaactcaaattaagtatttggtttccaacttaagtgcagttataaggtgaattaataaacaattggatctcagggtaattatacatattaaaaaggcttatcattaaagccaaacgaaaaccgaggtcagcttatcgtcgttaagttctatgactgtgctttaaaaagttatcaaattagtgttaaaaaatgtgcacacatgtaaacaaattttaatcccaagagtgagaagaattcataataaaaaaaggttgatctaatgctgaaatagtttgtcgataagggccttctggcgatattgtgaaggaaaagagacttacgccattaaaaaagatcaatcataagttaataacttataataacttatggaaaactataactagatcttggaaaccataatgaaatctatcacagatacgttaatatgaaatatttgaaaataaaaatatatgtttatttttttcgtacattttttgttatttgcttgtaagaagtagaatattgttgacgtaatattaactatttagaaaactaattgaaaaaaaacacgattaaaagttaattttaatcaaccaaaatattatactacaatgtttgattgctttaattttaaaaagcagtgaatagcagatattcccagttgataaacacgactatagcgacttttcttgtttcgaatatgtttttctctcgctaactgaacaggttggacgacatcatttgcatttcgttctcccgcaactattttgtgtgtttccagatcagtttgatcgaacttataaagtaaacaacatcgtagcatgccgcaggccaatcttacgttaagtccccatgatcagcaggtgctcgattccattttcaatcccctcgagcttagcagcctacagacaaataacttaattcccgctgaatccgacctgaaggatgaggagccggatacccaggctatcaaagcttccagggaactggagctaaaagccatcgccttatccgaaagcggggagcttgatggagcactggaactatttcaacaatcattaaatctagcccagagggcttccgtgcttaataatcgggcacaaactttacgcctagccaaacgtgatgagggttagtaagaaaatgtaaacggttatgaatacagatattcattcagatatttctgtttatagaggccctcgatgacctaaacaaagccctagaactggccaatgatcagcagacccgcaccaagtgccatgcccattgtcagcgaggtgtcctttatcgtaaactggataacttggaggcggctcgtgccgatttcgaggcagcagcccagttgggcagtaaattcgccagagaacaggttattgagataataattacgctataaattacatctaatacgactatctttgcagttggtggaaatcaatccctatgcagctctctgcaatcaaatgctccgtcaggcattcgatcaactcaagtagcaagttatgcagttgaattttcatgagattatgagttactggattgttaataaataaaaaaataaaatgagaaaacacattcaaacccttttgttaaatatcaaattataaatagtgcaatattaaacaagaaaatattttggattcaatacgatgcgatcttattgatttttgattagttttcaatgtttggtttgcatgtaaggaaagagatcagatcccgttttgcctaaagcttcattgataaataatattgagcatcatttttcagtataattttgtagctcccgaaacaataaccgacgttctttgtttttatatttgtttctttttctttttcatctcttgttttgttcgattctcgtggccatgaaacgggcttcgatgggcacatcacgcaactttctccgcgagaaccggatgatggtgagccaggcgtctccaaactaccagatgcccaccgcctcgtccatggccagatgctgcggaccagtgaggttacttttggccgctactcagaggggcttgaatggcggaacagggccaaaagttgttcccagtcaacggaagctatccgagaagcagattcaaacggaggacatcagcgatgagcggtttctcagtgccgccctgctcaagtgctcggagaagactcatacccacttgcaatcccgcagcgagggcgacgatcctgcggacggcaggggaggacagtttctggacgaaaggctacgactgcgacggactgcgtccaattttgagttgggcaaaatgccggaacaacgcgatggctatcagccggggcaatgcacaatgcaccggccgttagctaacacgttcggcattttgcccggcggtttaaattacctggacaattgtgtctcttccagccgaaaacaggatgatgaggcatcgatctgctcgcaatccatcaaggcaagttctccaagggtccgccaaatggacattcccgaggtggtggatgttaacccagacgata

SEQ ID NO: 33770 - DNA, 558 bp, DROSOPHILA
atgccgcaggccaatcttacgttaagtccccatgatcagcaggtgctcgattccattttcaatcccctcgagcttagcagcctacagacaaataacttaattcccgctgaatccgacctgaaggatgaggagccggatacccaggctatcaaagcttccagggaactggagctaaaagccatcgccttatccgaaagcggggagcttgatggagcactggaactatttcaacaatcattaaatctagcccagagggcttccgtgcttaataatcgggcacaaactttacgcctagccaaacgtgatgaggaggccctcgatgacctaaacaaagccctagaactggccaatgatcagcagacccgcaccaagtgccatgcccattgtcagcgaggtgtcctttatcgtaaactggataacttggaggcggctcgtgccgatttcgaggcagcagcccagttgggcagtaaattcgccagagaacagttggtggaaatcaatccctatgcagctctctgcaatcaaatgctccgtcaggcattcgatcaactcaagtag

SEQ ID NO: 33771 - protein, 185 aa, DROSOPHILA
MPQANLTLSPHDQQVLDSIFNPLELSSLQTNNLIPAESDLKDEEPDTQAIKASRELELKAIALSESGELDGALELFQQSLNLAQRASVLNNRAQTLRLAKRDEEALDDLNKALELANDQQTRTKCHAHCQRGVLYRKLDNLEAARADFEAAAQLGSKFAREQLVEINPYAALCNQMLRQAFDQLK

SEQ ID NO: 33772 - DNA, 4093 bp, DROSOPHILA
caatcccctcgagcttagcagcctacagacaaataacttaattcccgctgaatccgacctgaaggatgaggagccggatacccaggctatcaaagcttccagggaactggagctaaaagccatcgccttatccgaaagcggggagcttgatggagcactggaactatttcaacaatcattaaatctagcccagagggcttccgtgcttaataatcgggcacaaactttacgcctagccaaacgtgatgagggttagtaagaaaatgtaaacggttatgaatacagatattcattcagatatttctgtttatagaggccctcgatgacctaaacaaagccctagaactggccaatgatcagcagacccgcaccaagtgccatgcccattgtcagcgaggtgtcctttatcgtaaactggataacttggaggcggctcgtgccgatttcgaggcagcagcccagttgggcagtaaattcgccagagaacaggttattgagataataattacgctataaattacatctaatacgactatctttgcagttggtggaaatcaatccctatgcagctctctgcaatcaaatgctccgtcaggcattcgatcaactcaagtagcaagttatgcagttgaattttcatgagattatgagttactggattgttaataaataaaaaaataaaatgagaaaacacattcaaacccttttgttaaatatcaaattataaatagtgcaatattaaacaagaaaatattttggattcaatacgatgcgatcttattgatttttgattagttttcaatgtttggtttgcatgtaaggaaagagatcagatcccgttttgcctaaagcttcattgataaataatattgagcatcatttttcagtataattttgtagctcccgaaacaataaccgacgttctttgtttttatatttgtttctttttctttttcatctcttgttttgttcgattctcgtggccatgaaacgggcttcgatgggcacatcacgcaactttctccgcgagaaccggatgatggtgagccaggcgtctccaaactaccagatgcccaccgcctcgtccatggccagatgctgcggaccagtgaggttacttttggccgctactcagaggggcttgaatggcggaacagggccaaaagttgttcccagtcaacggaagctatccgagaagcagattcaaacggaggacatcagcgatgagcggtttctcagtgccgccctgctcaagtgctcggagaagactcatacccacttgcaatcccgcagcgagggcgacgatcctgcggacggcaggggaggacagtttctggacgaaaggctacgactgcgacggactgcgtccaattttgagttgggcaaaatgccggaacaacgcgatggctatcagccggggcaatgcacaatgcaccggccgttagctaacacgttcggcattttgcccggcggtttaaattacctggacaattgtgtctcttccagccgaaaacaggatgatgaggcatcgatctgctcgcaatccatcaaggcaagttctccaagggtccgccaaatggacattcccgaggtggtggatgttaacccagacgatatactaagcttacactcgcaagagtcctgtgcagagctaccagttgtagaggtccagcggaatgaagcggaagtccaactaccggagaattctcaaacggattcacctgaggaatcccaacctattctgctaaccagtgagcagagaatggtgctaatggatgccgtccgtaagcggcaaaatcaattgattgcggaatacaaccgattgccacttaccgtgggcacattgcgagtccggaatctcaagagacaactggagcagcaattggatgtgttggactacgatctcagcaggctatcactgacgaatgtgtatttgaagccagagtcacaatttggaacaatcgcttatcaaaaattgccaacaaatataaatgcttagctaaaacgaattattctcaatattgcttgcaaagaattctaaaggttcttgagtttttcaacccacttcaagttgataggtgaaatctttgggaaaggtgatacaaggcataattttatttatctaatattttattgtaaataatatagtaaaaagtaccactcttttctagagtataaatgtctaaaagtacaatatttaccttggtactgttttatcatagcaactaagtcattggacgcccttgacatatttattggtagaaagataaaaattggcaacatgttatttgggaagatatcaaccacaagtgtaacgataagagtttcgcaatgaggcttgaaaattgccataaatagggatcgccaaacctcatctctatcaataaagtgaaccaactgaatagcaccatgtcatttaaactatctttgcattgtctgctgatcctggcaggatatctcacttcaattgaagccgaagttttcccgcagtgcgcaaatgctccattggatacctttgtcatggccatcgaagattgcgcttcatacatctattgcaatggagaagactccttccgagacagctgccccgagtccacctactttgacgatcgaacccaagagtgtgcctttgatgatgagggtgtgtgtctaaggaactcagactcagtccagactgaggagcagcccgataagcaaactactggtgaggagcagagcgggatcgaagaaaccactcccgttccaacaccgccttctgattacgcctctacaggatctgcggactcttctactttccaagctgattctacaacaacccctacagaatcaattccttcagtgactgagccaccgactacatctgctacgccatcctccccatctgcaaagccttcctctccagctcaggaaaggccgcactgcgacatttccggagatggtgaccatcctcatccccagcggtgcgagtactactacaggtgcctcagcggctatctgaccattgtgagatgtccttacaagtatggctgggactttcctacaaagcaatgcaagcctagcagcgaggctcagtgctttagttatagctactagatttatctttagaagctcaactttgatctaaataaattagattagattaggcgatctgtaggttgatttcaaatcattttattaacttttatacatttatttatatgttcttaagatgaggctttaactttgatcataatcaaaaataaatgaataatttcctgtatgcactttatttttctttcttagagtgtacatagcaatcacgtgtgcatttgcattgtcagtcaactagatagttgttagtggtactttgacatttaacgtacgttttatgtaaggaattatccttgagtgaagggcttatatacacattgagctatttacagcctccaagctacgcggctgctaacccaaatcgaggtgcgcacagatgacaataataaataagtatttgtggcattttaatgaattgaaaagtgcataatgaaggtgctgggtgcccgatgaccaacggcgtctccatctggcggttccatttgtatttgtcaggcataattcacaaatccaacgcgcaggtatatgaatttattttcggcgggcaattttcaaacggcggcaactgctgtcgccgcttccacattttattgcaaattaataatgcacacgatcccgcaacagtagcagccgccgctgcaccaacaaattcctccgcctgtcggccagtcgtgtcaattgtgtctagtggcggagtggtcgcagttcctgattatgatgatgatgatgatgatgccctcatgatgatttgccactggcaaatgttttgattaactaactgcggggcagccaattaatttttggccaagaggcttcacactgatcgcgagtacaaaaccgctgagatttctcttcgctgcgccgatgcggcctgctcattaattaaagaacatggaatcgggcgacaaacggatccgcccgacatgctgagagccaaattcgaatccgctaaacaaatggcaacagcagcagcaacaacatttgggccaacagcaacaccaac

SEQ ID NO: 33773 - DNA, 1530 bp, DROSOPHILA
atgggcacatcacgcaactttctccgcgagaaccggatgatggtgagccaggcgtctccaaactaccagatgcccaccgcctcgtccatggccagatgctgcggaccagtgaggttacttttggccgctactcagaggggcttgaatggcggaacagggccaaaagttgttcccagtcaacggaagctatccgagaagcagattcaaacggaggacatcagcgatgagcggtttctcagtgccgccctgctcaagtgctcggagaagactcatacccacttgcaatcccgcagcgagggcgacgatcctgcggacggcaggggaggacagtttctggacgaaaggctacgactgcgacggactgcgtccaattttgagttgggcaaaatgccggaacaacgcgatggctatcagccggggcaatgcacaatgcaccggccgttagctaacacgttcggcattttgcccggcggtttaaattacctggacaattgtgtctcttccagccgaaaacaggatgatgaggcatcgatctgctcgcaatccatcaaggcaagttctccaagggtccgccaaatggacattcccgaggtggtggatgttaacccagacgatatactaagcttacactcgcaagagtcctgtgcagagctaccagttgtagaggtccagcggaatgaagcggaagtccaactaccggagaattctcaaacggattcacctgaggaatcccaacctattctgctaaccagtgagcagagaatggtgctaatggatgccgtccgtaagcggcaaaatcaattgattgcggaatacaaccgattgccacttaccgtgggcacattgcgagtccggaatctcaagagacaactggagcagcaattggatgtgttggactacgatctcagcaggctatcactgacgaattgcgcaaatgctccattggatacctttgtcatggccatcgaagattgcgcttcatacatctattgcaatggagaagactccttccgagacagctgccccgagtccacctactttgacgatcgaacccaagagtgtgcctttgatgatgagggtgtgtgtctaaggaactcagactcagtccagactgaggagcagcccgataagcaaactactggtgaggagcagagcgggatcgaagaaaccactcccgttccaacaccgccttctgattacgcctctacaggatctgcggactcttctactttccaagctgattctacaacaacccctacagaatcaattccttcagtgactgagccaccgactacatctgctacgccatcctccccatctgcaaagccttcctctccagctcaggaaaggccgcactgcgacatttccggagatggtgaccatcctcatccccagcggtgcgagtactactacaggtgcctcagcggctatctgaccattgtgagatgtccttacaagtatggctgggactttcctacaaagcaatgcaagcctagcagcgaggctcagtgctttagttatagctactag

SEQ ID NO: 33774 - protein, 509 aa, DROSOPHILA
MGTSRNFLRENRMMVSQASPNYQMPTASSMARCCGPVRLLLAATQRGLNGGTGPKVVPSQRKLSEKQIQTEDISDERFLSAALLKCSEKTHTHLQSRSEGDDPADGRGGQFLDERLRLRRTASNFELGKMPEQRDGYQPGQCTMHRPLANTFGILPGGLNYLDNCVSSSRKQDDEASICSQSIKASSPRVRQMDIPEVVDVNPDDILSLHSQESCAELPVVEVQRNEAEVQLPENSQTDSPEESQPILLTSEQRMVLMDAVRKRQNQLIAEYNRLPLTVGTLRVRNLKRQLEQQLDVLDYDLSRLSLTNCANAPLDTFVMAIEDCASYIYCNGEDSFRDSCPESTYFDDRTQECAFDDEGVCLRNSDSVQTEEQPDKQTTGEEQSGIEETTPVPTPPSDYASTGSADSSTFQADSTTTPTESIPSVTEPPTTSATPSSPSAKPSSPAQERPHCDISGDGDHPHPQRCEYYYRCLSGYLTIVRCPYKYGWDFPTKQCKPSSEAQCFSYSY

SEQ ID NO: 33775 - DNA, 2798 bp, DROSOPHILA
tcattctgttattccgccgatctctgttgatctttgatctgcgcaattgatcacctccatggatggcgattgtgatcttaattagatcgggctcaactgaaatgtgcctcagtgatctgtttcgctgaccgtcagactgacatatgaaaagtatatattagtttgcagcatacatacattctctcgtgtacttatgatcaccgctctctaatgatcatgtattccttatgatcagttaatcaaccattcataattgcatttgttattaccaccatcagtttgatgactcatccagctcgtgatcacttcttgtttattttatatacgtagttccatggaaaagttttcaaatttcccattagcattagaaagttaaccgatctgcgatgcattagttgtgggcgatcaaatcgatgccgagacgccaaacgtgtctaattacataattggtgctttgaccgaatcccaagaaataaggggactaagtgatcttgtaagcaattttgcatatcagccgaagactgccgcgttacggttgccaaaaggcgttaatctttcagacaaacagatcgaagccacagcgaccatagacgtcaaatttacagatttatgaaagaagtcaccagaaaacagaaagaccgaaaatttaaataaatgatttcggtttctttggggtttctgtaagccaccgggtaaacaaaagaggttcaacgaaaagaaagaaaccaaatgagatgggccgaggtgggaggaaagaaacccaagatagagagcttcggtgcagtaaaagcgactggacaacgctctgatagtcggctccagagaccgggttcagatctcgcagagagcggagcgttttgggatcgccttgtttgctcgcatttactttcatttttggaggggctataaaaagcgaaagcagtgtgctggatttgctcataaagaccgcaaaactgcaaaagtccactacgaagccaactggaagcaaaggattaccacaatggttagacccatttacctggccctcggtgagctgagctaatctctaggtttttgtggatcttagctaatctgtctgtttccgattgcagccgctcttttcgtgctgacgtgctctgttggtgcagccccattggcggagacggaagccaacgccactgaggagttagccgtctcaaaacaggatccgcaggttgtaaactccagtgctgatagcagtgaggagaaagacgatgacgaagaggaggatgaggctcaaaaggtggaggaggagaccaacgaggatgacgatgatgatgaagaggacgacgacgaagatgactcggtgatccggagacgtcgtgaggcggagaccactgaggaaccttcggaggaggcagccaccgaaattcccaacgaggatcagaaggtggatgccaccactggagcagctccaacacgaaaacccgtactcgtgctcattcgtgatgccctgaagaaggtcaccaccgatctgcccaccgcccaggtggctaacaatgctctgcagtacttccagcagttcgaacacttcatccaacaggccatcgaggaggtaatcggcgatgacgacgatgaagaggaaactccatctacagttattcccgaaacggaaaccacaatcgaggataacaagaagcccgagggtgagaacgcggaaaagatcccggaagttgaggtccctgctgtcgtttccgaaaaggagactctggcagtggaacccatgaagatggaggagtctgccccatcgacttcggctcctgtcagcaatgctgtctagtctagaaattaggatcaacacatcattcctcagctatttattgtcatttatttattgccaactataaattgtatgccataatcagtgtttgaacatgtttattgcattgggctatgaagcaaaatcttgagtttcttgccatccttgttcccctggttgtccatctccttcatcgcatatacgtgactcttgagttggctgcgatggcgattggtggttcgtctcttgggagactcaatctgctgcagcaagcgattgaagaacgagttcggtgatttggtagagtgattcttcttgctggatccagatccgctttcctttttcaatgacaaatcctgatctccaatggtcaaactaatgggcagcttaccgcccgtgcttatgtaaatgggaatggttatgtagatgggtgagccggcggtttgtggagccatcacttgcggatctggcttactctcggtttgagattcaggcttctgctgcggctgaaaaataaagaaatttgaatacaatttttggatttcggtaaaaaataggaacataaattatgggtattgaaataaaaatgtgtaagaaatggagaaaatatgaaatatttgaattagttaattttttttttacaatgcaaaattgtgatcatattataaatatttatactaataaagtatataatttaagggcatctgttttttcaggttttggcggaacctgcgcgagaaattaaataaattaattttcacaaatatataactttcatcacacgacgtaaaaatttacgttttcatatatagattgagttacaattgtttatattatttgacagttgtttaaaaatagatttctaaaatgtgaaggaatctcacctccacattttcaagatccaggggctgttgcttaaggaagtgcagcggattggcgtcctcactcaggttgttgtactcatcctctgataaggcgggaagacgatcgttgtggaagtcgtcgtcctcctcctcgattt

SEQ ID NO: 33776 - DNA, 735 bp, DROSOPHILA
atggttagacccatttacctggccctcgccgctcttttcgtgctgacgtgctctgttggtgcagccccattggcggagacggaagccaacgccactgaggagttagccgtctcaaaacaggatccgcaggttgtaaactccagtgctgatagcagtgaggagaaagacgatgacgaagaggaggatgaggctcaaaaggtggaggaggagaccaacgaggatgacgatgatgatgaagaggacgacgacgaagatgactcggtgatccggagacgtcgtgaggcggagaccactgaggaaccttcggaggaggcagccaccgaaattcccaacgaggatcagaaggtggatgccaccactggagcagctccaacacgaaaacccgtactcgtgctcattcgtgatgccctgaagaaggtcaccaccgatctgcccaccgcccaggtggctaacaatgctctgcagtacttccagcagttcgaacacttcatccaacaggccatcgaggaggtaatcggcgatgacgacgatgaagaggaaactccatctacagttattcccgaaacggaaaccacaatcgaggataacaagaagcccgagggtgagaacgcggaaaagatcccggaagttgaggtccctgctgtcgtttccgaaaaggagactctggcagtggaacccatgaagatggaggagtctgccccatcgacttcggctcctgtcagcaatgctgtctag

SEQ ID NO: 33777 - protein, 244 aa, DROSOPHILA
MVRPIYLALAALFVLTCSVGAAPLAETEANATEELAVSKQDPQVVNSSADSSEEKDDDEEEDEAQKVEEETNEDDDDDEEDDDEDDSVIRRRREAETTEEPSEEAATEIPNEDQKVDATTGAAPTRKPVLVLIRDALKKVTTDLPTAQVANNALQYFQQFEHFIQQAIEEVIGDDDDEEETPSTVIPETETTIEDNKKPEGENAEKIPEVEVPAVVSEKETLAVEPMKMEESAPSTSAPVSNAV

SEQ ID NO: 33778 - DNA, 9059 bp, DROSOPHILA
tactcgactcgagttggcaacttttccatcgtccaagctcattcagctgctcctgtctctagtttcattgtacattgagctattacaaataaattgtttaaataagttttgacttttgtatattttgttttgctcttcgtttttaatgtatctgcaattggaagtactaaattggttgaggctacgaattgtacattacaaactaaaatgtgtgtgttttatcttcgtttgtgaacttaagctaagcaatcgattaaataattagcaataataattttaatagtacaatatgaatatttgtaattgcttaaatgaacccctaccccggttcatatgctctcgcagctaaacgtaatcgtaataattagaatttctttacaattaatttttacgtttctcttgatttttctcctcatattattgctttccttttgttaccgtcgactcctcccctcccctgatttacagcttaaaattagcacgcttaaagaattagtcttaggacttaacgaattggagtcgggagccaaatagtagtagtttaaatggccattgggcgcgggacatattgaaacaatttccatatatatatataatatatatgtaatatatatgcgtatatacaactagataaatattattaagacctctacacctaattcgtttttgccggggggggggggggggtacacaattaacacaagcgcagtcggtggagccgggccagaccgattgtgtttcggctccaattccagctcctaactaggttgcacaactatgagctgccatgctgttgcccatgcaatttacacttacgattacacatcaaaacatatatagttatatgggtatacaatgtacgatagtagtgatagttaggaggtaaccataaactataatatcaagcaatacacaacgcgtagccttctacttgttcgctctatagcttcatctctcagtcgtcccaatagtcgtctcagttccaggcaattcacatcccttacttggtcgcatcggtggtggagcgccgtcgattgaccgcagcctgttgttgctgctgctgctgcttcgcagccgccagagctgttagagtcctttgactgatggctcccgaagcggtggtggccctaccggcgatctgaatgtgctgcagctgctgttgctgctgctgctgctgctgggccacctgcacttggttgggactgggcagtgtttgcgacgacaccgtggccgtgctctgctggttgagtattcggtgctgttgctgcagctgctgttgctgttgctgaggctgttgctgctgttgcacgggcgccttcaccgttttcaattgcagcttctgtgcggacatcacaatcggagtggtggttaggttggcgctgctggtcaccacattggcagctaacagtgggaaaaacatatgcgcttgtaatagtcgacagaaatgaatggatttctactaaccgttcacgggtgtggtggcgatcttaagcgtggagccacctatctgccgctgggtggtgatgagctgcctgttggccaattgcttggtgcccaccacctggacgttgcgggcacgcggctgtatggtgcccagcagctggatggccgcggtgctgttgccgcccgactgcgactgaatcgtctgctgctggaccgtttgctgggcgatacctataccaccaccaacatttgaggtacgtattgtttgaggatttagtttctgtacaccggcaccgactatttgagctgtaagcagagagagagcagaacgtgggtgtgcggggagattttttttggttgttgttttaggttgcaatgagaaatgttgaaggtcagaggtcggggagccgccaacttggtcgccaaaccagtacgtacagtacggttgcggctatacataatggaccctctaatctcaaactgatggcatttcgggttaggacacacaagacacacaaatcggattggattagtttagttgcatgagggatcgaaacgagatgttaacgggtttgtgttgtatgatgttgtaaacgagaaacgaaacagaaacagaaaagaacaaaattaagcatgttcaattaaaagaaaagagttacgtataaataatatggtccgattataaaataaagattcccaccaagaagccagatccagagtcacaaatatctcttcggcctggccgaaacgacagtgcagcattcttagcaagcggcctctgcaccaggaacgcatttctcttatactcaccaatgggaagggtgagcatggccgttgtggcccctgatcctccaccgccgcccgcactgccactggtgctgcttcccgccgtcactcctccgccggagttattcgtaatgacgaccgtctgtgtgccaggtcccgacgatggcaggctcacaatggtgcccgttggtggggcatgttgctgctgagtctgctgatgctgctgctggtggtgcggcgccgactgagtctgcagcgttatggtgtgtggcagttgctgttgttggctggagactggaaccgagaccaggacacttctctgttggccctgcgctgtgcccgcaccagtagccgtattacccgactgttgttgctgcaaactgttaccggagaactgcagcgaaatgggctgtgtgaagccggggatctgcacctggacattctgcaggccggcaaagttagccatagcgccctgcagttgagacagattgatgccctgcagattcaaagtggcggtggtctgttgctgctgctgctgttgttgctgctgcggcgaggcagagggctgcggatgcggactagacatgggcgagtgtatcgaagatgtggcgggagagtgaacgatggttttcgtgatgaactgctgcgttggctgcggctgttgcggtgacatgtgcggcatggaaacggcggatacgtttgatgtgacattgcttaggcgctccagcagggcttggttttggtgcgtctgcgacgactgcgagtgatccgagcccgatggcgagggagttgctgcgttggtcagcaaggcggacagggctccaccaccgccgccaccaccacttgaagtggacgctagattgtttggcacagcaaagccactggcattcgaggcgttcgaatcgctacctggagaaggagcggccatgcccaccacaattgcgttgggcggcgctgtggtgctatctcttctcagggagctcagaatgcgctgctgaactgggcccgttgggctctgaatccatgctgccgccgccgcggcactgttgcccgacgagatcactgtgtagctggtggtggggtttgtcatcactgcgggcggcgaggccaactgcgaggcaagcgccgacatggacactctaaccgtctggctgccgtcgcctgtctgttggtgatgcgactggccggcttggttgaggttgaccgctatcaaattgcccgcggagtttgttcgaaaagttgtcgttgtggtgcctccgccaccaatctttcgattggcgttcaacagattttgcaacacttcgctggactgctgcttccgctgcgtactcaccagcgtgggtgtgccacgggtggtctgcacatacgtagcggtggccgcatcggcagtgtttggcgtcgactgttgctggtgctgcacaagcgtcagcgtctgcggttgctgctggccggtggaggtggtgaacgttccactggccacgggtgtgctggtcatcgcagctggagcactgttgagcaggtttaaaattgacgcattgctggagttcttgagggttgtggcactggtgctacttccgttgttgttggtgctgccgcctgaccctgcagcattattgttgctcgacgtgttccccgctgtaagacaattttgtattgttatttagcatatttcccatcgaagattcccaccgaacttactttgctgctgatgctgctgctggtgttgctgctgctgttgttgctggtactggttggcagagttcataatgctgttgactatggcgtttattgcaggattcggatgtatggccgtattgttgttcatattgttattgttattattgttgttgttgttgttactagtggcagttgtctgttgttgctgttgcttctgcataatctgttgctgctgcactttcagctgcgtttgctgcggaataggagagtacataaagttattgacaaactagcaatgcttaattgaccatgttctactaaccagtattggcacatttgagttgagctgggcacgcagcgctgaattggcccccaccacggaagtgcccttcacctgctgttgctgctgttgaatggtggcgggctggatggttatgcccgaatgttgcagcgcctgtgccagctgttgcgattgctgctgtggctgctgctgttgcacaaggaccagggaaccattgctgaggctaacttggtgcgttgttgtggaggtattgctgctgccggtggccaactgctgaagatgtatgtgttgttgttgttgctgctgctgctgctgctgttgttgcgggacaatctgtgctgcagcttgctgctgcggtgcctcaattgtgtatgtttgcggctgctgctgctgcgctgattgttgccgaaagttttgttgtacattgattacattacttccagccaaattgagagtcttttgagttatttgttgtcgcggcagtgcaacatgatgcactgtggcggataactgctgtcccgcttgttgtgtctgctgttgttgttgcgattgttgctgctgattggcaacaacaacgacttgctgctgctgctgttgttgttgctgctgcatttgagcttgacgctgctgctgctgttgttgctgctgcaagaggatccgctgctcattcgtcaatcccgtgtgagtcacaattggcatatgcccgggtatcaaatgcgtgattttgaccgccttacgtccctcctcggtgaagatctcgcggaactgttgaatgtatcgattggcatgcacccgagtgcccagcgcaaagcggcacgactcgccgtttcgctcaccctcccggtaatctcggtccacatagagctcgccgagatactctgcatcggaggggcgctggaaaatggacagctttatgtggtatagagcccgccggccttcactcgcctcccgctccgtctcaagaatgtattcctcgaccagctgcggttggaagttatgacgacagtttggctggcaaccgtccttgcaggcctcactgaattcgttaaggggctcgtaggccttggcatacttttccacgctgatcacgtgctcgggcaccttcagattggcgggatactccagtgtgggcggacgaatgggccgtatgacctcgtgtggtcgccggggcaccttcgatgtgaacgaagagagcatggcccccaccagcggattgttggtgggcgccgtggccggtgtggcattggcgccaccactgctacttcccgtccgcggtcgctggcgcaggcgagccaggtaatcgcacaattccagtccgtgatggtgagtgaattggtccaacttgcgcttccgattgatagccgtttgggtgaacttcttcatctggcgccgcagctcgtgggagttgtacagctgacgctgatgctgggagttgatggcctgccgccctatgctgggatccggctccagacacagcggctccgccgtggccaacaccagctggctctccagggcgagcttgtcctccgccggcaactggctgcccatttgctgcacttccgcgaatagggtggcgttcgtgggcctgagcaggatgtgcttcatatcacagatattcgttgaggtggcaaatgtctggcggaagtcgcggatctgggcgataacgcagccggcatagaagacgctaggcttggcgtacacccgtgttccctcgccatccgacaaactgacggtctccgctacgagtagatccattaaaaactccggcagcatttcacgatcgatgcattgcagcagcaaatcgttctcgtagggccaccgaagcacctccacgagtccaaaatcgtgtttggcgtgacccgcctccgtcttggattgactttcgtcctgggctagcggcttgggacgactccgatgactgcccgttcccgtacccaatcccgcagcatcgctcgaggtctcgtccttgtccgtgggggaccattcgtttgtttgcggatttagcaccatgtgctcgtcataatgcagggccagcgagtatcccttattgccgggatacaagttgaccacaatcgtgttgagcttctcccgatccaccaaccgctccagtgtaaaggatcgagtgcgctgctttagctgaaagtgataagagtccttacataaggtttccgcttttgattggctcaacacttacccctgtctcggcaaagtagtttaggtcgttgctcagcagttgcaggtacaggtcccttattttctcgtgcagattaaagaacttgctgttgcccgactggcagacggatgaaggtggcttgctgttgctattggaggaggcagcgccggcgccagcgcgcgctgattgcgacgacgaggtggctgtggagactgatgcggcgggtatagctgagctgcgactagaggagctgctctccttgctactgctattggacttctggcgcttgctgggcgacgacgtgggcgatgccaggacatggtgattgtgcgtctggtggaggtgatgatggtgcaggtggtggccgcctccactggctgttgagttggcggagggtggccgcttctcggacttcttgctggacacactggccgctcccgttgagctattgcttagactggagttaacgcccggcggtgtcgacagcagaagatcgggcaccaccggcgacggcgacgtgattgagttgaagttcgacatcgttgtggtggaggatgagcacgaggagggcgacggagcaattgcagtgggcaggccgctgggcgtggccgaggtcggctccgtgagcaggctgcccagtgagccgccagtgccctcggtgggggactcgtcgtcatcgaagatacaaatgggcggctgggcaggaatctgtggtatagcctgcaataggctggtctccaggtacgatttgctgctcgaggaggcgaactgctgctgctggagcgtgggatgcagctgatggtaggactgctgcggctgcagctgcggcgaggatccagacgtgccgtactggacgaactgcgtctggtggacacccgaaccgtgggcgtggaccgctaggccctggacatggtccgcgttgctggaaccctttaactttttgagcgtgtcatttataataaactgtcgaaaaataaagtgtaaaatgggaattaatcgtattcaggctgcatgaaaaatgccacagttcttacgtcggcttcttggcatgaggagtccaggctttgcatggtggtgccagcggattgctaggggagatccaacggaggatggcgcacccaattaccgacgacatccaagcaccagtctacgaacaatcctggccaggatcggcggcattcgcattgcgctagcaggtgtccgtgttgccagtgaacgtcgaattacgaatttctaggaccgcagacgcagggctccgttgttgtctcctactttcgctggctgctgctgctgctgctgctgtccatcggttagtttcgccacactcagcactcggctgtgccgcatcaggatcgttttggggtgctcctcggtccgtctgtgtgacgaatcgctgcactggaggacactgagatcggatcccgatggcgattactgcggtttcttcactctttttccacttccactgctgctgctgctttgcgtgacattttctctctgcgcccctctgccgacgaactctctttctggcgctgctgctccgtgaatttgcaaggtcgcgcgctctgctgcggttatggggcgaacagtgggctggttctttaatgatacgccgaggattgctcgcttttaattgttttaaaactttgttttatgcttttttttgcaatgtaaatgtactgtacgattcgtgccgtgcgaatgccaacaatcgttatcgttcgctgtgaatggcattgtcgccgttccgtctgccgttagtggtgtgtgcacattggctgcccatgcactgtgtgctgttaggcgcgcgctgttaacgctctgttagccgcccaacagtcatttgaaaattcaaaatatgcaattcaaaatctgaaattttgcagtttatttcccactttcggtgaatgaatagacagactttgtaggattgtttacttatgtttaataggtatattattaaggattagtctctaccaactaagcgttaagaatacaaaattttgtcacttgtacgtatacactttgtcatacacatttatccatatatatgtaaatattcatatatatatatatataattatatccgcgcgctaaccgttatcaatattcaataaaatcattatatcagaaacttgtaatacactcgcagttgaagaatttccgttcacatcagcatgagatctttaaacgttaattgtgtagtttgaaatatttataataaaaacagctcttgagttgaatcgttgaggatcaggggttgcttttgggttgggttgtgttgagttctgttgggaattgggatcgggatcgggatcgggttgtgtgcgggttggtgggtgatttgctcgcttgctcctcctctactccttgtgcccgccctgcagcttcttccaagtttcgcccagcgccttggcaaagtggtcgtccaccgaggcttcagtcttggtgaatatcgagatattcgtggacgaggtgggcgaagcgggcggcgtctgcgtcgaggaggcagccacggccgccagtcccggttcagccttcacccgaatgatggccggcatgctgggcgtgggcgtgggaatctgcgacggcgtcggattcggagttggtgtcggtgtcaaagtcggcgccacaacggtggttccggctattccgtaagccggcggtggaggcggtggt

SEQ ID NO: 33779 - DNA, 6156 bp, DROSOPHILA
tacatttacattgcaaaaaaaagcataaaacaaagttttaaaacaattaaaagcgagcaatcctcggcgtatcattaaagaaccagcccactgttcgccccataaccgcagcagagcgcgcgaccttgcaaattcacggagcagcagcgccagaaagagagttcgtcggcagaggggcgcagagagaaaatgtcacgcaaagcagcagcagcagtggaagtggaaaaagagtgaagaaaccgcagtaatcgccatcgggatccgatctcagtgtcctccagtgcagcgattcgtcacacagacggaccgaggagcaccccaaaacgatcctgatgcggcacagccgagtgctgagtgtggcgaaactaaccgatggacagcagcagcagcagcagcagccagcgaaagtaggagacaacaacggagccctgcgtctgcggtcctagaaattcgtaattcgacgttcactggcaacacggacacctgctagcgcaatgcgaatgccgccgatcctggccaggattgttcgtagactggtgcttggatgtcgtcggtaattgggtgcgccatcctccgttggatctcccctagcaatccgctggcaccaccatgcaaagcctggactcctcatgccaagaagccgactttattataaatgacacgctcaaaaagttaaagggttccagcaacgcggaccatgtccagggcctagcggtccacgcccacggttcgggtgtccaccagacgcagttcgtccagtacggcacgtctggatcctcgccgcagctgcagccgcagcagtcctaccatcagctgcatcccacgctccagcagcagcagttcgcctcctcgagcagcaaatcgtacctggagaccagcctattgcaggctataccacagattcctgcccagccgcccatttgtatcttcgatgacgacgagtcccccaccgagggcactggcggctcactgggcagcctgctcacggagccgacctcggccacgcccagcggcctgcccactgcaattgctccgtcgccctcctcgtgctcatcctccaccacaacgatgtcgaacttcaactcaatcacgtcgccgtcgccggtggtgcccgatcttctgctgtcgacaccgccgggcgttaactccagtctaagcaatagctcaacgggagcggccagtgtgtccagcaagaagtccgagaagcggccaccctccgccaactcaacagccagtggaggcggccaccacctgcaccatcatcacctccaccagacgcacaatcaccatgtcctggcatcgcccacgtcgtcgcccagcaagcgccagaagtccaatagcagtagcaaggagagcagctcctctagtcgcagctcagctatacccgccgcatcagtctccacagccacctcgtcgtcgcaatcagcgcgcgctggcgccggcgctgcctcctccaatagcaacagcaagccaccttcatccgtctgccagtcgggcaacagcaagttctttaatctgcacgagaaaataagggacctgtacctgcaactgctgagcaacgacctaaactactttgccgagacagggctaaagcagcgcactcgatcctttacactggagcggttggtggatcgggagaagctcaacacgattgtggtcaacttgtatcccggcaataagggatactcgctggccctgcattatgacgagcacatggtgctaaatccgcaaacaaacgaatggtcccccacggacaaggacgagacctcgagcgatgctgcgggattgggtacgggaacgggcagtcatcggagtcgtcccaagccgctagcccaggacgaaagtcaatccaagacggaggcgggtcacgccaaacacgattttggactcgtggaggtgcttcggtggccctacgagaacgatttgctgctgcaatgcatcgatcgtgaaatgctgccggagtttttaatggatctactcgtagcggagaccgtcagtttgtcggatggcgagggaacacgggtgtacgccaagcctagcgtcttctatgccggctgcgttatcgcccagatccgcgacttccgccagacatttgccacctcaacgaatatctgtgatatgaagcacatcctgctcaggcccacgaacgccaccctattcgcggaagtgcagcaaatgggcagccagttgccggcggaggacaagctcgccctggagagccagctggtgttggccacggcggagccgctgtgtctggagccggatcccagcatagggcggcaggccatcaactcccagcatcagcgtcagctgtacaactcccacgagctgcggcgccagatgaagaagttcacccaaacggctatcaatcggaagcgcaagttggaccaattcactcaccatcacggactggaattgtgcgattacctggctcgcctgcgccagcgaccgcggacgggaagtagcagtggtggcgccaatgccacaccggccacggcgcccaccaacaatccgctggtgggggccatgctctcttcgttcacatcgaaggtgccccggcgaccacacgaggtcatacggcccattcgtccgcccacactggagtatcccgccaatctgaaggtgcccgagcacgtgatcagcgtggaaaagtatgccaaggcctacgagccccttaacgaattcagtgaggcctgcaaggacggttgccagccaaactgtcgtcataacttccaaccgcagctggtcgaggaatacattcttgagacggagcgggaggcgagtgaaggccggcgggctctataccacataaagctgtccattttccagcgcccctccgatgcagagtatctcggcgagctctatgtggaccgagattaccgggagggtgagcgaaacggcgagtcgtgccgctttgcgctgggcactcgggtgcatgccaatcgatacattcaacagttccgcgagatcttcaccgaggagggacgtaaggcggtcaaaatcacgcatttgatacccgggcatatgccaattgtgactcacacgggattgacgaatgagcagcggatcctcttgcagcagcaacaacagcagcagcagcgtcaagctcaaatgcagcagcaacaacaacagcagcagcagcaagtcgttgttgttgccaatcagcagcaacaatcgcaacaacaacagcagacacaacaagcgggacagcagttatccgccacagtgcatcatgttgcactgccgcgacaacaaataactcaaaagactctcaatttggctggaagtaatgtaatcaatgtacaacaaaactttcggcaacaatcagcgcagcagcagcagccgcaaacatacacaattgaggcaccgcagcagcaagctgcagcacagattgtcccgcaacaacagcagcagcagcagcagcaacaacaacaacacatacatcttcagcagttggccaccggcagcagcaatacctccacaacaacgcaccaagttagcctcagcaatggttccctggtccttgtgcaacagcagcagccacagcagcaatcgcaacagctggcacaggcgctgcaacattcgggcataaccatccagcccgccaccattcaacagcagcaacagcaggtgaagggcacttccgtggtgggggccaattcagcgctgcgtgcccagctcaactcaaatgtgccaatactgcaaacgcagctgaaagtgcagcagcaacagattatgcagaagcaacagcaacaacagacaactgccactagtaacaacaacaacaacaataataacaataacaatatgaacaacaatacggccatacatccgaatcctgcaataaacgccatagtcaacagcattatgaactctgccaaccagtaccagcaacaacagcagcagcaacaccagcagcagcatcagcagcaaacggggaacacgtcgagcaacaataatgctgcagggtcaggcggcagcaccaacaacaacggaagtagcaccagtgccacaaccctcaagaactccagcaatgcgtcaattttaaacctgctcaacagtgctccagctgcgatgaccagcacacccgtggccagtggaacgttcaccacctccaccggccagcagcaaccgcagacgctgacgcttgtgcagcaccagcaacagtcgacgccaaacactgccgatgcggccaccgctacgtatgtgcagaccacccgtggcacacccacgctggtgagtacgcagcggaagcagcagtccagcgaagtgttgcaaaatctgttgaacgccaatcgaaagattggtggcggaggcaccacaacgacaacttttcgaacaaactccgcgggcaatttgatagcggtcaacctcaaccaagccggccagtcgcatcaccaacagacaggcgacggcagccagacggttagagtgtccatgtcggcgcttgcctcgcagttggcctcgccgcccgcagtgatgacaaaccccaccaccagctacacagtgatctcgtcgggcaacagtgccgcggcggcggcagcatggattcagagcccaacgggcccagttcagcagcgcattctgagctccctgagaagagatagcaccacagcgccgcccaacgcaattgtggtgggcatggccgctccttctccaggtagcgattcgaacgcctcgaatgccagtggctttgctgtgccaaacaatctagcgtccacttcaagtggtggtggcggcggtggtggagccctgtccgccttgctgaccaacgcagcaactccctcgccatcgggctcggatcactcgcagtcgtcgcagacgcaccaaaaccaagccctgctggagcgcctaagcaatgtcacatcaaacgtatccgccgtttccatgccgcacatgtcaccgcaacagccgcagccaacgcagcagttcatcacgaaaaccatcgttcactctcccgccacatcttcgatacactcgcccatgtctagtccgcatccgcagccctctgcctcgccgcagcagcaacaacagcagcagcagcaacagaccaccgccactttgaatctgcagggcatcaatctgtctcaactgcagggcgctatggctaactttgccggcctgcagaatgtccaggtgcagatccccggcttcacacagcccatttcgctgcagttctccggtaacagtttgcagcaacaacagtcgggtaatacggctactggtgcgggcacagcgcagggccaacagagaagtgtcctggtctcggttccagtctccagccaacaacagcaactgccacacaccataacgctgcagactcagtcggcgccgcaccaccagcagcagcatcagcagactcagcagcaacatgccccaccaacgggcaccattgtgagcctgccatcgtcgggacctggcacacagacggtcgtcattacgaataactccggcggaggagtgacggcgggaagcagcaccagtggcagtgcgggcggcggtggaggatcaggggccacaacggccatgctcacccttcccattggtatcgcccagcaaacggtccagcagcagacgattcagtcgcagtcgggcggcaacagcaccgcggccatccagctgctgggcaccatacagccgcgtgcccgcaacgtccaggtggtgggcaccaagcaattggccaacaggcagctcatcaccacccagcggcagataggtggctccacgcttaagatcgccaccacacccgtgaacgctgccaatgtggtgaccagcagcgccaacctaaccaccactccgattgtgatgtccgcacagaagctgcaattgaaaacggtgaaggcgcccgtgcaacagcagcaacagcctcagcaacagcaacagcagctgcagcaacagcaccgaatactcaaccagcagagcacggccacggtgtcgtcgcaaacactgcccagtcccaaccaagtgcaggtggcccagcagcagcagcagcagcaacagcagctgcagcacattcagatcgccggtagggccaccaccgcttcgggagccatcagtcaaaggactctaacagctctggcggctgcgaagcagcagcagcagcaacaacaggctgcggtcaatcgacggcgctccaccaccgatgcgaccaagtaa

SEQ ID NO: 33780 - protein, 1848 aa, DROSOPHILA
MQSLDSSCQEADFIINDTLKKLKGSSNADHVQGLAVHAHGSGVHQTQFVQYGTSGSSPQLQPQQSYHQLHPTLQQQQFASSSSKSYLETSLLQAIPQIPAQPPICIFDDDESPTEGTGGSLGSLLTEPTSATPSGLPTAIAPSPSSCSSSTTTMSNFNSITSPSPVVPDLLLSTPPGVNSSLSNSSTGAASVSSKKSEKRPPSANSTASGGGHHLHHHHLHQTHNHHVLASPTSSPSKRQKSNSSSKESSSSSRSSAIPAASVSTATSSSQSARAGAGAASSNSNSKPPSSVCQSGNSKFFNLHEKIRDLYLQLLSNDLNYFAETGLKQRTRSFTLERLVDREKLNTIVVNLYPGNKGYSLALHYDEHMVLNPQTNEWSPTDKDETSSDAAGLGTGTGSHRSRPKPLAQDESQSKTEAGHAKHDFGLVEVLRWPYENDLLLQCIDREMLPEFLMDLLVAETVSLSDGEGTRVYAKPSVFYAGCVIAQIRDFRQTFATSTNICDMKHILLRPTNATLFAEVQQMGSQLPAEDKLALESQLVLATAEPLCLEPDPSIGRQAINSQHQRQLYNSHELRRQMKKFTQTAINRKRKLDQFTHHHGLELCDYLARLRQRPRTGSSSGGANATPATAPTNNPLVGAMLSSFTSKVPRRPHEVIRPIRPPTLEYPANLKVPEHVISVEKYAKAYEPLNEFSEACKDGCQPNCRHNFQPQLVEEYILETEREASEGRRALYHIKLSIFQRPSDAEYLGELYVDRDYREGERNGESCRFALGTRVHANRYIQQFREIFTEEGRKAVKITHLIPGHMPIVTHTGLTNEQRILLQQQQQQQQRQAQMQQQQQQQQQQVVVVANQQQQSQQQQQTQQAGQQLSATVHHVALPRQQITQKTLNLAGSNVINVQQNFRQQSAQQQQPQTYTIEAPQQQAAAQIVPQQQQQQQQQQQQHIHLQQLATGSSNTSTTTHQVSLSNGSLVLVQQQQPQQQSQQLAQALQHSGITIQPATIQQQQQQVKGTSVVGANSALRAQLNSNVPILQTQLKVQQQQIMQKQQQQQTTATSNNNNNNNNNNNMNNNTAIHPNPAINAIVNSIMNSANQYQQQQQQQHQQQHQQQTGNTSSNNNAAGSGGSTNNNGSSTSATTLKNSSNASILNLLNSAPAAMTSTPVASGTFTTSTGQQQPQTLTLVQHQQQSTPNTADAATATYVQTTRGTPTLVSTQRKQQSSEVLQNLLNANRKIGGGGTTTTTFRTNSAGNLIAVNLNQAGQSHHQQTGDGSQTVRVSMSALASQLASPPAVMTNPTTSYTVISSGNSAAAAAAWIQSPTGPVQQRILSSLRRDSTTAPPNAIVVGMAAPSPGSDSNASNASGFAVPNNLASTSSGGGGGGGALSALLTNAATPSPSGSDHSQSSQTHQNQALLERLSNVTSNVSAVSMPHMSPQQPQPTQQFITKTIVHSPATSSIHSPMSSPHPQPSASPQQQQQQQQQQTTATLNLQGINLSQLQGAMANFAGLQNVQVQIPGFTQPISLQFSGNSLQQQQSGNTATGAGTAQGQQRSVLVSVPVSSQQQQLPHTITLQTQSAPHHQQQHQQTQQQHAPPTGTIVSLPSSGPGTQTVVITNNSGGGVTAGSSTSGSAGGGGGSGATTAMLTLPIGIAQQTVQQQTIQSQSGGNSTAAIQLLGTIQPRARNVQVVGTKQLANRQLITTQRQIGGSTLKIATTPVNAANVVTSSANLTTTPIVMSAQKLQLKTVKAPVQQQQQPQQQQQQLQQQHRILNQQSTATVSSQTLPSPNQVQVAQQQQQQQQQLQHIQIAGRATTASGAISQRTLTALAAAKQQQQQQQAAVNRRRSTTDATK

SEQ ID NO: 33781 - DNA, 2435 bp, DROSOPHILA
cacgcacagcagactttgttaaagaatcaagagcgggccaatagtatagagcgttatttcgattcgaccaattctcagcgcccaaatagaaagaacgagagcattagcagcagagcaacgcgtcattagcttgtgtgttttcttctagaaattttcaaatattttctacgatttggtcgtgatagatttggattgctggccattagattaggccgcaaagaaacagctgtacattacttgtctctggtaaaattccgcacgcgttgcggcattaatcatacgcagcgttggccactagacgagcgcttgacacgacatcagcccagaaacttggccatccccccagcagatactgcaagcttatgcccagtaggtcaacagagtgtgcacacacacttgacacacacttgcagggggttggattttccctcgcaacccactttgtggaggggtgagtagaagaggcttttacgcaaccacactgactttttcattgttccgcactcttattgcgatttagagagtttacatagcgctaaaaggcaatgcgaaattgccaaggattcagtccgaaaagcgaaacaaatggaaaaaccgctgtgtcatagcacagtaaaataaataaaacttaatcgcctacccaagaatatttcgcaaacaaagagttaagctcgtcggtcattaatagtaatttggaaaatgcccaaggtatttagaaaaatctggccatcctataagtatctgtgaagtacattttgttgaattaaaacaaaagtagtagtagatgcagactaactaaagacaagactatcatatttaaatcactcttcatttcgatttagttatcacagtcagctcctattctatttctgagtagaagttgaacatagatcatgctacaatacccactgtaattattccaaaccaactgtttccgcgtctagaatccccactgtacttaaattgccacacggctagcgaacaacaaaaaccatgacactcatacgaatatgtcccagctatgcgatcgaggctttttgggggcgggggagatctggagggtgggggttcgaccttgccaggcgccaaccttgggatctctcgccgctgccgctcgtctgccaccctctccgcctgcccccctccccccctcgacagacaagcgctgggggccactcacctgaaaatgttgctgctgctgatttggaggaacctgctggtgctgctggaagtgctgctgctgctgcctgggcgatccgtaagcgttttggggagtgtggaactgtgccgactgctgtggcgatccgtagccgccactcacgtactcccggtttacgggtatattgacaccgggaccgccgggtgagacattattaccggcggcggtggcgggattgctttgcgcctgattggccgccatcacagtgggcttcatggatgattcgctggccaggaaaagaccgtaaccgtaatcgcaatcgtatccgtatccgtaccgctcgtaccgctggcctaaacgctatcgaatccgtcgacgtttcgctgcgtagcgacaatttttaatttatttccttttgttgatacttggctgtgacttttcgtcggcgactacttgtcgtgccagttgttgagattaatttttggacgcgggctggtgtgcacgaggatggcgggggcttttaatggaggggtgcgggcgcgggctcaccttgagcgacgacgcgtgcgaataccgctcgatttcgattggggcttctcgtatgttcctgatgctttagctcctgctgctgctgttggtgctgctgctgctgctgttgctgctgcttttttgctaaacgaccggagtgtgatgtcacttttggccacactttctagctgccgcacaccgatacggccacttttttacttccacttttttcagctttttaagtatttccgctcgcgctctctggccctgcgctagtgtttgtgcgagtgtgggttttcggatttctatattcaatttaaaatatatatagattttttatttttgcacattgccactcggttgtttgttgttgtttttacggggccacgcatccacacgggcgtcctcacgctgccaaagttgctcgtcgactgagcgccatcgccatttgcttctaaccattaccgtataatttgcctttgccaacagccccactgtggcgctctctctccctctctctcgcccgctcgattctcatccgctctccgttcggcctccctctatctttctctcgcggtaagctttgcttggcttctacctggcttttctccggcggtttcagaccttaattggtaaatgtttaatactatcttacggatacggataccgttctctcgatccgctctccccagctcgctctccccactctctctctctccgtgcaccgatcagacatcagacttataaa

SEQ ID NO: 33782 - DNA, 435 bp, DROSOPHILA
atgaagcccactgtgatggcggccaatcaggcgcaaagcaatcccgccaccgccgccggtaataatgtctcacccggcggtcccggtgtcaatatacccgtaaaccgggagtacgtgagtggcggctacggatcgccacagcagtcggcacagttccacactccccaaaacgcttacggatcgcccaggcagcagcagcagcacttccagcagcaccagcaggttcctccaaatcagcagcagcaacattttcaggtgagtggcccccagcgcttgtctgtcgagggggggaggggggcaggcggagagggtggcagacgagcggcagcggcgagagatcccaaggttggcgcctggcaaggtcgaacccccaccctccagatctcccccgcccccaaaaagcctcgatcgcatagctgggacatattcgtatga

SEQ ID NO: 33783 - protein, 144 aa, DROSOPHILA
MKPTVMAANQAQSNPATAAGNNVSPGGPGVNIPVNREYVSGGYGSPQQSAQFHTPQNAYGSPRQQQQHFQQHQQVPPNQQQQHFQVSGPQRLSVEGGRGAGGEGGRRAAAARDPKVGAWQGRTPTLQISPAPKKPRSHSWDIFV

SEQ ID NO: 33784 - DNA, 3079 bp, DROSOPHILA
agatcctttaagcaacagtaaatgaagattagcaggaaaaccagcacgaggattgcggtaattttgctgattttaggtctatatatatatatctatttcagatatatatatatatatgtataagggcgctgctctggccgatcgaaattcgttgtccgcagtggttgagttcgcattcgctactgagccagcggctaacgaatttccgcaggtcgcgatgagtgtaaagtgtatttataaaaccaagaagagaaaggtcttggtgtcttctcttcgagaagatttgccatggcaaccagacgtccgtctaacttacattcagagttttcagcgtctcccgctgcagcgtctctggctcgacaagttccatgtccggttcgcccaggtgctcctgctgccggcgagagcgggccgaccggctggatgtcacagatgcactcgacccggacgtgggtgctccgtttacaggcgtttgttgtttaggcaccgcaccggttgccccgcccaccgagttgttgttgctgctgccattgctgcgggcgctggcgttggcttggtccacaactaccttgggcggcggcgccattagaaaatatatatatatatatttgcgtacaaaaaacgacgctacaaaattgaaaaaactcctcttttttgtactcccactttgtttttttgctttgcgcactctgacagctgttcccaaccagggctggaagctagttaacaagcctaccaagttatggtcacactggcagcggacgttttttgaaatcgaatgttttctaaaattcaaaaataaatattatttttagtttaaaataaaatgtatatctgtaaaaagtattttaaatgcttttggtgtagataaactaacgttacttggtaatttgatatcttttaaggataattatttatttggagattactttataatatgttccttggataataaacattatatgactagagccattttccctttcaagtttggacgtgcctactttccctgcttgcgctggatgatgtcctccttgagcgcacgaatccgatccctctccgcccggagtcccaccgcttgaccgcgtagatcactggtgaagtccgtgaacatgttaagcatggaattcaggagctcggcgttatcgggagcactcgacgaggtcgatggattctcttcttgggcactctctacggcctcgctggccactcggacttctgacgaggtggtctgcctgctggtctgaacggaggtggagctctggacctgtaccgtttgcctggaggacatgtgctcctcgatcatcttggtggtgtccaccatgttctgcacgcgcttaaactgcgccttcaggttggcgatctcgtttagcttctcctgcagataactggcctgctcctctttgtcctccccgccctcttcctcaccagatggtgcctcttcccggtttgtgaactctccagaagcactggcggatgaagcaactgttactgtctccgatgaggattcaacgtgggactgaacctcctcctcctcggtggactgccgcacttgtcggcgctgggcattcagaagggtcagctcagcggctcgtaagcgcagtgtctccatctcctcaagcaactggcggtgctcctcctgcatctcttgcagctgtctgttggaagcagctaggcgcttaaaaaatacaaataattagttttgaaagcttcaataatgaaaaaattggtttaaaaacatcatagttcaaagactacattagggcatcaaaagaaaaatgattttgtatattattattaaaaaactctattttttagctcactggtatagaaaaagcttcgtacttaaatttcatttcaactgaaacatctagagactgtaggcttattggtgtgactcattcattttgttgtctaaaaagaatgtgtcacggtatttatttaactttactgactgtgttttcttattgttttaaaacacttaaatactaagagttttgcaatttcccgaagactccagcttacctcgctcaaggcggcattgtccccattttgaggcctattcagttcgttgaccattttctgggttcctgaggagaagagggaatacttggtgttatgtatatcgtgcacgttgattattttctcaatacaaacaaaggcccatcgcaaggcactgtctataaataaatggctctttgttaaattatttttcagttagaatagtgtcagtcatcttggcatttttgaagacaaaactaacaagtgcacttatgaaaatgtacaccacaatacaccacatatattatacttgaaaatgctaccttttaatcgtatattcgaatcctccgagcgatgagctgtgcgcacaaagagatgcccaaatttcaactgaaacgatgtgccgaaaacgaaaatattttgaatcgttttcgtgttcgtgtagagtttttagaaacagccgacaagcttttccacattaatatgaaagtctacaaaggaaactttttttatgtttagaaaaggaaggtaacaattaaattgaaaacatgcttaaaacattttttcgttgtaattgtaacagaagcattttcaaaaaaaaatttaaattaattcataaaaatatagttataaatataaacccctgtgttaaagtaaatgtacatcaattgcatgatgatttaggtgaacctgctgtgaatatggtgatccaaatttagacttccaagagtcatcgcctttcccaccaattcatttgccagttgtttgcaatgtttacatcgatatagtgataagataatctgaggcttgaaccttataaaggtacattttcacaagggaagagattcagttgaataaaaatctgacaatgagtggaggtgtgcggttcagaagttggaatacaaaactattataatttttctgttttgcagaagtaatatggtactttatctgcatattttgcggtgtttttggagcaagacccaaagacttggacgtttctggaacaacagatagcaccctagaaacggattcaactacttccggtctggaatatggtctaattacgggcaacttg

SEQ ID NO: 33785 - DNA, 732 bp, DROSOPHILA
atggtcaacgaactgaataggcctcaaaatggggacaatgccgccttgagcgagcgcctagctgcttccaacagacagctgcaagagatgcaggaggagcaccgccagttgcttgaggagatggagacactgcgcttacgagccgctgagctgacccttctgaatgcccagcgccgacaagtgcggcagtccaccgaggaggaggaggttcagtcccacgttgaatcctcatcggagacagtaacagttgcttcatccgccagtgcttctggagagttcacaaaccgggaagaggcaccatctggtgaggaagagggcggggaggacaaagaggagcaggccagttatctgcaggagaagctaaacgagatcgccaacctgaaggcgcagtttaagcgcgtgcagaacatggtggacaccaccaagatgatcgaggagcacatgtcctccaggcaaacggtacaggtccagagctccacctccgttcagaccagcaggcagaccacctcgtcagaagtccgagtggccagcgaggccgtagagagtgcccaagaagagaatccatcgacctcgtcgagtgctcccgataacgccgagctcctgaattccatgcttaacatgttcacggacttcaccagtgatctacgcggtcaagcggtgggactccgggcggagagggatcggattcgtgcgctcaaggaggacatcatccagcgcaagcagggaaagtag

SEQ ID NO: 33786 - protein, 243 aa, DROSOPHILA
MVNELNRPQNGDNAALSERLAASNRQLQEMQEEHRQLLEEMETLRLRAAELTLLNAQRRQVRQSTEEEEVQSHVESSSETVTVASSASASGEFTNREEAPSGEEEGGEDKEEQASYLQEKLNEIANLKAQFKRVQNMVDTTKMIEEHMSSRQTVQVQSSTSVQTSRQTTSSEVRVASEAVESAQEENPSTSSSAPDNAELLNSMLNMFTDFTSDLRGQAVGLRAERDRIRALKEDIIQRKQGK

SEQ ID NO: 33787 - DNA, 3303 bp, DROSOPHILA
acctggcgcagagtgccgcgcggtaccaatggtggggtttcgttgctcggcgtcgcggtgagtctgctcggcggtctgctcgtcggctttggctatttcgtcaccgttcgttacacggttgaggccaaaatgcttctgattagcccaccacaatggccaatcatcgccttcggtggcatcgctggactttttgggtcccttttggactctgtcctaggtggtctgctgcagttctcgggcatcaatgaggaaggcaagattgtggatacacctggaaagggagtgcgccacgtaagcggactgcgcatcctggacaaccatagtgtcaacctgatttccagcatcgtcaccggcgtcaccattcctctcctggcccagagattctggcccgtgcgctaatgctgttttggattaggattagctgcattcaatagctaaaaatgtcaaaggctgcctcacaagattgaattccgtgttaaacataaacccatcctcataaagccttttagacaggtatatatgtacaattgttaaccatttataatttcataacgccggtgaaataccctccatagatatatttttatgaagcttacatatcgcctagcgaactaaccaacctatgagactcgatgaaaacaacgattgggcaccgaatagccaaggcagttagattatatttactctaaggtagctaaccatgttcctttacggattatgacgttgttgttactgtgactgttcacctccattttgtgtattaactctactaaacacgaaccgtacatgtggatctattgtcattgtctcgaaattctcgtacgtgacggaatacattttctgatttggttatgtatattcttatggcgtcatctcaagttgttttcaacaatttggagatcaatgattggttcccgctggaataattttagcagacctcgctccaaatcgaatgttttgcttattgcacaagcaattgctgttgtggtgattaaaatattcatgaaatttctataacacaattcgaaatttttgaatttgaggtaatagaatagaattaagttcttcaactgagggttttaaaaatatcttttgttcgaaatatagctactactcataaagtcttcgaatccattgttgttagtacattaaaacatgaatccaattgaaaacccgtggttttgttttcgttaataatgtatatctaatatttttgcactttattggctcttcttagtttttgaagttcaaaatttcgaattaagttttgcgaaagagcacgtaaagcctcactggacgaactatgtgaacccgcagtgctggtagctccacccggagtggttggcttggcaaatccgattgagaacttgatcattaggtcgccaattggcgagttgacgaattgcgagcccgttgagatggtcttgaagatgatgcgacgcttgtgctggtaaacctgcgggtcacttggcaggctgtttcccggctgaggatttgccttgggtttggtgctggaaccaatcttgggccgtggagtgctggtggtcacatttggtgattgctctgtggtgctggtttggttcaatggactttccgagatcctgggctgagcagtggttcttgtcctggtggttcgtggctgaaaagtggttgtgctgcgtcgtctgtacggtttgcgagtggtggtggttggaaggctcaacgaaggtgcctggtagcctgggtcctcatcctcgggagcatctgacacggcgtccggtttctcggggtccgacggataaccctgatccgtctgatcctcctcgtcctcgtagtcatcctgtagatcaccatctcgatctccgccggagaagtacggtggctggtgtggtggtttctgatcgcgacgatcctgcttctcgcggtgctgctcgtagacagggtcattgggagccgatgaggccaacacttgttccatctgcttttgaaggatctcgtagagcggcgtattctgcacatcctctaggacttctgcaggttcgcttggcacaaactgattgttgatataggcattacgtccatccaggtcttcttctagttccagctcttcatctttacgggaacgagactccgtttgcagcttctcggctgggggttgggtcactccttcggttacctcgacaggagcagcttgaatggtgagaacaactaggagaggaaaactaaataccacaagctacaacttttagaatattctcacctgcactcagcagaatcagtagctgaatcttccagactggaactccgacactagtggctcccattgcagttggtcaacttctgtgacaagtgacacaaatcccgctgcttttataggcaacccagccgcaacctgttgcattgtccatcccacgcccaattagtttttaggtttagtgcctggcaatggatgatggccctttcaagcttcagatatcaatcagtttatagaacttgttttgggggtcaatgcacttgattcaatgcaactgcatcgccttagaattcttctcaatttaattacaaagaggtgaatttgcctctaagaaagttttgaaaattatctgattgaaagatatatatgtaaagttgaagttgttatacccgttactttaacacacaaagttctttagaggccataaagaattatcaagaatgagttcgttaagaatcataggtgtattcattcccattacaaattttgcacacacctttccccttgctactaaatctgcttcgagttatactagtttgtcacagaaatgttggatcccgattaatgtctttccaaagatatagctatgtaaatgtacaatgcacctatttcagtaattaaatgctcaagggatctgaaaaatagtgtaactggtctggagtcataagaactaagaagacactcttactgactttgggaaaataaaagtgcgtttcgatcccatataaaatatctacataaaagtgctaagcagatcttatgatttttatttttatgacaatataaaagtcgggttaccattaaagttagccataaaaattgtagtccaatacacgtttaaactacaaagcgtgtatttaaaaaaaacccattttgtttatcaaatatagatgattatcgttgtttagaattttatttgttgtaataaattaaataaatactataattaggtgagatttgtgtagccattgctttctaagctacttggtacttgagcctatcaatgtccttgcccttgggttgggtctgctggtgaaggggcgcgatctccagaggtttgggcgtgggag

SEQ ID NO: 33788 - DNA, 960 bp, DROSOPHILA
atgggagccactagtgtcggagttccagtctggaagattcagctactgattctgctgagtgcagttgttctcaccattcaagctgctcctgtcgaggtaaccgaaggagtgacccaacccccagccgagaagctgcaaacggagtctcgttcccgtaaagatgaagagctggaactagaagaagacctggatggacgtaatgcctatatcaacaatcagtttgtgccaagcgaacctgcagaagtcctagaggatgtgcagaatacgccgctctacgagatccttcaaaagcagatggaacaagtgttggcctcatcggctcccaatgaccctgtctacgagcagcaccgcgagaagcaggatcgtcgcgatcagaaaccaccacaccagccaccgtacttctccggcggagatcgagatggtgatctacaggatgactacgaggacgaggaggatcagacggatcagggttatccgtcggaccccgagaaaccggacgccgtgtcagatgctcccgaggatgaggacccaggctaccaggcaccttcgttgagccttccaaccaccaccactcgcaaaccgtacagacgacgcagcacaaccacttttcagccacgaaccaccaggacaagaaccactgctcagcccaggatctcggaaagtccattgaaccaaaccagcaccacagagcaatcaccaaatgtgaccaccagcactccacggcccaagattggttccagcaccaaacccaaggcaaatcctcagccgggaaacagcctgccaagtgacccgcaggtttaccagcacaagcgtcgcatcatcttcaagaccatctcaacgggctcgcaattcgtcaactcgccaattggcgacctaatgatcaagttctcaatcggatttgccaagccaaccactccgggtggagctaccagcactgcgggttcacataaaatttcatga

SEQ ID NO: 33789 - protein, 319 aa, DROSOPHILA
MGATSVGVPVWKIQLLILLSAVVLTIQAAPVEVTEGVTQPPAEKLQTESRSRKDEELELEEDLDGRNAYINNQFVPSEPAEVLEDVQNTPLYEILQKQMEQVLASSAPNDPVYEQHREKQDRRDQKPPHQPPYFSGGDRDGDLQDDYEDEEDQTDQGYPSDPEKPDAVSDAPEDEDPGYQAPSLSLPTTTTRKPYRRRSTTTFQPRTTRTRTTAQPRISESPLNQTSTTEQSPNVTTSTPRPKIGSSTKPKANPQPGNSLPSDPQVYQHKRRIIFKTISTGSQFVNSPIGDLMIKFSIGFAKPTTPGGATSTAGSHKIS

SEQ ID NO: 33790 - DNA, 3089 bp, DROSOPHILA
ggaggggctataaaaagcgaaagcagtgtgctggatttgctcataaagaccgcaaaactgcaaaagtccactacgaagccaactggaagcaaaggattaccacaatggttagacccatttacctggccctcggtgagctgagctaatctctaggtttttgtggatcttagctaatctgtctgtttccgattgcagccgctcttttcgtgctgacgtgctctgttggtgcagccccattggcggagacggaagccaacgccactgaggagttagccgtctcaaaacaggatccgcaggttgtaaactccagtgctgatagcagtgaggagaaagacgatgacgaagaggaggatgaggctcaaaaggtggaggaggagaccaacgaggatgacgatgatgatgaagaggacgacgacgaagatgactcggtgatccggagacgtcgtgaggcggagaccactgaggaaccttcggaggaggcagccaccgaaattcccaacgaggatcagaaggtggatgccaccactggagcagctccaacacgaaaacccgtactcgtgctcattcgtgatgccctgaagaaggtcaccaccgatctgcccaccgcccaggtggctaacaatgctctgcagtacttccagcagttcgaacacttcatccaacaggccatcgaggaggtaatcggcgatgacgacgatgaagaggaaactccatctacagttattcccgaaacggaaaccacaatcgaggataacaagaagcccgagggtgagaacgcggaaaagatcccggaagttgaggtccctgctgtcgtttccgaaaaggagactctggcagtggaacccatgaagatggaggagtctgccccatcgacttcggctcctgtcagcaatgctgtctagtctagaaattaggatcaacacatcattcctcagctatttattgtcatttatttattgccaactataaattgtatgccataatcagtgtttgaacatgtttattgcattgggctatgaagcaaaatcttgagtttcttgccatccttgttcccctggttgtccatctccttcatcgcatatacgtgactcttgagttggctgcgatggcgattggtggttcgtctcttgggagactcaatctgctgcagcaagcgattgaagaacgagttcggtgatttggtagagtgattcttcttgctggatccagatccgctttcctttttcaatgacaaatcctgatctccaatggtcaaactaatgggcagcttaccgcccgtgcttatgtaaatgggaatggttatgtagatgggtgagccggcggtttgtggagccatcacttgcggatctggcttactctcggtttgagattcaggcttctgctgcggctgaaaaataaagaaatttgaatacaatttttggatttcggtaaaaaataggaacataaattatgggtattgaaataaaaatgtgtaagaaatggagaaaatatgaaatatttgaattagttaattttttttttacaatgcaaaattgtgatcatattataaatatttatactaataaagtatataatttaagggcatctgttttttcaggttttggcggaacctgcgcgagaaattaaataaattaattttcacaaatatataactttcatcacacgacgtaaaaatttacgttttcatatatagattgagttacaattgtttatattatttgacagttgtttaaaaatagatttctaaaatgtgaaggaatctcacctccacattttcaagatccaggggctgttgcttaaggaagtgcagcggattggcgtcctcactcaggttgttgtactcatcctctgataaggcgggaagacgatcgttgtggaagtcgtcgtcctcctcctcgatttcgtgagcctgtatggcggacttggctgtaggattggattttagtttgggagttgtggctgtgggtgtggcggtggttgagctggaagaaccagttgaaggatctgaagatattgactgcggcaagaccttcactgtgatgatgtcctggctattgtttgatttcgttacattctggccagagcacataatcccacacaggagcaaaactaaagggcaagacatttaaaatgaataacattatcacaaagaacatttccccatcggttgaaaaaaaaatattttgttttgcaatttccatgtgatattttatttgataaaatattacaacctaaacactagcgactaacttataataatgccccatcccagcctaacagcctgctcaatccgactttttcctctataattccacaggttacagcgtcgtcttcttgccgttgaggatcatctcggtgagtcccagttgccggaattgctgcaggcgctccacttgatggcagaggcgtttctggaactgcacctcgcggctgagttccttaagctcgtccacgctgcaatcgggattgcagctgcccatcttcttggcgattagttgggaggtaagcactatcttggccttggacagccggagataggaaaagtcggcgctggcccgccttagttcttggcggtacaagaagagttggtacgggaaattcacggtggcggacttgcggcggagcttctttagagcccgcttcttttgtttcttgagcggatcgtgggtcttcaccttgtgtggtttgtcggaatgtttctttcccgacttgcgactggatttctctgatttgtggctgcgcttgtgctggtcaatcatggtgtgttgcgggttgtaagtctcaggagtgaatgatgccccgaccagggggtgaggtccttttaaaggatccggtgggcaggtagatcctccgcacaggtatatttggtccaggtaattagcgggtgccagtcacgcgcttgcatgccgtaaaccaaaaactgttaacaggcttttcattcgggttttctaagggatccgggtcgccgggaatttccccgtctcgtttatggctttatgactagcaagatatccgcgcacccggcttaatcctcaattatgacagccaacttagcgccgttcgcacagatcctcggggttttgtggcga

SEQ ID NO: 33791 - DNA, 711 bp, DROSOPHILA
atgtgctctggccagaatgtaacgaaatcaaacaatagccaggacatcatcacagtgaaggtcttgccgcagtcaatatcttcagatccttcaactggttcttccagctcaaccaccgccacacccacagccacaactcccaaactaaaatccaatcctacagccaagtccgccatacaggctcacgaaatcgaggaggaggacgacgacttccacaacgatcgtcttcccgccttatcagaggatgagtacaacaacctgagtgaggacgccaatccgctgcacttccttaagcaacagcccctggatcttgaaaatgtggagccgcagcagaagcctgaatctcaaaccgagagtaagccagatccgcaagtgatggctccacaaaccgccggctcacccatctacataaccattcccatttacataagcacgggcggtaagctgcccattagtttgaccattggagatcaggatttgtcattgaaaaaggaaagcggatctggatccagcaagaagaatcactctaccaaatcaccgaactcgttcttcaatcgcttgctgcagcagattgagtctcccaagagacgaaccaccaatcgccatcgcagccaactcaagagtcacgtatatgcgatgaaggagatggacaaccaggggaacaaggatggcaagaaactcaagattttgcttcatagcccaatgcaataa

SEQ ID NO: 33792 - protein, 236 aa, DROSOPHILA
MCSGQNVTKSNNSQDIITVKVLPQSISSDPSTGSSSSTTATPTATTPKLKSNPTAKSAIQAHEIEEEDDDFHNDRLPALSEDEYNNLSEDANPLHFLKQQPLDLENVEPQQKPESQTESKPDPQVMAPQTAGSPIYITIPIYISTGGKLPISLTIGDQDLSLKKESGSGSSKKNHSTKSPNSFFNRLLQQIESPKRRTTNRHRSQLKSHVYAMKEMDNQGNKDGKKLKILLHSPMQ

SEQ ID NO: 33793 - DNA, 2441 bp, DROSOPHILA
ggcggtttgtggagccatcacttgcggatctggcttactctcggtttgagattcaggcttctgctgcggctgaaaaataaagaaatttgaatacaatttttggatttcggtaaaaaataggaacataaattatgggtattgaaataaaaatgtgtaagaaatggagaaaatatgaaatatttgaattagttaattttttttttacaatgcaaaattgtgatcatattataaatatttatactaataaagtatataatttaagggcatctgttttttcaggttttggcggaacctgcgcgagaaattaaataaattaattttcacaaatatataactttcatcacacgacgtaaaaatttacgttttcatatatagattgagttacaattgtttatattatttgacagttgtttaaaaatagatttctaaaatgtgaaggaatctcacctccacattttcaagatccaggggctgttgcttaaggaagtgcagcggattggcgtcctcactcaggttgttgtactcatcctctgataaggcgggaagacgatcgttgtggaagtcgtcgtcctcctcctcgatttcgtgagcctgtatggcggacttggctgtaggattggattttagtttgggagttgtggctgtgggtgtggcggtggttgagctggaagaaccagttgaaggatctgaagatattgactgcggcaagaccttcactgtgatgatgtcctggctattgtttgatttcgttacattctggccagagcacataatcccacacaggagcaaaactaaagggcaagacatttaaaatgaataacattatcacaaagaacatttccccatcggttgaaaaaaaaatattttgttttgcaatttccatgtgatattttatttgataaaatattacaacctaaacactagcgactaacttataataatgccccatcccagcctaacagcctgctcaatccgactttttcctctataattccacaggttacagcgtcgtcttcttgccgttgaggatcatctcggtgagtcccagttgccggaattgctgcaggcgctccacttgatggcagaggcgtttctggaactgcacctcgcggctgagttccttaagctcgtccacgctgcaatcgggattgcagctgcccatcttcttggcgattagttgggaggtaagcactatcttggccttggacagccggagataggaaaagtcggcgctggcccgccttagttcttggcggtacaagaagagttggtacgggaaattcacggtggcggacttgcggcggagcttctttagagcccgcttcttttgtttcttgagcggatcgtgggtcttcaccttgtgtggtttgtcggaatgtttctttcccgacttgcgactggatttctctgatttgtggctgcgcttgtgctggtcaatcatggtgtgttgcgggttgtaagtctcaggagtgaatgatgccccgaccagggggtgaggtccttttaaaggatccggtgggcaggtagatcctccgcacaggtatatttggtccaggtaattagcgggtgccagtcacgcgcttgcatgccgtaaaccaaaaactgttaacaggcttttcattcgggttttctaagggatccgggtcgccgggaatttccccgtctcgtttatggctttatgactagcaagatatccgcgcacccggcttaatcctcaattatgacagccaacttagcgccgttcgcacagatcctcggggttttgtggcgatttttccagtcaaactcagcaggggatacccgtatatccttcgtggaattctccaaaaccatggatagttctagaagcacattcgatggaaattggcaagaagacgaccctgtccccctagaaatttcttgctaacgcctggttttcctgaaggcaagagctgcctttggatctgttttcacttcactaagttacattcacatttctagctgttaccaaaaaatcctttacacctaacccacatcgtataccacaattttcgcatggaacgcacctccgcaactaaagctccaagatgtcttcatgtttcgtgcttaataataatactgaaaccacttttggcatgcgatttctattttatagctgagaaggcaaagtttttggtttgagaaatttcacttgaatgggaacaatgcgaagttctactatcagaaatttgcatattaatttctcaatagtctggctctacttttctcttttctggtattctatgcaaatttcgcttcgccatctcttggccctacaaatttaaaagccgatgtcgtcattgattgagtctcttgtctaaggtggtggtcaaggtagtggaaggggggaatatcgaataaataatgatgatgcgccactttttcggtttattttgcatgcattttatgattttcggttcgag

SEQ ID NO: 33794 - DNA, 441 bp, DROSOPHILA
atgattgaccagcacaagcgcagccacaaatcagagaaatccagtcgcaagtcgggaaagaaacattccgacaaaccacacaaggtgaagacccacgatccgctcaagaaacaaaagaagcgggctctaaagaagctccgccgcaagtccgccaccgtgaatttcccgtaccaactcttcttgtaccgccaagaactaaggcgggccagcgccgacttttcctatctccggctgtccaaggccaagatagtgcttacctcccaactaatcgccaagaagatgggcagctgcaatcccgattgcagcgtggacgagcttaaggaactcagccgcgaggtgcagttccagaaacgcctctgccatcaagtggagcgcctgcagcaattccggcaactgggactcaccgagatgatcctcaacggcaagaagacgacgctgtaa

SEQ ID NO: 33795 - protein, 146 aa, DROSOPHILA
MIDQHKRSHKSEKSSRKSGKKHSDKPHKVKTHDPLKKQKKRALKKLRRKSATVNFPYQLFLYRQELRRASADFSYLRLSKAKIVLTSQLIAKKMGSCNPDCSVDELKELSREVQFQKRLCHQVERLQQFRQLGLTEMILNGKKTTL

SEQ ID NO: 33796 - DNA, 7544 bp, DROSOPHILA
tcaatgcaaagcacgtggcacgtgataaggttttttttaaatgcttttgataaggcgccctacattcgaaattatgtaattgcgcaaaataaatatttataataccgagtattagaaaatttgacgaagcaacccggaaatttccaacgcgaagctaagttggagaaatgcaaatgcgattggacttgggcaaaccaaacaacgctttcagaatatttagacagagctactcttgtagactttggatatcaaaaacgtaaatttagcatggtgaactcatcttaaaaggcgaatagaaataacgaaacactattatcaacatagatgctgcggtaaaaaaactgaactaacaaaaatagtgtattctgtagctcacctccaggggttaaagtaatttaaatgatgaattcgcatatttagtaaagaaattacagttctctggttttgaaagctgaatagataagggcttactgctcggagtaaatccgaagattacgtaatggttaaaagaggtaataataattagaataatagtcgtgtattgccgtatttttagcgtaatcacgatatgatagccatataaagtgacaatcggggttttttatttgtattatattgcaacagtttgatctctcggatcaactctcgtgtcttcaagggcaattcattaaaacaataaatgtgaagtgcgatgctgaagggtttcccccaacttaagccccaaaagtagttagtcaagagtagagtttgtttcgggagcaacgaactaaacagcaaacagagctcaaagtgcacgactttatgcctcgttttcgtaattttccccagacacaaacaaacccaattaagtggcagcacgagtcagaagacccagaccagatacccagaaccactaataaattttcatttggcggaatgaaaatatttaattgcaatttcgccaagtggctaaaacttagccccacggtctggtctgttggttggtcgggttgaagttctcctagggcaccgaactgaggatatgctccggcactggcggatgacattggggcaggggtggacccaacgtggggtaggttcgcagacggagcagctccagaatcgtctgcagttccagcacatgggcgtagttgcggcggacattctccatgagctgccgatgggtcttaatctgcgacattctgcggtggaaagagaacatatgttttaaatataaaactgtttgatttttgcatgaaattcggtaattagcccgaaatatgagcagtggtaaaaatactttttactgtagccaacagatagataagtttcttcttattttctgataagtatgacagcaacttttaaatgcaacattatattggcaacgtactagttttgatagctttaaaagtcaacttttgcgaatttagatgaacttttgctagcagttagctgtccaattaattttgattacagtgctcggtgacacagtttagattctactggagaggttatcttaccgctcccgctgctcgcgatcccgcttgtcctccatcatcgtatcgcgcaaagtgttttggaaagtgacgtctaccttgatacgctcgattttaaaatcgatggcatggttgctgcgctttatctccaaggtctgtgcttttaccgcatcgattttgatgttacttccgtttgggcacagattagttttcagttgggacatataagacttataagtgacttacacacgatcgatgtttttcctgaatactgctatcttttgttcgatcactcgttcgatagctccggctatatacttctgacgttctgtcttaaccttttcccaattgcgaaggatgttaaggaactccattgaaactttgcatttctcgatggcatccagcatgtacttcagatacgctatattggccttgtacaacttgtgttcccattccttgaagatgacctgacgcctaaatactgccactctttgcatggctttaatcttcttatttccagcttcctgcatttattaaggttgataattttaaaaatcactcattctttgctatgattgctcacctgaatttggcgattcacatcgttgatgtcatccacatgcatgagaactgtgttggagagctttgtaaactggcccataaccgagacctcaacttgacccattgtgagggtcaactggatggtcatgtttctcatcttttctagctgaagcaggaaaattcattggggttactccagcaatataatatttaaacttgcgaagattaagcagaaacttttttgaaacaataaaataatgtttatgcgttgtggaaacatacaaattttttaaattgcttccttcaagcagcatatttcttaagagtggaaggctttccgtagttcgttacaacacttacgtatgtttggatgctatcttcggaattacgttgagtcaggatcttggactccttgagcgctgcgaggtccttgttaaggacacccaggagggcttggctgtcgagcagctggtatccaatacccttcagtcgcaactcgctctcagtcttctggcgacgcaacttgacaaaggcgtcccaagacttgggatccacattcggcggacactgttttggttgatcgaactcggcgagatagttaaggaactctaggacgtcgtcgggcagaggaaatggagtacgatgactgggctttccgctcagcttgttcgaggcctccatgcagatgagtaccgaattgaaaaccttaccgggcagtttgggtcgcttcttgaagagctttgtcatctcgtgggtggcatgtggaactaaaggtaagaactggcttcgaaactgtcgttcgacggctcgatcacgggtctgctgagcctccagtcgcgtctttacatctagaaaagccttgtcatagaaatcgagtaggttgctataccgcgtcatatagtcgttcaacttgtcgatgtccttgcggaacatgttgtagcgttttcgcatttgaacccttccgaaattgatcttttcgagggtgagcatgcgcagttgcccctgtttgagggcaaaatcatatttcagttttaagatcatcagttcagctacgcgttggttgagctttaaaatctgggaggctttgagggccaacgttttctcttcgttctcatgcaggattcgaaggtactttcgacggtctagttccaatagatgaactgcctcctcgtaggcgcggaagatcttctgctcctcgagattaaactcgtgcggctgcttcttttgcatgaactctggctcagggatgtccttcttgatctcctcctcccacagtttctccagcaccccgtccatcatcactatgagagcccgagcccagaactctttgctccaaagaagcagtcttcccttcttgccaccagtgtcgattgtctttggctttcggcggtttattgccttaacttcagagtcgtccacttccatgatctgcttgattacctcatcctttgcaagcgatggaaccgtcagttcaggtggcttgaactgatccatattgagcagacgcagcataatgttcatattgtcgtagatcttattgagcaccacgttagtgttcatcacgctgtcgatggtgtcctgcttgagttgctgagcctcgtggaagagtttgttgaactcctgtttgagcggatcgtttagatagaatcggattttgcagttatagttaaacaactggttcgaggtcaccaggttcttgtcctgcaactgaaaaacaggcgccattatgtgctcgtagacactgggtccctccaccacaaatggcttgagctcgcgcaatccttgaaccacttccacggtctcctcctcgtccacctcgccatcttcgatggcagcaggcggaccatgaccgcctgcggccggagcaggcggttcctcctcctcgaatgagcctagggagagtcgtaaatggtcttccaggtcgtagaatcggtatttatcgaactctgacatttcaactttcctccgcacggagaagctctcgaagttcgcatctgcaaaaatggagcgaacacgatagttaatgctcaccgcatcgcgggttaccaggcgtagaatccagtcgcgaatccttgactgatctgcaatggcacgttctagtgattctcgttccaaggcacaaagtttatgggcctcctccgtgagagcatccagccagcgatagtggaagcagaacttcttgaagatgccttgcgttttgccagtcttagagatatcgtagtcgattagcgccgtcaccttggcggcaaagtccttgatgatggtaaacagcttttcgcgctttgctaagtccgcccgggtgtactcctctttaacttcctgccgctgactcagtggcacgaacatatccaccttgtggattatctgctccacgaaacagggaatgccctcctccgtgggcaatggtaaggccacgttttcacgaacaaagtccgccagagaaggcagacgcattactcgcatgctcttgttggccaaaaggataatgaggtatctggacatcaatcatataatataaatatagttttaaatgaaattatatcagatagttacttcgaattaaagcattccttcactcgcagtatgtactccgtttgcatgcccaagttgagaaaacggcagatcataaacggtttcttggcccgcttgtgctgcttgaagtgaacaaggataccgccaagactccaggtgaccaaatgtttggtcatgccggcaccgagaatatagctgaagtgccccgacttggtggaagcgatccattgaagttcatccttctcgttcaacgcgaactggtcaaagttcaaagtgttgtactcggtggccacaatctcgatcagtgcccatcgtcctacaggcggctggacgcaaaagaagccgtattgcttcggcaggatatattctcgcctatgcagacgcttgtccttgccccaattgtagagccagagttcggtggcgaagcctggacgcttcatgctatgatcccgattgatgaagaccatcaaacggggtccatcggccagcaagaaggtgtgtataaaaacctgagacagttccggcgggttcatctcaaagtaatgcgttaacttgtgcggcctgttgtccacctgaacaacgtgcagcaccttcatctgatcctggaacaccacccagctgtcgttgaactctattcccaccaccgctgctgtctccattttaagatcgcacagaacatgcggcaagctggcccgctcgaagtgaatcaaaacgatgctggcatccaaagtgcctacgaccacaagggccaagctgcgatggttgcacatggccgttgcccccggaacggacacttcgcacagggtgttgcctttcgccaggtccatcattgccactccttcatcgtgcaacacgcaaacgcactcgtccttgagtccctgcaccactcgaaaggtaatcaccggttttcccgtcggcaccacggcttctagcgatactgtcccattgcggtccacaaccacctggtcaatgtgtccagggcggcgctcggcatagatttcgccattgttgttgctcagaaagcggaccacctcgtttaaacgtccctcgaattcccactcgagctggattgaaaggtggtaaatgaattaaaataatactaattgtgtaaataaacctgcgattcttaaatggaaatggaataaaatatatatttaaattctcgtactaaacctaccttgaagacacccgcctttttcttcacatagtatgcggtcgtgctgttccaaatgagaaatccggatttgtgataggtaaggccgtgtgagcggggcattttttccatttcggtcacagaatcggattcggatgtgggctgccattgtggcttcagggcaaaacaggccacgtccactgatagcagatgaccaaaatcgttggtggcgtacagggtgttatcctcgccgaagcttaggcatcggttgcaggactttaggaacttcttgccgagctccacctcggccaccttgtacagaaaggactccttttcaacggtgcagatttcgtagcaaatgatggtcatgtcctgcttgttcaactgaatgatggaaggcaggctggtgaagcttatcacaatgccgcgttccactgtaggtacattggtaaattgctccaggaccaaagttccagtgcggtagttgaaaacgcagaggcaatagtcaggataaccgcccacagcgatcagaagatccagctccgaaaaacggatgtcggtatagctcatcatgtgagctaataggaatgtagaatttaattgatgaaaatcctcatcctggaaacttacggggtatggagctgaacttcgccatatccggatagcggtatatatagatatttggcctcagaacgacctcagcaaaggcgaagagcggaaaacggttatggccagcaaaacaactgatacttagacccgtggacaccgtctccgccttgaaaaaggtaactgccttcgtctgcatatggacgaacttcattgcgttgccattccgctggcacaggacatcgggacccacattcacaagggtgtccttgtcccaaatgttgcaccaactgtagacttcgtggttttaaatatatatttggggacaattcactataaactcaccaaactgttgatgttatattcatattggtcctgtttcgttataaaactttgttttccgcaaatagattgcccgattttcgactggtagccaactagttctgaggttgctaagttaattgttttaaaggttccagtttgtttcgtatcccaggacaacctttgaaacaaggaagagttggttgccctttattttatcggagggcatttttaataaaatgtaacacatatcgtattttgcttataatatatgtaatttaatgtaatgtaataatgtaattgtataaagcatgtcctgaaatttataattttatattacattcaactttttatctatattaacattaacttggacactattttctgtactatcatactggcagcattatacgcctaaaacagcatcaacttcatcggatgtgctacaggaaaccgaagcaattgttagttaataataatcaaatcagagtcgtgtcatatgacctatatggctagaaataatgttatgagggagctttgcccccctacttagtccccgaatttcccaagcgacaactttttcgacccaagtaaagtgtcttgcccactttccctcaaatgtacaaacaataaaagttctcgaccataaaaagccaaagtcttagacaaacactgcccgaagcgcaattatatttgtttgtttttttttccctggctgaacgttactttaaaatttgatgcggcttgttatttttattgcccaggcgttatggttaatggggttccttttttccgactctaagcggcaataggtaattttttacgggtcaccggggtgtcgttgcttgtgtttgcggtttttattaaatttcaaccaattacacaatttggtt

SEQ ID NO: 33797 - DNA, 4635 bp, DROSOPHILA
atgaagttcgtccatatgcagacgaaggcagttacctttttcaaggcggagacggtgtccacgggtctaagtatcagttgttttgctggccataaccgttttccgctcttcgcctttgctgaggtcgttctgaggccaaatatctatatataccgctatccggatatggcgaagttcagctccataccccctcacatgatgagctataccgacatccgtttttcggagctggatcttctgatcgctgtgggcggttatcctgactattgcctctgcgttttcaactaccgcactggaactttggtcctggagcaatttaccaatgtacctacagtggaacgcggcattgtgataagcttcaccagcctgccttccatcattcagttgaacaagcaggacatgaccatcatttgctacgaaatctgcaccgttgaaaaggagtcctttctgtacaaggtggccgaggtggagctcggcaagaagttcctaaagtcctgcaaccgatgcctaagcttcggcgaggataacaccctgtacgccaccaacgattttggtcatctgctatcagtggacgtggcctgttttgccctgaagccacaatggcagcccacatccgaatccgattctgtgaccgaaatggaaaaaatgccccgctcacacggccttacctatcacaaatccggatttctcatttggaacagcacgaccgcatactatgtgaagaaaaaggcgggtgtcttcaagctcgagtgggaattcgagggacgtttaaacgaggtggtccgctttctgagcaacaacaatggcgaaatctatgccgagcgccgccctggacacattgaccaggtggttgtggaccgcaatgggacagtatcgctagaagccgtggtgccgacgggaaaaccggtgattacctttcgagtggtgcagggactcaaggacgagtgcgtttgcgtgttgcacgatgaaggagtggcaatgatggacctggcgaaaggcaacaccctgtgcgaagtgtccgttccgggggcaacggccatgtgcaaccatcgcagcttggcccttgtggtcgtaggcactttggatgccagcatcgttttgattcacttcgagcgggccagcttgccgcatgttctgtgcgatcttaaaatggagacagcagcggtggtgggaatagagttcaacgacagctgggtggtgttccaggatcagatgaaggtgctgcacgttgttcaggtggacaacaggccgcacaagttaacgcattactttgagatgaacccgccggaactgtctcaggtttttatacacaccttcttgctggccgatggaccccgtttgatggtcttcatcaatcgggatcatagcatgaagcgtccaggcttcgccaccgaactctggctctacaattggggcaaggacaagcgtctgcataggcgagaatatatcctgccgaagcaatacggcttcttttgcgtccagccgcctgtaggacgatgggcactgatcgagattgtggccaccgagtacaacactttgaactttgaccagttcgcgttgaacgagaaggatgaacttcaatggatcgcttccaccaagtcggggcacttcagctatattctcggtgccggcatgaccaaacatttggtcacctggagtcttggcggtatccttgttcacttcaagcagcacaagcgggccaagaaaccgtttatgatctgccgttttctcaacttgggcatgcaaacggagtacatactgcgagtgaaggaatgctttaattcgaaatacctcattatccttttggccaacaagagcatgcgagtaatgcgtctgccttctctggcggactttgttcgtgaaaacgtggccttaccattgcccacggaggagggcattccctgtttcgtggagcagataatccacaaggtggatatgttcgtgccactgagtcagcggcaggaagttaaagaggagtacacccgggcggacttagcaaagcgcgaaaagctgtttaccatcatcaaggactttgccgccaaggtgacggcgctaatcgactacgatatctctaagactggcaaaacgcaaggcatcttcaagaagttctgcttccactatcgctggctggatgctctcacggaggaggcccataaactttgtgccttggaacgagaatcactagaacgtgccattgcagatcagtcaaggattcgcgactggattctacgcctggtaacccgcgatgcggtgagcattaactatcgtgttcgctccatttttgcagatgcgaacttcgagagcttctccgtgcggaggaaagttgaaatgtcagagttcgataaataccgattctacgacctggaagaccatttacgactctccctaggctcattcgaggaggaggaaccgcctgctccggccgcaggcggtcatggtccgcctgctgccatcgaagatggcgaggtggacgaggaggagaccgtggaagtggttcaaggattgcgcgagctcaagccatttgtggtggagggacccagtgtctacgagcacataatggcgcctgtttttcagttgcaggacaagaacctggtgacctcgaaccagttgtttaactataactgcaaaatccgattctatctaaacgatccgctcaaacaggagttcaacaaactcttccacgaggctcagcaactcaagcaggacaccatcgacagcgtgatgaacactaacgtggtgctcaataagatctacgacaatatgaacattatgctgcgtctgctcaatatggatcagttcaagccacctgaactgacggttccatcgcttgcaaaggatgaggtaatcaagcagatcatggaagtggacgactctgaagttaaggcaataaaccgccgaaagccaaagacaatcgacactggtggcaagaagggaagactgcttctttggagcaaagagttctgggctcgggctctcatagtgatgatggacggggtgctggagaaactgtgggaggaggagatcaagaaggacatccctgagccagagttcatgcaaaagaagcagccgcacgagtttaatctcgaggagcagaagatcttccgcgcctacgaggaggcagttcatctattggaactagaccgtcgaaagtaccttcgaatcctgcatgagaacgaagagaaaacgttggccctcaaagcctcccagattttaaagctcaaccaacgcgggcaactgcgcatgctcaccctcgaaaagatcaatttcggaagggttcaaatgcgaaaacgctacaacatgttccgcaaggacatcgacaagttgaacgactatatgacgcggtatagcaacctactcgatttctatgacaaggcttttctagatgtaaagacgcgactggaggctcagcagacccgtgatcgagccgtcgaacgacagtttcgaagccagttcttacctttagttccacatgccacccacgagatgacaaagctcttcaagaagcgacccaaactgcccggtaaggttttcaattcggtactcatctgcatggaggcctcgaacaagctgagcggaaagcccagtcatcgtactccatttcctctgcccgacgacgtcctagagttccttaactatctcgccgagttcgatcaaccaaaacagtgtccgccgaatgtggatcccaagtcttgggacgcctttgtcaagttgcgtcgccagaagactgagagcgagttgcgactgaagggtattggataccagctgctcgacagccaagccctcctgggtgtccttaacaaggacctcgcagcgctcaaggagtccaagatcctgactcaacgtaattccgaagatagcatccaaacatacctagaaaagatgagaaacatgaccatccagttgaccctcacaatgggtcaagttgaggtctcggttatgggccagtttacaaagctctccaacacagttctcatgcatgtggatgacatcaacgatgtgaatcgccaaattcaggaagctggaaataagaagattaaagccatgcaaagagtggcagtatttaggcgtcaggtcatcttcaaggaatgggaacacaagttgtacaaggccaatatagcgtatctgaagtacatgctggatgccatcgagaaatgcaaagtttcaatggagttccttaacatccttcgcaattgggaaaaggttaagacagaacgtcagaagtatatagccggagctatcgaacgagtgatcgaacaaaagatagcagtattcaggaaaaacatcgatcgtgttaacatcaaaatcgatgcggtaaaagcacagaccttggagataaagcgcagcaaccatgccatcgattttaaaatcgagcgtatcaaggtagacgtcactttccaaaacactttgcgcgatacgatgatggaggacaagcgggatcgcgagcagcgggagcgaatgtcgcagattaagacccatcggcagctcatggagaatgtccgccgcaactacgcccatgtgctggaactgcagacgattctggagctgctccgtctgcgaacctaccccacgttgggtccacccctgccccaatgtcatccgccagtgccggagcatatcctcagttcggtgccctag

SEQ ID NO: 33798 - protein, 1544 aa, DROSOPHILA
MKFVHMQTKAVTFFKAETVSTGLSISCFAGHNRFPLFAFAEVVLRPNIYIYRYPDMAKFSSIPPHMMSYTDIRFSELDLLIAVGGYPDYCLCVFNYRTGTLVLEQFTNVPTVERGIVISFTSLPSIIQLNKQDMTIICYEICTVEKESFLYKVAEVELGKKFLKSCNRCLSFGEDNTLYATNDFGHLLSVDVACFALKPQWQPTSESDSVTEMEKMPRSHGLTYHKSGFLIWNSTTAYYVKKKAGVFKLEWEFEGRLNEVVRFLSNNNGEIYAERRPGHIDQVVVDRNGTVSLEAVVPTGKPVITFRVVQGLKDECVCVLHDEGVAMMDLAKGNTLCEVSVPGATAMCNHRSLALVVVGTLDASIVLIHFERASLPHVLCDLKMETAAVVGIEFNDSWVVFQDQMKVLHVVQVDNRPHKLTHYFEMNPPELSQVFIHTFLLADGPRLMVFINRDHSMKRPGFATELWLYNWGKDKRLHRREYILPKQYGFFCVQPPVGRWALIEIVATEYNTLNFDQFALNEKDELQWIASTKSGHFSYILGAGMTKHLVTWSLGGILVHFKQHKRAKKPFMICRFLNLGMQTEYILRVKECFNSKYLIILLANKSMRVMRLPSLADFVRENVALPLPTEEGIPCFVEQIIHKVDMFVPLSQRQEVKEEYTRADLAKREKLFTIIKDFAAKVTALIDYDISKTGKTQGIFKKFCFHYRWLDALTEEAHKLCALERESLERAIADQSRIRDWILRLVTRDAVSINYRVRSIFADANFESFSVRRKVEMSEFDKYRFYDLEDHLRLSLGSFEEEEPPAPAAGGHGPPAAIEDGEVDEEETVEVVQGLRELKPFVVEGPSVYEHIMAPVFQLQDKNLVTSNQLFNYNCKIRFYLNDPLKQEFNKLFHEAQQLKQDTIDSVMNTNVVLNKIYDNMNIMLRLLNMDQFKPPELTVPSLAKDEVIKQIMEVDDSEVKAINRRKPKTIDTGGKKGRLLLWSKEFWARALIVMMDGVLEKLWEEEIKKDIPEPEFMQKKQPHEFNLEEQKIFRAYEEAVHLLELDRRKYLRILHENEEKTLALKASQILKLNQRGQLRMLTLEKINFGRVQMRKRYNMFRKDIDKLNDYMTRYSNLLDFYDKAFLDVKTRLEAQQTRDRAVERQFRSQFLPLVPHATHEMTKLFKKRPKLPGKVFNSVLICMEASNKLSGKPSHRTPFPLPDDVLEFLNYLAEFDQPKQCPPNVDPKSWDAFVKLRRQKTESELRLKGIGYQLLDSQALLGVLNKDLAALKESKILTQRNSEDSIQTYLEKMRNMTIQLTLTMGQVEVSVMGQFTKLSNTVLMHVDDINDVNRQIQEAGNKKIKAMQRVAVFRRQVIFKEWEHKLYKANIAYLKYMLDAIEKCKVSMEFLNILRNWEKVKTERQKYIAGAIERVIEQKIAVFRKNIDRVNIKIDAVKAQTLEIKRSNHAIDFKIERIKVDVTFQNTLRDTMMEDKRDREQRERMSQIKTHRQLMENVRRNYAHVLELQTILELLRLRTYPTLGPPLPQCHPPVPEHILSSVP

SEQ ID NO: 33799 - DNA, 2301 bp, DROSOPHILA
agcttcatcagtgaacacggcgtccgctgcttttgagctttgcaacgccttttaattcaattaagcccggcttttgtgccacgcccccttccaaaacgaaggttggcaataggcaattaccagtaatcgaatttggggcgcagcgaaatccgtttgaaacaataaattttcctctgtttgctgggggttgcaaatgcggaaaacccttgtgggagaaaacctctggaaagaatacaagccggaggaggaaaatgcaaaatgcaaattgagcgtttcgcgttgggacattaaacttagtcgcggcttaggcggcttaagccaaaagctcaactttcacttaaccgcagagtgccgaaacgcacccccacactgccgcattaattcctaattaaatgcaagtctctcggcgagggtggaaatcaccgggacttcatttgcattttacagcagatctggacactcggccatcctcggacaatgacaagcggatgtatttcatctcagtggcacaggacacggcttccttcttctgctgctgctgctcctttatcccttgtaaatatttcatggctgctggaaaacaattcctgcccgtcgctcagctgttgcacttgctgaataaattatcagctgtcattatggcttctccggtgcaactccttcacgccttcatttgtcacccgactgcgtttgacaattaaaaatcgcaattcgccaggaaatgcggggccactctagagtgttgaatgcaaagatgtcgaaatggaccgccaaaaacaaaacctgggcaaagaaaactgttgcagagaacactttactgctggcacagaaaaaatatctttaattttgcattacaattgttaatatagccattgccaactattgcgaaacttgtttacatattttcgaataattaaaattgcgctttgatcgttgacaattagagggcagaaggcagaacgcaaatcaataaaaaaaaacttaaaaacatttaatgcaattatggatcccgggccacggctttattctccttgtcattccagtcgaatgacggtggcgccacctcagcaacaggattctgtggctcacggattcccataacctgatcgctcagtgatttgttttcgcgcagaatgcggacatatctgagtgcatactgcagctccgacatgggcaggtcatgctcacgaatgaaggacatggcctgatcagtctcctcctccgtgtatacctttaattcaaaatgaaaagtcgtaacttacgaaatatcttattggacaaacctcttcttcggatgacatcttgattttaagcagtattattattttgttttttttttttcgtttgttcgcttctactgtatatgctatgtgatcaagcctgcgaacgcagtgaaaatgttttactggcctactgagcgacactttatcccataatgaaaaaaactcatgaaatgtacaaaaatgattcggcattgccaacacaatacagcatgcggccgaaactgacccatcaacactttggcattgcctttaatatggtctgggaatagaaacagcagcaggagcaggagcagagccggaccaagccaggacgtcaccccaccgaaccgaagtgaaccaaccgcattttgcatttgcagtttactcggttaaccgcttttctagcggatttaacacatttcggcctcagctgggcgacaacagaacagtggattgttttcgaccacgacatttcaaaaagaaaacatttatgattttacactctcaatttgagcttgcaaaagtgttggctccctacaaaaatattaaacttataccagtaatctttcttactataaacataaaatctattcttaaattcaataaaatttgtccatgttatattgactgaaataaggaaatcattactaatatattacagattattagcttagcgctaatgccatttttgtttcaacttttatgccctttcctccactgtggctagttggggcaaaagtgaaaactagttcagctgcccaaaacatgccaaaatgtttgaatcgaacaatcaacgcagagagatggattcagagggggtttgtaggaatgaaacgttggtggatttggagccaaaatgggcatagctcatatcgagtggctgcatgcatttgccatttcctcggcaatccaacgaacccgccacccatcacagagtgccacgcccactcatatgtcaatggggcatgcatttcatccgaagttttttttttggtttttttttttttgtttttatgcctcacaaaacccgactcgactg

SEQ ID NO: 33800 - DNA, 249 bp, DROSOPHILA
atgtcatccgaagaagaggtatacacggaggaggagactgatcaggccatgtccttcattcgtgagcatgacctgcccatgtcggagctgcagtatgcactcagatatgtccgcattctgcgcgaaaacaaatcactgagcgatcaggttatgggaatccgtgagccacagaatcctgttgctgaggtggcgccaccgtcattcgactggaatgacaaggagaataaagccgtggcccgggatccataa

SEQ ID NO: 33801 - protein, 82 aa, DROSOPHILA
MSSEEEVYTEEETDQAMSFIREHDLPMSELQYALRYVRILRENKSLSDQVMGIREPQNPVAEVAPPSFDWNDKENKAVARDP

SEQ ID NO: 33802 - DNA, 2159 bp, DROSOPHILA
agtgccactgttttcccctatcacccgaacactaactgcaggtgtaaactggcccactttgttgcatgtgccgcttgttgttaacgtctgtggttccgcctacccctccttctcgacctgctgacgatgatgatggcgatggcgattgttgctgtggctaactggaactgactaactgtctcattggttaaaggccttggccaacgtcctcgacctacccacctgccacccttggctcccttggagtctccatcatcccgagcagcaaaactggaagggtctgggagccatctaatcagaaatgcaattataaggccaaatgacacagcctttggagctggcagaattgagtaatattacaagggaatgtgccatgctagaaaatttgagcttcaaatggagtcacaatccccctctagaatataaaattttttctgtacgtcgatcataagtttcatcaatgctgattaggcgagactaaaataatttcgcgtttcacagtgcaattacgtaatacatatttggtataaaaagggatcttggcaccaggtgttgctggtagcattgcttagtttgttggcaatcgccacggctcaaccaaaggaagcaaaaagaaatttagaagggcttcgtaccaccgtaccctattagcccagtttgcacacatcatcagtgcagtgtctaatgctagatattataggtagataaaaagacacagctttctgcaataaataaattgtcgaccaatatgctattttgtttattattgcttgtactctttgttgtgtggcaatataatagcatagcatctactatcaagggttaccacctctaaaatggagacattctaatcaggatcatcgtggtagtcgatccatctgagcacgttgtatcatcgcattgctcgattgctatattttaataatatagtggcataaaaagtagattaaaacttgtttgattttagctcttgcttaggttaagatatccaagtgcgagtttaatgtcctagtgtgttccacatttgcattgtcttcatttgtttctgcggtgatgaggacagcactgttgtcgtcatagtctccttgttgggccattgtccggactccaatccccggactcctatctccggactcctatctccggactcctgactcattgttggccctttgtttttgcgcctcgcgtgtctaataaaagcgcatcacaatgtgggtcattgtacgacgacacaggccagtcggcatcacatgactttgcatttgtcagcagcatgcaactgctgcaacatcaacacataaagcgctgctaattgcaaacgttcacatgccgcacaatcggcaagggccatgcggagaaaatatttattttccgatttttttaatttaaatacacgaaaaacagcatgagaaagttattttttgtaattgtaacgatttgctattttgttattcattaagcaagtacgcatatcggtaaatttttttcagtgtcttcactctttgttccgcataagtctgcaactgctgcaaaaggagtaaaggggggaaaatctatggaaagtgtgacaggcatagtaaatcgatatggactcctaaataattcattcctggattaattatgattgcctctaaagtcttcctgcttcatcaattcacttaacgcaagtaaacgacacatacttttgagcagaattggacatttgaaattgtcccccaaaaataggcaataagaagatgttgcacatattatctacatgtatctacatctgagcaatgtaaaatgtaagacaaaacgttagggattttaagacattttggtgggtgggtttattttatattaagctcaaatattcatatcttaacatcttccaccccaggcgggccccaaattaagacggcaccacttatcacctacgaaagaaatggttacgctggttaaatggttaaatgtcggaactggagaggaaacaacttacgaggattggggcttggaattggaaactttgtaggcttcctattccacggccattcccaggcctggaccaagccgagtacgcaaacgagaaccaagaatagagctagagttttcatttttacaccgacattcaagctaatcggctttttataggtctgaacactaaataaaatatgcgtagc

SEQ ID NO: 33803 - DNA, 159 bp, DROSOPHILA
atgagtcaggagtccggagataggagtccggagataggagtccggggattggagtccggacaatggcccaacaaggagactatgacgacaacagtgctgtcctcatcaccgcagaaacaaatgaagacaatgcaaatgtggaacacactaggacattaa

SEQ ID NO: 33804 - protein, 52 aa, DROSOPHILA
MSQESGDRSPEIGVRGLESGQWPNKETMTTTVLSSSPQKQMKTMQMWNTLGH

SEQ ID NO: 33805 - DNA, 2873 bp, DROSOPHILA
tcgcatatacttttcagcacacaaatcctgccctgatagcccaatcgatcggccaatccctctagtcccttgtagacagtccatcgatagctactcaagactttgttggtcctggtcaacagcttcctggtgttcttgcccaattcatccactccaaccaaaaagttctcaaacataggtttcctctgctttctggctccggtaacacccggcgtagccacctgtgtgaggggcagagccgtgggtgttctcagatcatccggagtggtgggcagccaatactccacctttaggacatagccggtggtcaccgcctcgtagttgagatcctccagcggaatacctatgccgccaatgaactgggagaagaacaaagtgggctacaaatgggatttcttgtcaaccaatagattatcttaccatgacgcgagtgggtgatgtggtggggtatataagccaaggaatgggagctcttttactcctctgatgcttgaagaggctgcccagggaggccatcacctggtacaacaggcaactgaccaatatgaatactatactaaatttcattttcctgttattataatttggtgttttttttttttggtctacgcccgagcgaatctcagtgcgtgttaatgccagctctgtttttaagatactaatccattttctgggtgttctttttctagttcacgaatttttcatttttgatttctcaataaaaacggctccatcaatcgagcccacaagactttctcgcccgagaatgttacacattctagcaattagcacctctcgcagtagacaactgcgatcggatggagacgaggtcaagtggtaaccgtgtaaatcttgcatattccggtttctttctcttaactcggtagtaccgtaagccacttctcacccattcattaactaccaattttgacgcccatcgtttggtgcaacctgcaataattcgcaaactgcacttagtttgtctggagctcgggttaagatgggtgcctttcgctggcagttttacttgggtggagttttcgttcttggcttgagcttagcacattgttttctggtgtttcctcgtcagggatcctttggtgtgagtattgcaggtgattcatctgaggggtgtaatgattattgacactattatttagctactggctgctgtagccattccactggaactgggtcccaaaaatgtgtacatggccttcaactttgagtccaactatgcactgccctccaacgattcctacaatcagtggattgacagggtgagtatgtttaaaaatttaaattatataatttatataatttaatataatttataattattatatttaagtgggatttggatgatcactatctgggcgtcggaggcaatgtgactcccataaatgcccgccaggatggaggtgatttttcacaggacgaggacaacgaggtgaggcgtcgctcggtgggatctccgcctcccttcaggcgccacgacttctaccgcagcattataaacttcctgacccactacggattcaatggctccgcctgcctgctgcgaacaatctgcgaggtcagcgaatcgcccctggatgatcaaaacgggctgctgggcagcctgtttcagattctattcatgtgagtctccctccagctcgcttgcttcaaggggtcaccactaattatgacatccttttcccccacccgccaatttttccgcaggccaacgacaagtgccgcggagcaggaactgcagcacgtggacgagctctacaaggcctccgatgcgggcacgcatggcccgggatgctccgagtacgtggcccactgcggacatagtgctctggacctgataagcattgtgctctgaatagccatgttggcgactagatttaaatttaaattttaacttaactaaaacgcagcttcagactggaagaattaagtaaaactacttaattttcatcagtatctgcgatacaacaagaaaacaatcaaaatgtgaaatatttttataaactatatgtatttatttttgagttgcacgccacatgcacttctggttcaaaggctatgttcatattatttttgtgaaaccttgagagctttaaaatttccaagccacctcctgctgcgccgtgaaattttttaatatcgcttaaagagcttaaagacgacaacgcaacaaagcagatgaggccaaaaaaaaaaggagacctaagctggccgcatggatatggtttggattttggcctgcttaggggtttttcagatgggtttacctcacgtcggacatgtgatgatgatggccctgctttatgttttcgagttcggtgctccgctttttgttagctctttgatcgctttttccgctccttttgtgcaaatgaagtcgcccctgctccgcatcctttgtctgagtatattttgcggtctccttcatttcggcggcctgtcaacaataccatagaggagtctgcttttcctttcttatttgtttgtttgctatttctttgattcgatttgccgccttagagtcggccccgaacgagtcctggctgtggtgagagcgaattacgccttctttgattctgccaagccattgaaatcataattagaagacaaatgattcttctgttcctctcaagatccccgaacaatggccaggcatcgaagctgaagtgcttatatacgccactgtttgagaaaggtttataaaaatatatatatggcaaaaacgtctttgggtactaataagcttaagcgatgtgttgaaagagttggagtttgggtacacaaagaccctaaggtacgatcccaaaaatatatatttgccaatcaaatctttgattgtttgcataaacaaagtt

SEQ ID NO: 33806 - DNA, 660 bp, DROSOPHILA
atgggtgcctttcgctggcagttttacttgggtggagttttcgttcttggcttgagcttagcacattgttttctggtgtttcctcgtcagggatcctttggtctactggctgctgtagccattccactggaactgggtcccaaaaatgtgtacatggccttcaactttgagtccaactatgcactgccctccaacgattcctacaatcagtggattgacaggtgggatttggatgatcactatctgggcgtcggaggcaatgtgactcccataaatgcccgccaggatggaggtgatttttcacaggacgaggacaacgaggtgaggcgtcgctcggtgggatctccgcctcccttcaggcgccacgacttctaccgcagcattataaacttcctgacccactacggattcaatggctccgcctgcctgctgcgaacaatctgcgaggtcagcgaatcgcccctggatgatcaaaacgggctgctgggcagcctgtttcagattctattcatgccaacgacaagtgccgcggagcaggaactgcagcacgtggacgagctctacaaggcctccgatgcgggcacgcatggcccgggatgctccgagtacgtggcccactgcggacatagtgctctggacctgataagcattgtgctctga

SEQ ID NO: 33807 - protein, 219 aa, DROSOPHILA
MGAFRWQFYLGGVFVLGLSLAHCFLVFPRQGSFGLLAAVAIPLELGPKNVYMAFNFESNYALPSNDSYNQWIDRWDLDDHYLGVGGNVTPINARQDGGDFSQDEDNEVRRRSVGSPPPFRRHDFYRSIINFLTHYGFNGSACLLRTICEVSESPLDDQNGLLGSLFQILFMPTTSAAEQELQHVDELYKASDAGTHGPGCSEYVAHCGHSALDLISIVL

SEQ ID NO: 33808 - DNA, 4051 bp, DROSOPHILA
ccgatctcactctggacccagacgactgctgactcctgtcaaaatatattccagctcttatcggaactttgtcatcacagacaagtgcctcggtctgggaacttggatttgggtcttcttagagagaaagtccctgccccacagcaacagcagcggcactactaatttttagtagccacatttttgttttctgttgtatattttgtcaaagctaattagtacgtaagggcattaactatgcagcccgccagtgatgaatatatgactgagcccgaagatcccgcaccgagtgtgaaatgcatattttcgtctttcatttcgggtttcctcgagtcattatgacattggcattagcataatacgcgtattatgcgtattaattacagcgcagacatttgcatttaaacgcctatttgtcccaggtaccgtggacacaaaaacacaagaccctcgcccaagacggtggtgggtctgggtcccaaaacaatccccggtagccaaagctcgggctgtaattattgaattagaagacaatagggcctaaagaggttgggaccaagttgggagatgcgtacgctttgatagccggagaggagaaaagaccacccgagcgtggagatgcatacatatatccaaagatgatgatgaggcccagacaggagaacaaaaagagttattatgtggatatttgcataaatttcacgcccttgccggtgaaatcaaccggagaggaagtgccaagggccttcatagttctcaaagtccaaaaggcatatacggaagcaggcaatcatctaatataactaagaatataatacggagataggaatcaaaaagttgcatataaaatgttatacttacaatatagatactatagaaagatatacaaaaaatacttctttttataaaagtatattaaatttataatgcacagcaataataatttaataagctattatatataaatatcacaatcattcgccacaaattgggccccatctcaacccagcatgctgaggaactcactgcccaaatgatgcacatcgctgaagtgctccagcagggacttgggacacctcggatacacctgatcgcaatcgccaccagctgctcccaatctctcagcctgcaggtagtcattgtccgagtgctccgacaagggatccaccgagctagatggtctgaaagggagttggggttaccataaggccgatcccacgatcataaactcacgtgagcaggatgtgaagcacttcgcccagcaaaccatttcgatcgtcgaagggagccgcagcactttcgcagatgctcttcaggacacagactctgccattcagcttcatgcgaatggccagagccgtgaaagcctcgtaaaccgaccaacgatagctgcccagggcctgcagatcctcctgcaggatatctggatcaaatccaagtttttgttccgacatctgcatgaccttatcgaagatggtcgcattttgtagcagcctactttcagagatttcatgcacatccttggtcctcaattgcttggcagagtatggcaaataatattgagctttcagaacataacccgtaatgacggattcaactttaagatcttcggcgggtataccaaagccagcaatcatctggaaagtaatattattattattattttgaataagtctttagttaattataacctatttaaaaatgaaatcatgaacttacctgcaatcgagttggattagctctaggataaatcaagggcagccatcgggcttttcgcactaaaatatcactctcacttctaaaattctcagtattgtttggagtgtgatatccaagaactccaacaaaactattaattacgagcactgttatcaacacgttcatgataaagtccttaagaatatttcctagtgcttagtaaccacgtcgcttcaaagaagactgatgactaaattagcaaacagcaaaatgatttcaccttaatagtccagggaatcaaacttcttactttcttcgattaggaaaccgaaagtgtcattagctgcaatttatatggcacactggagtcacgatcagaatggagacgattttttcagcttccatgttgagctttttgtcttcactaaaagttcacgttcttctaattagcactagaccatttttgttactatcacaaagtcccatttgccacaaagaacactgagcgaaaaatttggtatcagttcagccttcgtttattgcctcaaaacaagatcttatccagattgtgatgaagttcgctaaagtgttgcaataaacttcgtcgacactccttgaagacccgatcacatccagctccggattgtcccatcttctccgcatagtaatactcgttgtcagcatgttccgacaacttgtccaccgaggaggagggtctgtggttacgaggcaattataagatggttaagatgtttttccattacaacctacgtgagtaatatgtgcaatagatccgcaaagagtccatttgtgtaatgaaagggttcctcggccgcctcgcatatacttttcagcacacaaatcctgccctgatagcccaatcgatcggccaatccctctagtcccttgtagacagtccatcgatagctactcaagactttgttggtcctggtcaacagcttcctggtgttcttgcccaattcatccactccaaccaaaaagttctcaaacataggtttcctctgctttctggctccggtaacacccggcgtagccacctgtgtgaggggcagagccgtgggtgttctcagatcatccggagtggtgggcagccaatactccacctttaggacatagccggtggtcaccgcctcgtagttgagatcctccagcggaatacctatgccgccaatgaactgggagaagaacaaagtgggctacaaatgggatttcttgtcaaccaatagattatcttaccatgacgcgagtgggtgatgtggtggggtatataagccaaggaatgggagctcttttactcctctgatgcttgaagaggctgcccagggaggccatcacctggtacaacaggcaactgaccaatatgaatactatactaaatttcattttcctgttattataatttggtgttttttttttttggtctacgcccgagcgaatctcagtgcgtgttaatgccagctctgtttttaagatactaatccattttctgggtgttctttttctagttcacgaatttttcatttttgatttctcaataaaaacggctccatcaatcgagcccacaagactttctcgcccgagaatgttacacattctagcaattagcacctctcgcagtagacaactgcgatcggatggagacgaggtcaagtggtaaccgtgtaaatcttgcatattccggtttctttctcttaactcggtagtaccgtaagccacttctcacccattcattaactaccaattttgacgcccatcgtttggtgcaacctgcaataattcgcaaactgcacttagtttgtctggagctcgggttaagatgggtgcctttcgctggcagttttacttgggtggagttttcgttcttggcttgagcttagcacattgttttctggtgtttcctcgtcagggatcctttggtgtgagtattgcaggtgattcatctgaggggtgtaatgattattgacactattatttagctactggctgctgtagccattccactggaactgggtcccaaaaatgtgtacatggccttcaactttgagtccaactatgcactgccctccaacgattcctacaatcagtggattgacagggtgagtatgtttaaaaatttaaattatataatttatataatttaatataatttataattattatatttaagtgggatttggatgatcactatctgggcgtcggaggcaatgtgactcccataaatgcccgccaggatggaggtgatttttcacaggacgaggacaacgaggtgaggcgtcgctcggtgggatctccgcctcccttcaggcgccacgacttctaccgcagcattata

SEQ ID NO: 33809 - DNA, 1323 bp, DROSOPHILA
atggcctccctgggcagcctcttcaagcatcagaggagtaaaagagctcccattccttggcttatataccccaccacatcacccactcgcgtcatgttcattggcggcataggtattccgctggaggatctcaactacgaggcggtgaccaccggctatgtcctaaaggtggagtattggctgcccaccactccggatgatctgagaacacccacggctctgcccctcacacaggtggctacgccgggtgttaccggagccagaaagcagaggaaacctatgtttgagaactttttggttggagtggatgaattgggcaagaacaccaggaagctgttgaccaggaccaacaaagtcttgagtagctatcgatggactgtctacaagggactagagggattggccgatcgattgggctatcagggcaggatttgtgtgctgaaaagtatatgcgaggcggccgaggaaccctttcattacacaaatggactctttgcggatctattgcacatattactcacaccctcctcctcggtggacaagttgtcggaacatgctgacaacgagtattactatgcggagaagatgggacaatccggagctggatgtgatcgggtcttcaaggagtgtcgacgaagtttattgcaacactttagcgaacttcatcacaatctggataagatctttgaagacaaaaagctcaacatggaagctgaaaaaatcgtctccattctgatcatgattgctggctttggtatacccgccgaagatcttaaagttgaatccgtcattacgggttatgttctgaaagctcaatattatttgccatactctgccaagcaattgaggaccaaggatgtgcatgaaatctctgaaagtaggctgctacaaaatgcgaccatcttcgataaggtcatgcagatgtcggaacaaaaacttggatttgatccagatatcctgcaggaggatctgcaggccctgggcagctatcgttggtcggtttacgaggctttcacggctctggccattcgcatgaagctgaatggcagagtctgtgtcctgaagagcatctgcgaaagtgctgcggctcccttcgacgatcgaaatggtttgctgggcgaagtgcttcacatcctgctcacaccatctagctcggtggatcccttgtcggagcactcggacaatgactacctgcaggctgagagattgggagcagctggtggcgattgcgatcaggtgtatccgaggtgtcccaagtccctgctggagcacttcagcgatgtgcatcatttgggcagtgagttcctcagcatgctgggttga

SEQ ID NO: 33810 - protein, 440 aa, DROSOPHILA
MASLGSLFKHQRSKRAPIPWLIYPTTSPTRVMFIGGIGIPLEDLNYEAVTTGYVLKVEYWLPTTPDDLRTPTALPLTQVATPGVTGARKQRKPMFENFLVGVDELGKNTRKLLTRTNKVLSSYRWTVYKGLEGLADRLGYQGRICVLKSICEAAEEPFHYTNGLFADLLHILLTPSSSVDKLSEHADNEYYYAEKMGQSGAGCDRVFKECRRSLLQHFSELHHNLDKIFEDKKLNMEAEKIVSILIMIAGFGIPAEDLKVESVITGYVLKAQYYLPYSAKQLRTKDVHEISESRLLQNATIFDKVMQMSEQKLGFDPDILQEDLQALGSYRWSVYEAFTALAIRMKLNGRVCVLKSICESAAAPFDDRNGLLGEVLHILLTPSSSVDPLSEHSDNDYLQAERLGAAGGDCDQVYPRCPKSLLEHFSDVHHLGSEFLSMLG

SEQ ID NO: 33811 - DNA, 4523 bp, DROSOPHILA
ggaaaaggttaaaaagaagcgaaacttgttctttttgaaaatgtagttgggggctggttgagttgaagtgtttacgcatcgaacaattgaaatttattttatataaatttgtaacctattaagtttctattgccatatgtgagcatttcaataaataaagtatatattttcctttagcaacagaactttggattgagaacgacgaatgcgaatcatattactatataactctgggataataatttttaaaataaaacagaagcgaattaatcagttacaaattctaaatcttaaccttaaaaaacacaaagctcccacacattttaattattacttcggttctgtgatatattattattatgtttagttagtggagctagtatgtttttgcgtagagctatcgataagaatcgttgaatggttaatgtcaggcgctggaaattataacatccctaaaccgataagacccattaatagaatgtatcagtaataagatcgtacaacagcgcaaacaatcgcggtacgctgattgacttcccctagaaaaccaacttcaaattgcaacactatcattaacaataatgaatcgggttaaaagaatatctaattactttgactctatgctacccctgatcgataatattttgcaagtagtgaatcagatcttcgatgattacacttcctttgatggccaaaagctcatgcacttataccacctcatttacaagcagtgcgcggcggagcgcaattggaataatccagcccagaagaacgggagaagtctttacattgtgctatccgactgcctgatgaagcgactaaaaaacatagcatgggtaatggagaaccaactcgacgacaacaaaccaattcgactgatcgccaaatatttagagcactgggtaccctatcaaaggtcatgtgagaaactgaacctagcttgctaccacttcaaccgcaactgggtggaacgggagcggcttaagggagacaaagaaacttatccgatatatcgcttggccatgattagctggaaggagctggtcttcgagcccagcgtcacgattctcgccgccattaggctgattttgagtcagatgcccagggaatacaataaatcattggaataccaagtataccaggtgctccaatccattgtggaactgtacgccaacgataagtaccaagatgtgtccttgccttctaggatagacaaaattttcactgagaaggtgatggatttctacaagtcaacgacgttgcacgaattccaaaagatcgtcgtatccaatgactacaaggatttcaagcatttccttaggtacgcatgcctagccatgccagaaattgagaatgggacacaatttaaggcaatactaaaaagatacctcgctgcgaggctgcaggagacgaggctgtcaggcaaggattatatccaagccttcttgggactttgtcgcggtcctttgcagcgagcattgcgggaccacacaaaattggcggaagtcgtggatgcggtgtgcaaagaagaaattaatagaaagggccagataattgaccccacccgtctgcttgtcacatatgccaacgaacttatgaccaaaaggcaggagtccgaggaagcaattattgatgaacttaaacggatcgttaaatgcgtggagtttttaagcgatgagtacaaatttattgacatgtatttgaaagcacttcggattcgacaaatcaatgaaacatccacctcggacggcgttgagtccataatgtattcccttctgaataaaaaaatggcaaactttgtaactagatgtatatatgtgcagttaagagatgtagataagttgagaaccctaaaaaaagagtttcaagatcacttgaatagcaaggggatcaagttaggattcgattttcgtccaaaatgcttcaaaaatgatgggagttttgagaattttaacctcacgttgcccgacgaactgcagcaagcttggaaggagtttcgtattttttacgaagcaagaaaattacaaagcaaggcaattatacaacttaataacgaattatcctctggtgagataacctgtcatttgaatcagtcggtctatattctcgaggtaagcactttgcaaatggccgttctgatgctattcaatcggcatgaacgatttacggagcaggaattggtgactgctttgggagtcgagctggagaccctccaagaggtgagtaataggttatgtatagacattactcttgacttacctataaaattatttttttttcttttcttttaggcattaaaacagattaagtttctggtttatatcgaagtaaataaagtaaattatatagaaataaacatggactttacaaaccggaaacgccgactcttctgcaatgagcccctgcccagaaaaatgagaaagattgaagagaaaagcgaaattgaattgaaaatacggcgagacaagcaagtggatgctgcaatagtgcgcattatgaaaggtcaaaagcaactggaatattcggaattaatttcactcgtttatgaggagcttaaagatcgggtaaagccacaagtgagttttatcaagaaaagacttgactacctggtggagcgtgaatatttggaacgtgataattattataatatttacagatatttgtagtatagaaaatgaaggtatacgattttaataatttgaaaaatattttgtataattaacaaaacgaagcaaataaacaataacaatatatatatataacgtttatattgctaacgttacagcttagttattttaattaaattactaaaataaatttgagaataccccttgataaaatcttgcaagtgattgtatagaactaaatagctaaaggctacatcctcgtttaatttgacgcatatccgttctgagccatcagtctcgaaatctggggttattaattcgcttgtataaaggcgctcagcatggtgatccctcaggtgcttctccaggtgcgattcgtttgagaaggcaatggggcaatagaggcacaggcgttgttgatgcacacgcatttcgttgagcttcagcatcccagctctccgtcgagatatcttccaccttggagtgggtgagtagtttaactcgaagttgggcttggtcctggagtctgtgggtttcgctaaatccagttccgctatgctctcgcccttttgccgtctgacgtggcttctatggaggttaagaggaatgttaaaaccaatcctaagtcacctagtccttaacttactcactttaagcaatgacttgtaacgaaactttcgagggaagattttgcagctgaatcgatcgcaattgatgtcccagcatgcgtgagatgaaaagttgtcgatgggaaaagcctccaagcacgtagaacacatttttggctggccagccaattgatagcttatctcttcctcgtctctttgattgtgctcttcctcatttggatcctccagggcgaactcctccttaaccagatcattaacatctaacataattactgcaagatggaagcgttagaaatgtaaacgtttttttcctgtttttaagctcaccctcttataagccagtctgggaataagataaatctgtgggattttccgtttttatgaaattttgacatctatccttaatatgttctgtattctttatcatttgttcatttgtatcttcagggtccggttcatatttgatggtgttttgacagtgactttgtttttctgaattttcttctaatatttgtgctcctccagattttcttaaaaactttatttatttattaatattcaaattatttattatttaggttttttggacagctgatcagtcattgcttttaaggtgaccagttttttgactatcgatcttcattgatcgggcctctatcgtttcgatatcgatataatttaagggaacaataaatcattattgggtcattatatttttgtaatgtaatgtaattggataataaaaaataaaatatagttccgttgtgtttgatcttttttgtattacatgggacttcttttaataaatgtttcatttgggtcttaaattagctaaaatgtaaaactgtaagggtatgtaagcaacggttttctttttaggtatcttacctacttcttataagatatttatgtataaaagaatattcttataaatatatagagtcgatgaagtggccgaatgattacactttagatattgtattcttttagtttcataaaaaaacgtgatttttgagaacttttaagaaaaaaaattttcatttaataagagagcatatcatgcaagtcccttgacctatcatgcttgacctcatatatgcatatatgagacacatatcagcagaagctattacattacattcctgccaaactaatcccttaccttgcgacccatttggtgctctcctagatctgctcgagttccttgtcggcctttttgcagaatgaatctaagagttggaacccgaagctactggcaggtgccatg

SEQ ID NO: 33812 - DNA, 702 bp, DROSOPHILA
atgttagatgttaatgatctggttaaggaggagttcgccctggaggatccaaatgaggaagagcacaatcaaagagacgaggaagagataagctatcaattggctggccagccaaaaatgtgttctacgtgcttggaggcttttcccatcgacaacttttcatctcacgcatgctgggacatcaattgcgatcgattcagctgcaaaatcttccctcgaaagtttcgttacaaaagccacgtcagacggcaaaagggcgagagcatagcggaactggatttagcgaaacccacagactccaggaccaagcccaacttcgagttaaactactcacccactccaaggtggaagatatctcgacggagagctgggatgctgaagctcaacgaaatgcgtgtgcatcaacaacgcctgtgcctctattgccccattgccttctcaaacgaatcgcacctggagaagcacctgagggatcaccatgctgagcgcctttatacaagcgaattaataaccccagatttcgagactgatggctcagaacggatatgcgtcaaattaaacgaggatgtagcctttagctatttagttctatacaatcacttgcaagattttatcaagggcctaatggcggcgagaatcgtgacgctgggctcgaagaccagctccttccagctaatcatggccaagcgatatatcggataa

SEQ ID NO: 33813 - protein, 233 aa, DROSOPHILA
MLDVNDLVKEEFALEDPNEEEHNQRDEEEISYQLAGQPKMCSTCLEAFPIDNFSSHACWDINCDRFSCKIFPRKFRYKSHVRRQKGESIAELDLAKPTDSRTKPNFELNYSPTPRWKISRRRAGMLKLNEMRVHQQRLCLYCPIAFSNESHLEKHLRDHHAERLYTSELITPDFETDGSERICVKLNEDVAFSYLVLYNHLQDFIKGLMAARIVTLGSKTSSFQLIMAKRYIG

SEQ ID NO: 33814 - DNA, 2603 bp, DROSOPHILA
gtaaaattccctgtaccagaccatacgatcgcaatagaatccaaatcaagaatatacttactttaattacatataatctataaaatagaatttagctagacaattttagctttttctagctaaccgatctatccgcctgatggcgccactcaatacaaagcttcatactttcaatcagctgatgaagctttttttttcacgaaacaatccattccattggcataggtcagtatgtggtatacccggtaaaactggttgtctaaccaattgctgactagaacgtatctaatctgagggaaaataacaatattactcataacataacataactttcgacgcgtcttgggcttgcgattgattagaatggatattcgtatacagtgttttttcaattgtttccgtaatgggtctcgcaaatatagaagagctctacaacgactgtctataccatatatttgactttttgaccactgaagatcgcattattttcgcacaagtatgccatagatttcgtcagctttttataaatcattgtgctgctaaataccgcgtgtataccctcgataaagacagttcacgacttgaactgatacaattttgtatttgtcgcgagacagtagagtgcttgaccattgacctggatcacttcgatacggctagatgttatagaacctatggatgtgaaactccagaaaactgttttcaaattctctgccagactttggccggtatgctaaggctagaacatttggtagtcaagcaggaatcgatgctagttacaccgattcaaaagccattcgatcaaatattgaccgccgtcagacatttgccgaagctcagaagattggaaattcgtgctagagacggtaagaaaatattatattcctttcaattctgaattcatttcctgaaacacattttttctaacagctaattttcgaactatatagacagcagcttcgaccgtgtaagccaactttgccatctcgaagaattgcagatgctcgtcccaaaaatttcactcgcagctctggtgaaatgttgcaggtccagtggcaatcttcgcagtcttcatttgggctatgcctgcatacagaagaatttgagccacatagtgccgcattgcaagaacttgaaggtgctcaagtttggcatgcccgcgaattcttcagaatacgtgcagctggctaggctgccgaagctgggggaactatcctactttggcattcgcagaagcggctcctttgaaccacttctctcagctctagctgccaaatctcagttgacacatctgtccatcgacggagggagtcttactatgcaggagacctgccagttggttcgcatccagagcttacggcatttcaagggcttctactcaacgactgactgtgtggagatgctgggttgtctggccaatctggaggagctatgcgtctcgatattctgcccaacggatatttccaataatcttctgccaatcattgcaaaatgcaaaaatctaaagcttctgcaaatttcaggaggaaatgtcaatacaaagtccctaaacgatgctattagccttagaaaatctgaaccagttgccttagtcttaaaatagattaatagatatattttcaatacacttgtagaaatcttaaattttcaatttgagattaaaaagtgcacttcaagttgtaatctggcattattcaagataatacataaatatacgagcctaattttctcaagatctagaacactttgccgctcaaagaactttaaaagtatgtcgcaaatttcgcatactcaagtgccaaagcaagaatatgatatgagtatctcaaaaatagttgagcaagttgttcgcccttctgggggaacgatgaaaaatgcactttgtaattctcgtagctcgtcagtgtggcacatgcaacgtcgcccattcgtcgcccggcacttataaatgtcacattagagtctcattcttgtggagggtggtggggggaggcgggcggagaagaggactgcagctcgttatacttccaaccccgcttaggcgggaatgggcgtggttctgccggaatttcttcttccagttgccgtaataagagtttatatttcagtcacatacaccttattcgtgagatttcgtgttcggaatattggcaacacttgacccaaagaactggtggctaatgtggattattttaaagtccaacgtgatccgctgagttttcaattaattacaatctgtcggaaattgaagagattatttaaataattttgatttattttttatttttctttgtgtaacatttaagttgattgcctaaacattttgaatacaaaactacgatcgcgttaaattcttattattacaataagtcttaagcttagaaattttgtatcctaccaagaacttggaacttctcaatggagcaagttatcttagtgggaactttgatttctatatttctatattaaaaatccatacatacatctcaaactgctggcctttaaatattcatttcgaattggcgtgaatatttcaactgttgctttcaccattttcagtaaaatatccatatccctgccatcagttaaaccctttttgtttg

SEQ ID NO: 33815 - DNA, 603 bp, DROSOPHILA
atgctcgtcccaaaaatttcactcgcagctctggtgaaatgttgcaggtccagtggcaatcttcgcagtcttcatttgggctatgcctgcatacagaagaatttgagccacatagtgccgcattgcaagaacttgaaggtgctcaagtttggcatgcccgcgaattcttcagaatacgtgcagctggctaggctgccgaagctgggggaactatcctactttggcattcgcagaagcggctcctttgaaccacttctctcagctctagctgccaaatctcagttgacacatctgtccatcgacggagggagtcttactatgcaggagacctgccagttggttcgcatccagagcttacggcatttcaagggcttctactcaacgactgactgtgtggagatgctgggttgtctggccaatctggaggagctatgcgtctcgatattctgcccaacggatatttccaataatcttctgccaatcattgcaaaatgcaaaaatctaaagcttctgcaaatttcaggaggaaatgtcaatacaaagtccctaaacgatgctattagccttagaaaatctgaaccagttgccttagtcttaaaatag

SEQ ID NO: 33816 - protein, 200 aa, DROSOPHILA
MLVPKISLAALVKCCRSSGNLRSLHLGYACIQKNLSHIVPHCKNLKVLKFGMPANSSEYVQLARLPKLGELSYFGIRRSGSFEPLLSALAAKSQLTHLSIDGGSLTMQETCQLVRIQSLRHFKGFYSTTDCVEMLGCLANLEELCVSIFCPTDISNNLLPIIAKCKNLKLLQISGGNVNTKSLNDAISLRKSEPVALVLK

SEQ ID NO: 33817 - DNA, 3784 bp, DROSOPHILA
tcggcttgccccatttcgaatacaccggcaccgacctaagcgagcggaaaacggaaaatcggaaaaacggaaaggcggcaaggagctggggtgtggaaaagtggaaagtgcgcttcaaatcagcaaatggaaatgtatcgaaagcactgaatagagggggcaaatattcatgataatgccaaggacatagctccacgacgggaaatgccatgaaaaagccagcggaaaatttaagaaaattcttcacgacagccattttatgtgcgttgcgttgtttgtatttcccgtgtatgtgtgtgtgtgtgtgtgtgtgtgtgtgtgtgtgcgtggcgcagaagaaaaaggattaaatcaatgttgtggaacaaattgtgttttgtgaacggcatgaaggtaatgcagccgagccgtatttgatatccccatttcttccagcgattttgcgccctcgccaacaaggcaatcgcataacgagtgtatagcatttcccgattcgaggcaccaacgtgggcgtggccccgcccccgacatgaccacacacgatgtcccatttgattttgatggcgtgaagcccacacgagcgttaataatctgagcacacacacgaaactggcacagatggttggcaaaagaatgggcacagatggttggcaaaagaatgggcaaggacgactccttcatggaaattaacttgttaggttgacaaaatctgcagaccttttctttaaagatttatttaaattccaagatttatgatgtttatgtttttttttttgtaccagataatcatgaattattcttaatagctcaaaggaaatatatgtatatatatttatacagtaatgcatttctgcaaaattgttttcaagggtttgcacattcgttgcagtgttgtgacgtgattttcactaataccaaactgcagttgtgtcacacaactcactcagtctttattgcactcacttaaaagtacgggcaatcgaaccgccaccgcccacatctaagtgagcagctcatccacttcgagaagtgggcgtggcaaatgtccgacagcccgggccaaattcgccaccgaacaggcatacagatagccattcttcaggttacccttggcgttgcttttgtgcagccagctaagccactgcaccgactcctccactggatcgcagatgatataggactcgtggatctgggccagggtggcatgtgggttattcacacccaccaaagcgattccgcgggtcggatggccctcgtcgatgaggacgcgatagaagagctggggcacggccaccacacctatgttattggcattggtggtcatgtggaggactttgctgccagccaccttcatttcgccatagatgcccgtatacacagtggccgtgatgcccgaacgggccacatattgtcgggtggattcctccagcttggaccactgaccaccattgaagctctgccattgcggcgccacgttcatgtagttgaagctgctcttctgttggctagcatagattagatccgctttggccgtcaaatgtccgcgggccaggaacagaccactcttcacgtcaatgaggccgggcaccatcagtttctcctggctcttgggcgaataaattctggccatgtcaaagcccgtgaaatggccggcggtgctaaacctcgggcgtttcaattttttctggaagtgcacattcgccggtgtcagttgatggtgggcgtagtgggtgcgcagttgatttgggtcgtggcacagctccatggtggccacaaatctgccatctccggtgtcatagcccacgcgatacaagtacgaggtggatggactcggagtgtcgctgccacaactcctgtccaatcgctccacggtgtagggcatggagtgattgcagacaaagtcgctgaaatggattttagcccccatccactcgaaggtggtgtcctgcacgcacttcacccgaatggaacgcagcttcgcatccaaagactctccattcgcgggcgcgaacgaatggctgcagtgcagctcgatgctggcgccgcgttgaacctccaggtgcccataagcattgggcagccagtagagatctgttcctgggcgcaggtacagcggctgcactttatccaaacggggcagatcattttgcacatccactctgcagggagaacctaaaatgggaagttaggtgtgttaaaagatgtggctaaaaattcttggcataattttaggcgatgacataaagattaaatattttacaacacaataatattattatatatacgaacaatatatatataacaattgtaatataataattttatattcatatatatatttttaaatatttaagtctttcttattttgaattttaaccaattttaagactaatttattttccagccctttggtgctatgtattttactttgttgaagcaggtgacttttatgtgtaaataaggttattgtttctacaatatagttttttttaagaaaaacaaacatcagacctttttgcattccaaaatgtacatatatttcattccgaatgtgaccactacagtcaaactactcaaacaaagctcagtctgctttggataaacgtatggttattaacttttaggcgaccacataccttgatgaaacatttctccatcgatgtgcagtccatcgagatctttgattatctgacccacatctggaatggttgcgatcgcctcacgtgcccgaatctctcgcagaatcacgaccgccaaaattaggccgataaactgaagcatcattttgttggaaactcaactcgaccggttaagttgctatctaaccgccgactgaattatttgtttggtgaacaggtgtttttatttatattctcagttcgtgctcttgtatcttacatctctctctctctctcgctctctctttcgttttgcttctttgtcttgtaatctctctgagaataaagatataataccattggattgtttgcattttttgagtacttccgagttctttctatctatatacctttatacatatgtatgtgtatttaggtctaggtcgcattaagttctttgcttttgtcgatcccctttctttacagagctaaaacaaaaagtgatttatctcgcgaatgatgtatctcaataattttattcaagattaatcgtcaattatatttgacatttttcttatttaataatcgaaaataatctattgttaaatgacctggcaaacaatgtatgtacacaatatattcatacctggacagctttcgattcatttgtaaatgaataatgatcatgtagatttcggggatcatttaattgaaatctaaccatatgagttgtaatcgttgttattgttattattgttgttgttataattgttatagtcgtagctgggtcgtgcagtagtgtacgtattgtagggattgtaattgttatacgtgggataagctccattcgatccataatatgaatttggattcacgcccgtacccgtgcctgccccaatgcccattggcaggattattaagggctccacaattatgctggtaccacccatagttccacctccctggggcatcattggcatcatgggcatggcacctggcatgtacggttgtcccatataaggttgtcccatatacgagggataatacgcacgccccggagatggtacattcattgaaacaggaccaggatacggcagcgctcctggcattggcattggtcctggcatgggacgcattggaatctgacgtgccgatcgattgtgaaa

SEQ ID NO: 33818 - DNA, 1320 bp, DROSOPHILA
atgatgcttcagtttatcggcctaattttggcggtcgtgattctgcgagagattcgggcacgtgaggcgatcgcaaccattccagatgtgggtcagataatcaaagatctcgatggactgcacatcgatggagaaatgtttcatcaaggttctccctgcagagtggatgtgcaaaatgatctgccccgtttggataaagtgcagccgctgtacctgcgcccaggaacagatctctactggctgcccaatgcttatgggcacctggaggttcaacgcggcgccagcatcgagctgcactgcagccattcgttcgcgcccgcgaatggagagtctttggatgcgaagctgcgttccattcgggtgaagtgcgtgcaggacaccaccttcgagtggatgggggctaaaatccatttcagcgactttgtctgcaatcactccatgccctacaccgtggagcgattggacaggagttgtggcagcgacactccgagtccatccacctcgtacttgtatcgcgtgggctatgacaccggagatggcagatttgtggccaccatggagctgtgccacgacccaaatcaactgcgcacccactacgcccaccatcaactgacaccggcgaatgtgcacttccagaaaaaattgaaacgcccgaggtttagcaccgccggccatttcacgggctttgacatggccagaatttattcgcccaagagccaggagaaactgatggtgcccggcctcattgacgtgaagagtggtctgttcctggcccgcggacatttgacggccaaagcggatctaatctatgctagccaacagaagagcagcttcaactacatgaacgtggcgccgcaatggcagagcttcaatggtggtcagtggtccaagctggaggaatccacccgacaatatgtggcccgttcgggcatcacggccactgtgtatacgggcatctatggcgaaatgaaggtggctggcagcaaagtcctccacatgaccaccaatgccaataacataggtgtggtggccgtgccccagctcttctatcgcgtcctcatcgacgagggccatccgacccgcggaatcgctttggtgggtgtgaataacccacatgccaccctggcccagatccacgagtcctatatcatctgcgatccagtggaggagtcggtgcagtggcttagctggctgcacaaaagcaacgccaagggtaacctgaagaatggctatctgtatgcctgttcggtggcgaatttggcccgggctgtcggacatttgccacgcccacttctcgaagtggatgagctgctcacttag

SEQ ID NO: 33819 - protein, 439 aa, DROSOPHILA
MMLQFIGLILAVVILREIRAREAIATIPDVGQIIKDLDGLHIDGEMFHQGSPCRVDVQNDLPRLDKVQPLYLRPGTDLYWLPNAYGHLEVQRGASIELHCSHSFAPANGESLDAKLRSIRVKCVQDTTFEWMGAKIHFSDFVCNHSMPYTVERLDRSCGSDTPSPSTSYLYRVGYDTGDGRFVATMELCHDPNQLRTHYAHHQLTPANVHFQKKLKRPRFSTAGHFTGFDMARIYSPKSQEKLMVPGLIDVKSGLFLARGHLTAKADLIYASQQKSSFNYMNVAPQWQSFNGGQWSKLEESTRQYVARSGITATVYTGIYGEMKVAGSKVLHMTTNANNIGVVAVPQLFYRVLIDEGHPTRGIALVGVNNPHATLAQIHESYIICDPVEESVQWLSWLHKSNAKGNLKNGYLYACSVANLARAVGHLPRPLLEVDELLT

SEQ ID NO: 33820 - DNA, 2420 bp, DROSOPHILA
tatatttttaaatatttaagtctttcttattttgaattttaaccaattttaagactaatttattttccagccctttggtgctatgtattttactttgttgaagcaggtgacttttatgtgtaaataaggttattgtttctacaatatagttttttttaagaaaaacaaacatcagacctttttgcattccaaaatgtacatatatttcattccgaatgtgaccactacagtcaaactactcaaacaaagctcagtctgctttggataaacgtatggttattaacttttaggcgaccacataccttgatgaaacatttctccatcgatgtgcagtccatcgagatctttgattatctgacccacatctggaatggttgcgatcgcctcacgtgcccgaatctctcgcagaatcacgaccgccaaaattaggccgataaactgaagcatcattttgttggaaactcaactcgaccggttaagttgctatctaaccgccgactgaattatttgtttggtgaacaggtgtttttatttatattctcagttcgtgctcttgtatcttacatctctctctctctctcgctctctctttcgttttgcttctttgtcttgtaatctctctgagaataaagatataataccattggattgtttgcattttttgagtacttccgagttctttctatctatatacctttatacatatgtatgtgtatttaggtctaggtcgcattaagttctttgcttttgtcgatcccctttctttacagagctaaaacaaaaagtgatttatctcgcgaatgatgtatctcaataattttattcaagattaatcgtcaattatatttgacatttttcttatttaataatcgaaaataatctattgttaaatgacctggcaaacaatgtatgtacacaatatattcatacctggacagctttcgattcatttgtaaatgaataatgatcatgtagatttcggggatcatttaattgaaatctaaccatatgagttgtaatcgttgttattgttattattgttgttgttataattgttatagtcgtagctgggtcgtgcagtagtgtacgtattgtagggattgtaattgttatacgtgggataagctccattcgatccataatatgaatttggattcacgcccgtacccgtgcctgccccaatgcccattggcaggattattaagggctccacaattatgctggtaccacccatagttccacctccctggggcatcattggcatcatgggcatggcacctggcatgtacggttgtcccatataaggttgtcccatatacgagggataatacgcacgccccggagatggtacattcattgaaacaggaccaggatacggcagcgctcctggcattggcattggtcctggcatgggacgcattggaatctgacgtgccgatcgattgtgaaattgtggtagtgttgcatcagaatccatttcggaatccgtcatcgtttcccccagagaagctgacaaatatatgtattagctattaattttaggaacgacaaatttgaaagtaatgaaataatgttcggaaggagtccatccggtgctgagtagctttgaattttttttaaccagtatcgaagatcttaggaagatccacccgaaaagggtaagttaatattgtaattataggtactataactgggtgggtacggattgtaaaatgatggaagtgagttcccagcggaacgtccattatagttcatatacgttggataggacatccctactgagaagtggagccaaggattggccgaattgggttgtccttgcatggcatattgccggttggcctggtattgaattgcgtactgtgggttgggctgaggtggaatcacatattgtggtgcaacttgacgcggctgctgcatttgaaacggtgggcgaggtggtggatacccgggtggcattgaagctggcatccccacaggctgataaggcatttgtggcgttcgccggaaacggtgcaaaactggcgaagatatagaaacgaaaaaaaaaggttgataatagattctatatttattatttgcacataactaaagctcctggtcttttagccagctaatgtgaggtagattaaatagttattggttgatgagggattggctgatctagacagggggtatccatattgaccatatgaacttgaccgcacactgggatagcagttatagtagcatggtggagtgggaggaactaattgtggcccattggccgatcgctgctgcgtataagaaggcaatcctgctcccgaattcggataacggggataagtacaggaatatgggtagagcggactgatggtacagggaggactttgtcctcgatttagccaaggatttggctgttgaggttgctgggaaccatc

SEQ ID NO: 33821 - DNA, 420 bp, DROSOPHILA
atgcgtcccatgccaggaccaatgccaatgccaggagcgctgccgtatcctggtcctgtttcaatgaatgtaccatctccggggcgtgcgtattatccctcgtatatgggacaaccttatatgggacaaccgtacatgccaggtgccatgcccatgatgccaatgatgccccagggaggtggaactatgggtggtaccagcataattgtggagcccttaataatcctgccaatgggcattggggcaggcacgggtacgggcgtgaatccaaattcatattatggatcgaatggagcttatcccacgtataacaattacaatccctacaatacgtacactactgcacgacccagctacgactataacaattataacaacaacaataataacaataacaacgattacaactcatatggttag

SEQ ID NO: 33822 - protein, 139 aa, DROSOPHILA
MRPMPGPMPMPGALPYPGPVSMNVPSPGRAYYPSYMGQPYMGQPYMPGAMPMMPMMPQGGGTMGGTSIIVEPLIILPMGIGAGTGTGVNPNSYYGSNGAYPTYNNYNPYNTYTTARPSYDYNNYNNNNNNNNNDYNSYG

SEQ ID NO: 33823 - DNA, 6116 bp, DROSOPHILA
tatatcattttgatatttcatggttgatgagttgcggtaatgattatttgcaaaattaaatcaccgaaatatgatgattattgttctgactctttctaacataaataaaagttcattaaacagcgctaattgaatatttttgtatggctgtttaaatgcagtacattaaaacttacacgattaataagttactgcctaaatatttcagcagtaggttagccgaatagaactatctattaaacggtctctgaactacgccttgaacaggggtaaataaacattgcttaacaaaataacacacactttcagccttgatagatattactgattaattaaaacgaagtttaaccgcattgttgaatccgcaacaattctaagtgaatgattactcgaccaatataaatcaattttggtttctatctgcttcatttacggtttttgccttttgtttaccccctaaaaagtccattataattattaaccaagcaggcgtatacttcatacgttctgcgacgattgtgttgcgataagataaacaaagggaaccgcacaagtaatacaaggtatttccttagcttcgataagaaaatgtgaaagtcactgccattgggacttcgattcgggccaagggactgcctcttgggctactggaacagcagaaaaaattaaggcttttggaaacgtgcggcacgtgagcaaataatccaatggctgggtaaataaatagctctaccccggccataaacgataacgtcaagcatttgataaccttactcttatcaatatgtccaacatgcaataaactccaaagagaacaaaagctaaacgtgatttcactgttttatggcccatgagaacttaatttaaacgtgcctttaagcattttcctaagggctacccttcaataaaaacctgttttctttaagatagtctttttattggttttaaattaagaaattcgtttttttttttggaaattgcacacccacaaaatctgatattaaacacccaggactccatcgacaaacaggtcttgtaaaggtaggtctttcaccactgcagtaaagtcctccacagtacaggcatatgaatagcccttctttaggtcctctttggtccaactgacccaactcagttgggcgccaatatcctggcagatgatgtactcctcttcgatttgctcaatggtggcatgtgggttgttaactccaagtagcacgatgccatttctgctctcgcgatcgataatcacgcggaagtacaactttggcactggaatcagaccattgttgttttcatcaaagtccaaatagagctcccttccaatgccatttacatccggcagggtggacacaccccatgtgcccgtatagcaatccactgtgatgttttcatccgccacaaactttctcacactgtcctcgattcgttcccagtttccgccattaaaggtctgccactgaggtgccgcattcacaaagaagaagctcgccttttgagcggccccaaagacaaagtcggtctttgcagaaaggtgaccccgagccagatagacattaccagtggtgttgaagtatggtgaggcatccatgcccaaaatctcggaaaccgtgatattctgttgaacttgggtgtacaaagtgttcacatccttgcctccgtaaaagtcgccgggtataaaggatggcctggatacagatcgctgatattggtcacttccggggtacaaaacatgatgcacatagcgggtgacttcgctcagttcatcgtgacacacgtcataggtctgcaggaagtcgtcgctcgaggaggatgacagctgaaagcccacttcaagcagatcagtaccaccattgcagggacgaccagagcgacgagcagtgtatgttggccaggaagtgcagacaaagtcctgcagctgatacaaactgcccattgccaggatgctctgctgttgccagcatgttgaattgacgaaggtataaccagagaagggtccactgaaagaattgatgcagtggaactcaagggcttctccatgttttagctgaactactccttcttgattcggttccaaatatctcgcatgacccaattcactcctgactacaaataaaggagccggatccttaagatcaccgttcactttaaagctgcacacttcattgtccaagatttgatcagtcaaaccaagaattcctgttgtttgcagttgatctgtgggcaaatccttaaccacttcgatgaaatcttctacagagcacgcataggagtagcccttctgcaggtttgctttgtcccagtccaaccaatcgatttgcgctcccacatcctcacagatcacataatcctcgagggtctccgtcaatgttatatgtggattgttgaccacaattagaactactcccttgcgactttcctgatcgataacaatgcgatagaggatcttagctactggcagttgtttggtctcggcattcagatacagaggtgtctggacaccttgtgaattgggtagagttgagatatcatagctgccggcatgtacactcacattaagtgcctcatccgccacaaattgcttcaaactggattccactgcaagccaatttccaatattgatgcttctccattgaggaactgcgttcacataaaagtgggtggctctctgggcggaactatggacgaaatcaagacgagctgccagctgtcctctggtcaaatagagatccttagtgctgtcaaagtactgactggcatctaatcccagggccgtactaaatgcatccagctggtgtgattggtcatatagaacattgacatcttcgccgctatagaagtcacctcgaagatagcccggttgagcaacacccttttggtaggccacattggccggagtcagttcatagcgagcgtatctggagatctgctcctgctgatcgtagcagagctcaacatggctaagaaaaccggcagccacatcgaagccgatgtgcaccacatccgtaccaccagcgcaagattgtcccgatcggactgccgcatatgtgggccaactctggcagacgaatcctcgaatattgaccagctgtccttcggcctcgtacaattgatcaccaacacaacgagcgctcagagctgtatacctattaaatggtgataccagagctccagtgcagtgcagatcaatggaggatccttcttccacggtgtaaagcccactttcatcgggcagcagccagctgagagctccttgcggtgttagtagtggagcaggatccttgagatcaccatttgtactaaacctacagggattggcaatgggattggcagtagtcaccggaggacttgaagtagaggtagacgttggagatgttgaagttgattcttcggttgataaagttggttgtgaagtggtagaggaagatgtagttgaagtaggttccagagtggtagacgagcttggttctgttgtggatgtaactgtggaggtaggtggttcagtggtgggtgtaactgtggaggtgggtggttcagtggtggatgtaactgtggaagtgggttgctcagtggtggatgcaactgtggaggttggtggtttagtggtggatgtaactgtggaggttggtggttcagtggtggatataactgtggaggttggtagttcagtggtgggtgaagcggtagatgagcttggctcttcggtggtagaagaaacgctagtggaactaggtgtagtatcagtggttgatggaatttcggtgcttgtagttgagctcggctcttcagtagttgtggaactttcggttgtcgaaggctcaacagtggtcacgtcgtccaatccaaggataccatttgtgtgcaggtcctccagcggcaagtccttaaccacttcaatgaaatcctcgacagagcaagcataggaataaccctcgtgcagatcttctttgtaccaagttagccagcttagctgatggccaatatcctggcacagtatgtagtccttttggatttgctccagtgttagatagggattattaatgcctattagcacaatgccttcgcgagtcacccgatcgatgaccacacggaaataaatcttgggcactgggatcaggccattgttgttctcatcgaagtccagatatagctccctctcaatgccatccacatcgggaagggttgaaacaccccaagtgcctgtatagcaatcagtggttagattacgatctgccacgaattttcgaacactagtctccactttctcccagttgcccccgttgaaggtctgccattgaggcgccacattgatgaacaggaatgtcgtgtgctgagccgccccgaagatctgatccgttttggcgatcatatgtccccgagacaggatgcggtcatcgctaaagttgaagtagggtgacgcatccagaccgagtatgttactgattgtgatgttctgctgtacttgcgtgtacttggtattcacatcccttccgccatagaaatcgagttcgagaaagttgggtcgcgccactccatgctgataatcgtagctcgatggatagagcacgtgatgaacatatcgcgttgcttccgcctcggcatcgtggcacagttcatagctctgcaggaagccgccatcctccacctcgaatcctacctggacgagatctgtgcctccattgcaatccttacccgaccgaagggcagtaaatatgggccaggcggtacaggaaaaattggcaaacggatatattaaatcatcgaccagaaagtacttattctgcaaacacgtagccgtcacctgccatcgatttacgaatggggctgcaaatcctactcccgggcagaacatatccaaaagttcaccattaaccagacgcactgtgtccgtgggatctggcacaataatttcgtaggaattgtgtcgcgaaaatagaggagcaggatcgttgaggtcgccgttcaccttaaattcacaatctccgcgcactgttacaccttcatcgccttcggcgagagattccggcaggattcgaggcaatcttccggatactttcactgcaccgctggcgaccagcagcgccaggataaaaatagagcagcgattgctccacattgctacgattcagcgaacgtaatgccaaatgtgggacatgcgtagttccctcttatatggactacttatcgcttagattacgtcttttattgtggccgattaaaaatatagccataaatatcacaaaattggtaacctaacacaaacacaatcaatgcttggctaaagataacgtcaataacctttccaaagccacttaatgtgatcacgtataaattttatttctattctctaacttaagttttgattgtaaaatattttaatacctttccaccaactaaagttgtgtttacacgtccattgaggaaattatttataaagtttttcgctaccatgttatcttatttgttaataatagtgagttcctggtcatcaagattcttatcgtgttccattcattaacctataaaccgaagaaattactcagacgtaataagccacaatctatttaccataaagttaattgcaaagagctttcaattgatgttgtatttttattgttagtggctaataataaattaactgaatatgggattaatatacaatcgcgtaataaaagtaatgaaaggaaaattatgagctggaaacgcattaagttgaacaacagaaataatattgcttccgatgatttcgaatttttattgatggatacacatccttacgtgtcacatatactttgaattaattaacttattaggataaagcaacatttttgttattgaaagctaaaatgcactcaatcagcatcaacggcagaccaagaacggaagcattcatactgaccaaatcaaataaatgttgggtcaactcatggccaacatcgagtggtcagccatactacatatatacaaaatatatatatacctatatgtacatgaccactgactaatttgcagcactgttcgtgcgtgtgaatttcaacaatcgaatgatgcccaccgtagtcgagattcctttggccattggatgtctgtttctgttctccggaaacgaacaaaaa

SEQ ID NO: 33824 - DNA, 4116 bp, DROSOPHILA
atgtggagcaatcgctgctctatttttatcctggcgctgctggtcgccagcggtgcagtgaaagtatccggaagattgcctcgaatcctgccggaatctctcgccgaaggcgatgaaggtgtaacagtgcgcggagattgtgaatttaaggtgaacggcgacctcaacgatcctgctcctctattttcgcgacacaattcctacgaaattattgtgccagatcccacggacacagtgcgtctggttaatggtgaacttttggatatgttctgcccgggagtaggatttgcagccccattcgtaaatcgatggcaggtgacggctacgtgtttgcagaataagtactttctggtcgatgatttaatatatccgtttgccaatttttcctgtaccgcctggcccatatttactgcccttcggtcgggtaaggattgcaatggaggcacagatctcgtccaggtaggattcgaggtggaggatggcggcttcctgcagagctatgaactgtgccacgatgccgaggcggaagcaacgcgatatgttcatcacgtgctctatccatcgagctacgattatcagcatggagtggcgcgacccaactttctcgaactcgatttctatggcggaagggatgtgaataccaagtacacgcaagtacagcagaacatcacaatcagtaacatactcggtctggatgcgtcaccctacttcaactttagcgatgaccgcatcctgtctcggggacatatgatcgccaaaacggatcagatcttcggggcggctcagcacacgacattcctgttcatcaatgtggcgcctcaatggcagaccttcaacgggggcaactgggagaaagtggagactagtgttcgaaaattcgtggcagatcgtaatctaaccactgattgctatacaggcacttggggtgtttcaacccttcccgatgtggatggcattgagagggagctatatctggacttcgatgagaacaacaatggcctgatcccagtgcccaagatttatttccgtgtggtcatcgatcgggtgactcgcgaaggcattgtgctaataggcattaataatccctatctaacactggagcaaatccaaaaggactacatactgtgccaggatattggccatcagctaagctggctaacttggtacaaagaagatctgcacgagggttattcctatgcttgctctgtcgaggatttcattgaagtggttaaggacttgccgctggaggacctgcacacaaatggtatccttggattggacgacgtgaccactgttgagccttcgacaaccgaaagttccacaactactgaagagccgagctcaactacaagcaccgaaattccatcaaccactgatactacacctagttccactagcgtttcttctaccaccgaagagccaagctcatctaccgcttcacccaccactgaactaccaacctccacagttatatccaccactgaaccaccaacctccacagttacatccaccactaaaccaccaacctccacagttgcatccaccactgagcaacccacttccacagttacatccaccactgaaccacccacctccacagttacacccaccactgaaccacctacctccacagttacatccacaacagaaccaagctcgtctaccactctggaacctacttcaactacatcttcctctaccacttcacaaccaactttatcaaccgaagaatcaacttcaacatctccaacgtctacctctacttcaagtcctccggtgactactgccaatcccattgccaatccctgtaggtttagtacaaatggtgatctcaaggatcctgctccactactaacaccgcaaggagctctcagctggctgctgcccgatgaaagtgggctttacaccgtggaagaaggatcctccattgatctgcactgcactggagctctggtatcaccatttaataggtatacagctctgagcgctcgttgtgttggtgatcaattgtacgaggccgaaggacagctggtcaatattcgaggattcgtctgccagagttggcccacatatgcggcagtccgatcgggacaatcttgcgctggtggtacggatgtggtgcacatcggcttcgatgtggctgccggttttcttagccatgttgagctctgctacgatcagcaggagcagatctccagatacgctcgctatgaactgactccggccaatgtggcctaccaaaagggtgttgctcaaccgggctatcttcgaggtgacttctatagcggcgaagatgtcaatgttctatatgaccaatcacaccagctggatgcatttagtacggccctgggattagatgccagtcagtactttgacagcactaaggatctctatttgaccagaggacagctggcagctcgtcttgatttcgtccatagttccgcccagagagccacccacttttatgtgaacgcagttcctcaatggagaagcatcaatattggaaattggcttgcagtggaatccagtttgaagcaatttgtggcggatgaggcacttaatgtgagtgtacatgccggcagctatgatatctcaactctacccaattcacaaggtgtccagacacctctgtatctgaatgccgagaccaaacaactgccagtagctaagatcctctatcgcattgttatcgatcaggaaagtcgcaagggagtagttctaattgtggtcaacaatccacatataacattgacggagaccctcgaggattatgtgatctgtgaggatgtgggagcgcaaatcgattggttggactgggacaaagcaaacctgcagaagggctactcctatgcgtgctctgtagaagatttcatcgaagtggttaaggatttgcccacagatcaactgcaaacaacaggaattcttggtttgactgatcaaatcttggacaatgaagtgtgcagctttaaagtgaacggtgatcttaaggatccggctcctttatttgtagtcaggagtgaattgggtcatgcgagatatttggaaccgaatcaagaaggagtagttcagctaaaacatggagaagcccttgagttccactgcatcaattctttcagtggacccttctctggttataccttcgtcaattcaacatgctggcaacagcagagcatcctggcaatgggcagtttgtatcagctgcaggactttgtctgcacttcctggccaacatacactgctcgtcgctctggtcgtccctgcaatggtggtactgatctgcttgaagtgggctttcagctgtcatcctcctcgagcgacgacttcctgcagacctatgacgtgtgtcacgatgaactgagcgaagtcacccgctatgtgcatcatgttttgtaccccggaagtgaccaatatcagcgatctgtatccaggccatcctttatacccggcgacttttacggaggcaaggatgtgaacactttgtacacccaagttcaacagaatatcacggtttccgagattttgggcatggatgcctcaccatacttcaacaccactggtaatgtctatctggctcggggtcacctttctgcaaagaccgactttgtctttggggccgctcaaaaggcgagcttcttctttgtgaatgcggcacctcagtggcagacctttaatggcggaaactgggaacgaatcgaggacagtgtgagaaagtttgtggcggatgaaaacatcacagtggattgctatacgggcacatggggtgtgtccaccctgccggatgtaaatggcattggaagggagctctatttggactttgatgaaaacaacaatggtctgattccagtgccaaagttgtacttccgcgtgattatcgatcgcgagagcagaaatggcatcgtgctacttggagttaacaacccacatgccaccattgagcaaatcgaagaggagtacatcatctgccaggatattggcgcccaactgagttgggtcagttggaccaaagaggacctaaagaagggctattcatatgcctgtactgtggaggactttactgcagtggtgaaagacctacctttacaagacctgtttgtcgatggagtcctgggtgtttaa

SEQ ID NO: 33825 - protein, 1371 aa, DROSOPHILA
MWSNRCSIFILALLVASGAVKVSGRLPRILPESLAEGDEGVTVRGDCEFKVNGDLNDPAPLFSRHNSYEIIVPDPTDTVRLVNGELLDMFCPGVGFAAPFVNRWQVTATCLQNKYFLVDDLIYPFANFSCTAWPIFTALRSGKDCNGGTDLVQVGFEVEDGGFLQSYELCHDAEAEATRYVHHVLYPSSYDYQHGVARPNFLELDFYGGRDVNTKYTQVQQNITISNILGLDASPYFNFSDDRILSRGHMIAKTDQIFGAAQHTTFLFINVAPQWQTFNGGNWEKVETSVRKFVADRNLTTDCYTGTWGVSTLPDVDGIERELYLDFDENNNGLIPVPKIYFRVVIDRVTREGIVLIGINNPYLTLEQIQKDYILCQDIGHQLSWLTWYKEDLHEGYSYACSVEDFIEVVKDLPLEDLHTNGILGLDDVTTVEPSTTESSTTTEEPSSTTSTEIPSTTDTTPSSTSVSSTTEEPSSSTASPTTELPTSTVISTTEPPTSTVTSTTKPPTSTVASTTEQPTSTVTSTTEPPTSTVTPTTEPPTSTVTSTTEPSSSTTLEPTSTTSSSTTSQPTLSTEESTSTSPTSTSTSSPPVTTANPIANPCRFSTNGDLKDPAPLLTPQGALSWLLPDESGLYTVEEGSSIDLHCTGALVSPFNRYTALSARCVGDQLYEAEGQLVNIRGFVCQSWPTYAAVRSGQSCAGGTDVVHIGFDVAAGFLSHVELCYDQQEQISRYARYELTPANVAYQKGVAQPGYLRGDFYSGEDVNVLYDQSHQLDAFSTALGLDASQYFDSTKDLYLTRGQLAARLDFVHSSAQRATHFYVNAVPQWRSINIGNWLAVESSLKQFVADEALNVSVHAGSYDISTLPNSQGVQTPLYLNAETKQLPVAKILYRIVIDQESRKGVVLIVVNNPHITLTETLEDYVICEDVGAQIDWLDWDKANLQKGYSYACSVEDFIEVVKDLPTDQLQTTGILGLTDQILDNEVCSFKVNGDLKDPAPLFVVRSELGHARYLEPNQEGVVQLKHGEALEFHCINSFSGPFSGYTFVNSTCWQQQSILAMGSLYQLQDFVCTSWPTYTARRSGRPCNGGTDLLEVGFQLSSSSSDDFLQTYDVCHDELSEVTRYVHHVLYPGSDQYQRSVSRPSFIPGDFYGGKDVNTLYTQVQQNITVSEILGMDASPYFNTTGNVYLARGHLSAKTDFVFGAAQKASFFFVNAAPQWQTFNGGNWERIEDSVRKFVADENITVDCYTGTWGVSTLPDVNGIGRELYLDFDENNNGLIPVPKLYFRVIIDRESRNGIVLLGVNNPHATIEQIEEEYIICQDIGAQLSWVSWTKEDLKKGYSYACTVEDFTAVVKDLPLQDLFVDGVLGV

SEQ ID NO: 33826 - DNA, 2645 bp, DROSOPHILA
ttctcgatggccaaaaagaagaagaagagcaagaagaaggaactggacgagctgtttgcggaccaagcggacgacgacaagagcgaagacaaagagaacggtacggtgacgaattgcagagcagccagggaagcttagggttatagaatcatcccaaccaagattggcagccatataagcttgttgtcacttgacaaaggcaaagctatacgattcttaaagtgtataacttggctttcgccttttccgaagcattaaaactcagtgtatgaagtgaactagaaatgcttagccagtgagttagcatgtagctgttccaactttaaatagactccagatttcaaagctctcacttagcaaataagcttataccatacccttttaaataacgttttcatccgtttacagacgaggacaacagctcaacctggtttggctccgaccgcgattacacatacgacgagttgctgaagcgggtcttcgaaatcattctcgacaagaatccggacatggccgccggccgaaagccaaagttcgtgatgcgaccgccgcaggtgctgcgcgtgggaaccaagaagacctcctttgccaacttcatggacattgcgaaaacgctgcatcgcctgcccaagcatctgctcgatttcctgctggccgagttgggtaccagtggctccatggacggcaaccagcagctgatcatcaagggccgtttccagcccaaacagatcgagaatgtgctgcgtcgctacatcaaggagtacgtcacctgtcacacctgccgctccccggaaacgatattgcagaaggacacgcgtctcttcttcctgcagtgcgaatcctgtggctcccgctgctcggtggccagcattaagtcaggtttccaggctgtcaccggcaaacgtgccgccatacgagcaaaaacaacctaaattctccttatttaaaactttttgaatttttattaccagtaaaatttcaatacaaaaaaccaacgatactatttatttgttgtattctgcattgttttatgccttcgttgccagtcggttaggtagtctacgaagccaatttccatattccgcgatcggccgctgtctatgaagaactgaaaagcgtccagacccatcttgccgcggaacctattcggacgaccgcgcaggaataggctgtggcccctcgagatgcgcgtgggatcaatgtactccatggagacctgcagcagccgcatcatgctcacggcaatgctcttgtaggcctcggacgaggccagcgaactggcttcactgtacaggctgctgatcacgcgtccattgaagggttttttggtgatgctggcctccagggagccggtgccatcatcgatcatgaacttcatgaacgactcgttgtgcgttccattgccagttacaaaggcgtagatgatgcaggtgcagaagtgaatcggatgcacgtcgtctgtgatgaacacattctcgttctccggatcctgagttgcgcgctcaatctgggatatggtcagcggcacgttgtcgtggacctccggaccacatttgcccgtggacttttcactctgttgattcttgcgtatcacgaagttatccagctggctttctatgtcctcgaaactctgattaaaatccattctatttgcttagtctgcgatttcaaaggggatttctttattgcagtgcattttgcattagcgccaaaaaaaaaaacagttgtgagcatgggcgtagacttcgtattttcttacaaataatattaattaaaattaattttgtgagcaattttcacacaattgtattataagttaaaaccagggtcacattaatttgcagaaccgcgcaatattttctttttaacccccttacaaattttcagttgttttgactacgcccctgctaatttttacttattaaattcaaagtctaaaaacattgtcaccagataatacgagtatacactatatggacaaacgtaaaatcgttaatagaatatatatattcaaccattatttcaccaccgagagaaattcatttgcacaaaacgccaggttggcagcaccatcattgcgcacagcaagtgggcaaactcgttgtatcgcttgtgaaatttaaggaaaagtacactttgttcaaaactaacgaagagaatcgcaatatctgccgatcttggaatgtctggtggtccatccataacgataaaaagccaaccaatcgatggtaacaacacgggcaacgctgcggcgcaacagcagcagcaggcagcgaatggcgcagcaaccgctggtgcatctggagccgctggcagcgcccagaatccaggacacggaggagctgcgtccggcgctggcagtgtgccggcagagggaacgcgccagaacagcctacagcgcattcagcagcgaaagcaaaaggtcttcaatctgcccgtgccacagaaactggccaaattgtcgatgtattccgcctgccagtctgagggatgccgttgcaccggctggaagacaccgcaggaaaatcgccaccgtgacgtcgagtcctcctactgtccggagttcaacgaggagtgccgcaacaccagctgtcgccattcgctgagatcgcacatagcccatctggacaatatatccagttcca

SEQ ID NO: 33827 - DNA, 645 bp, DROSOPHILA
atggattttaatcagagtttcgaggacatagaaagccagctggataacttcgtgatacgcaagaatcaacagagtgaaaagtccacgggcaaatgtggtccggaggtccacgacaacgtgccgctgaccatatcccagattgagcgcgcaactcaggatccggagaacgagaatgtgttcatcacagacgacgtgcatccgattcacttctgcacctgcatcatctacgcctttgtaactggcaatggaacgcacaacgagtcgttcatgaagttcatgatcgatgatggcaccggctccctggaggccagcatcaccaaaaaacccttcaatggacgcgtgatcagcagcctgtacagtgaagccagttcgctggcctcgtccgaggcctacaagagcattgccgtgagcatgatgcggctgctgcaggtctccatggagtacattgatcccacgcgcatctcgaggggccacagcctattcctgcgcggtcgtccgaataggttccgcggcaagatgggtctggacgcttttcagttcttcatagacagcggccgatcgcggaatatggaaattggcttcgtagactacctaaccgactggcaacgaaggcataaaacaatgcagaatacaacaaataaatag

SEQ ID NO: 33828 - protein, 214 aa, DROSOPHILA
MDFNQSFEDIESQLDNFVIRKNQQSEKSTGKCGPEVHDNVPLTISQIERATQDPENENVFITDDVHPIHFCTCIIYAFVTGNGTHNESFMKFMIDDGTGSLEASITKKPFNGRVISSLYSEASSLASSEAYKSIAVSMMRLLQVSMEYIDPTRISRGHSLFLRGRPNRFRGKMGLDAFQFFIDSGRSRNMEIGFVDYLTDWQRRHKTMQNTTNK

SEQ ID NO: 33829 - DNA, 4224 bp, DROSOPHILA
taattagccaaattgaattttgtacgactgtagtgaaaataatgactttttaaatatgatttatcactgtcccaaaaaacaaaaaaaaaaaacgctttaccacagcaccgcatttttaagaagtcaaacacacttgaatcatttgacttgatcattaaaaatcacccaatcattattcgagtaaataaatacaaagattataatgaaatctacgcaaaatttgtttataatttattagtcttttgtttttacttctacaggattttcgtatgtagtttgagatcattttaagtttgttgtcctctgcattttgacattatggcgaaccaaaattaatgagtgtcacgcaaaaatgttacacaaaatatactcttctacttacttaaggtctttccaagatgataaactgataaacaatggttgacaaagtctatctagtccatgagcaaatctaaatattaacgagagtttgaaatcaacttgcgtattttccacgcgatgaaaatacacttaacatttaattacgaatatatatataactacaaatactctgatatacatattgttatatttttgtacgtttagctaatttttaaataaattatttaatgtgatttataagcccgattccagttacaaataaaatgcgaattattacaactgatcgcttgcattttaagtggatataaagttaattgagcataaacatccaaatagtgtcaaagtcgaaaccatgtaaatatttctatttatttcgaaaataaataatatcctcaaagaagtatcgaacgtgaaccagtactagttcggaactcaataccgcatatttataatgcgccgccgaactgaaagatcggtgctatttttggagtataggaacgtccgccagctgtttccaatactcagcggccgtgtggtgatcagaaaacgcggacaagtcccactttttcagccgttgcaccgaaaatctgaattagattttacataattttgagtccaaatggagttcgacgccacgtaccacgagatctgctccgcgcagacggttcagtcggagaggaggggattcttcaacgaattttgcgtggacgtgcgtgatgcatgtggcgacaagtggctgcgcaactactttggcaaactgaagtccaatgcagcccgagttctgtccattttcagcgatcgcgaggtgtgcgatcctgtgctgggtgtcctggagcatgtacagccggtgttcaagcagaaggatgccctcttctcggcccagcgacgtgcacaggcggataagctctacctgatgagcggcagtggcgacggcgaggagagcagggagctgctgcagcaggctctaatggccgccaatctggccgtgatgcgggctcccgaccgcaatgcagatcctgtcctcgatgagggcctcaccttggcattggcctacagatcgagggcttccatattgatccgcttgggcgagggggaggcagcattgaatgacctcaagctggccatcaactttggactggagctcaagtccagtgtggattactacttaaagatggccaaagcctatgcaggtgggtcagccgggagcaaccgatggtatcatgcttatggaaatccttttattttcagtcatgggagaacctgcccgcgctgagatctcattgaagatagccgagaaaatgcctggctgtgatgccacccacatcgcactgtgccgcaaggaactatcatcagtaaagccgaaacccaaggaagccacctcggaacaggtgccacaactggcacatggcgagagtgccgaactagttggtgcgtccaaggtggtgaggctggtggagaccaaggacaagggtcgttttgtggtggccaacgagggtctgagaaccggcgacgttctgctcttcgaggagccagtggccgcctgtttggagcccagttactttggcactcattgtcatcattgcttcaagaggtaagggattaataatgtgaagtcagctgtcaagctgtcaaagaatcccattaattgcaggctgcacactcccgtttcctgtctccactgctcgggaatcgccttctgctccgcccagtgcatgggcgaggcctgctccagttaccatcgcttcgagtgcgagtatatggacttgatgatcggttctggcatgtccatcctgtgcttcatcgcgctgcgcatcttcacacaggcgcccagcttggagcagggcttggccaccgccaatctgctcttcgagcacttgtgctcccacgaggaggaccgccagccggacgactacttgcggcgagctctgatgtctggcttcctgttgcgcattctacagaagtcgctgtacttcggacgtcgcaaaactgagggagtgaatccaactgcggtggagctgcaggtggccaccgctttgctgggcctgctgcaggtgctccagtacaatgcccaccagatctatcaaacccaagtgaccgaggagcatcgcttcgacggcagtaagacggtgtatctggccgcaggactttatggtactggttcctacttcaatcacgagtgctggcccaggtgagttgtattatcttgaatattatagagatcattaaggattcgtcttataatttaagcaccgcttgtcattttgttggcaagaagctggtcctcacagccaccaggccgcatcgtgccaatgaattggtggccgtgaactacggacccattttcatcaaaaacaacttgaaggagagacagcgatctctgcgaggacgctactccttcagctgcagctgcatggcctgccaggagaactggccactgctccagaaactggacaagcaagtgcgattctggtgggtactagcctcgctatcaatcgatatactataatatctttcattattaaaggtgcacctcagccaactgctctaatttgctcaagttccccaaggatttggcaaaggatgtgcgttgtcctcgctgccgcaagaacatctcactcaaggagagcgtagccaagatgatcaagatcgaggagctgtatcgagaggctgcgcgagccatggaggcccagaaaaccgtggaggccatagaacttttcaaggagtcgctcgatatgttcttccaagtggctgcactgcctcacaaggacaccatagtggcgcagcagtcgctgcataagtgtttgtccgatacgggaaccacatttaaaaaggaagggaaatgaacgaaaaactagttaatggcgtgtgcacttgtattattaaatcgtttttttctacttgaatgcaaattaaatttcattttaatgatgtaggtgtaaatggtgtacatgcaatttttttaaattgcccgccttcctcattactgaaatctaattggaaactttactgggaattttacaattgaaatgttttcgcaataacatagctctgtaaatgctgccctgttaagtgtctgttaatggaaacgaatgttggtggtattttctaaaggtacggccacactgcagccgacttgttttgaaatctatttggttttgtttttccggctaaaatgtttaaaaaacttaagccaggtgaaagtgaggaggatgtcctgcgaatggcagcagagttcaatgcagagagagcgaaggatcccaatttccagcctgcagcggcttttgtgcgtatggataaaggtgcggccagattccctctgcttaccaaatatttattaaatacatttattgttgaattttttcacaaatgcagctcctaaaaagtccatgtttgcgcaaagacgggagcaggcaaaattggggcgtgttacttctactacggaaaaaaacgaggagcaaattcaaccagtgcccaaagaaatcatccctcagattccaacaagtgtcccaaaagaacgtgggtcgcatgtcagccaagttttgcttgatgaaatccaggaaaacatcctgggcgatgtgaagggcagcaagatggatccaagttccctaggcaatgtgctgggcgaattggtagaaagaactgaaggaaccaggagatctgcatttccagaaactaaaaatgtattattttatgcttaactggttgtatacatattaataatgatttttatgtttcaggttgactccagtaagccgcttagcattttcgccaaacaacttttaggtgcaaagtcttcaactaaggaaaaatcaaacaaagtgtcggattttccaagaaatgata

SEQ ID NO: 33830 - DNA, 1992 bp, DROSOPHILA
atggagttcgacgccacgtaccacgagatctgctccgcgcagacggttcagtcggagaggaggggattcttcaacgaattttgcgtggacgtgcgtgatgcatgtggcgacaagtggctgcgcaactactttggcaaactgaagtccaatgcagcccgagttctgtccattttcagcgatcgcgaggtgtgcgatcctgtgctgggtgtcctggagcatgtacagccggtgttcaagcagaaggatgccctcttctcggcccagcgacgtgcacaggcggataagctctacctgatgagcggcagtggcgacggcgaggagagcagggagctgctgcagcaggctctaatggccgccaatctggccgtgatgcgggctcccgaccgcaatgcagatcctgtcctcgatgagggcctcaccttggcattggcctacagatcgagggcttccatattgatccgcttgggcgagggggaggcagcattgaatgacctcaagctggccatcaactttggactggagctcaagtccagtgtggattactacttaaagatggccaaagcctatgcagtcatgggagaacctgcccgcgctgagatctcattgaagatagccgagaaaatgcctggctgtgatgccacccacatcgcactgtgccgcaaggaactatcatcagtaaagccgaaacccaaggaagccacctcggaacaggtgccacaactggcacatggcgagagtgccgaactagttggtgcgtccaaggtggtgaggctggtggagaccaaggacaagggtcgttttgtggtggccaacgagggtctgagaaccggcgacgttctgctcttcgaggagccagtggccgcctgtttggagcccagttactttggcactcattgtcatcattgcttcaagaggctgcacactcccgtttcctgtctccactgctcgggaatcgccttctgctccgcccagtgcatgggcgaggcctgctccagttaccatcgcttcgagtgcgagtatatggacttgatgatcggttctggcatgtccatcctgtgcttcatcgcgctgcgcatcttcacacaggcgcccagcttggagcagggcttggccaccgccaatctgctcttcgagcacttgtgctcccacgaggaggaccgccagccggacgactacttgcggcgagctctgatgtctggcttcctgttgcgcattctacagaagtcgctgtacttcggacgtcgcaaaactgagggagtgaatccaactgcggtggagctgcaggtggccaccgctttgctgggcctgctgcaggtgctccagtacaatgcccaccagatctatcaaacccaagtgaccgaggagcatcgcttcgacggcagtaagacggtgtatctggccgcaggactttatggtactggttcctacttcaatcacgagtgctggcccagcaccgcttgtcattttgttggcaagaagctggtcctcacagccaccaggccgcatcgtgccaatgaattggtggccgtgaactacggacccattttcatcaaaaacaacttgaaggagagacagcgatctctgcgaggacgctactccttcagctgcagctgcatggcctgccaggagaactggccactgctccagaaactggacaagcaagtgcgattctggtgcacctcagccaactgctctaatttgctcaagttccccaaggatttggcaaaggatgtgcgttgtcctcgctgccgcaagaacatctcactcaaggagagcgtagccaagatgatcaagatcgaggagctgtatcgagaggctgcgcgagccatggaggcccagaaaaccgtggaggccatagaacttttcaaggagtcgctcgatatgttcttccaagtggctgcactgcctcacaaggacaccatagtggcgcagcagtcgctgcataagtgtttgtccgatacgggaaccacatttaaaaaggaagggaaatga

SEQ ID NO: 33831 - protein, 663 aa, DROSOPHILA
MEFDATYHEICSAQTVQSERRGFFNEFCVDVRDACGDKWLRNYFGKLKSNAARVLSIFSDREVCDPVLGVLEHVQPVFKQKDALFSAQRRAQADKLYLMSGSGDGEESRELLQQALMAANLAVMRAPDRNADPVLDEGLTLALAYRSRASILIRLGEGEAALNDLKLAINFGLELKSSVDYYLKMAKAYAVMGEPARAEISLKIAEKMPGCDATHIALCRKELSSVKPKPKEATSEQVPQLAHGESAELVGASKVVRLVETKDKGRFVVANEGLRTGDVLLFEEPVAACLEPSYFGTHCHHCFKRLHTPVSCLHCSGIAFCSAQCMGEACSSYHRFECEYMDLMIGSGMSILCFIALRIFTQAPSLEQGLATANLLFEHLCSHEEDRQPDDYLRRALMSGFLLRILQKSLYFGRRKTEGVNPTAVELQVATALLGLLQVLQYNAHQIYQTQVTEEHRFDGSKTVYLAAGLYGTGSYFNHECWPSTACHFVGKKLVLTATRPHRANELVAVNYGPIFIKNNLKERQRSLRGRYSFSCSCMACQENWPLLQKLDKQVRFWCTSANCSNLLKFPKDLAKDVRCPRCRKNISLKESVAKMIKIEELYREAARAMEAQKTVEAIELFKESLDMFFQVAALPHKDTIVAQQSLHKCLSDTGTTFKKEGK

SEQ ID NO: 33832 - DNA, 2759 bp, DROSOPHILA
cagcctgcagcggcttttgtgcgtatggataaaggtgcggccagattccctctgcttaccaaatatttattaaatacatttattgttgaattttttcacaaatgcagctcctaaaaagtccatgtttgcgcaaagacgggagcaggcaaaattggggcgtgttacttctactacggaaaaaaacgaggagcaaattcaaccagtgcccaaagaaatcatccctcagattccaacaagtgtcccaaaagaacgtgggtcgcatgtcagccaagttttgcttgatgaaatccaggaaaacatcctgggcgatgtgaagggcagcaagatggatccaagttccctaggcaatgtgctgggcgaattggtagaaagaactgaaggaaccaggagatctgcatttccagaaactaaaaatgtattattttatgcttaactggttgtatacatattaataatgatttttatgtttcaggttgactccagtaagccgcttagcattttcgccaaacaacttttaggtgcaaagtcttcaactaaggaaaaatcaaacaaagtgtcggattttccaagaaatgatacaagttccataataaaagatgctaaactgggaaaagaactgcatcaggaaaacctaaatgtactcaagcaaatgaatgaacaagatattttgacagagaaagaaagattgctggcttctttgggtaaatgagtgtctttccgtaaaaagatatttttcttaaaatgtaaataatgctttgcagatccctcgttgatagctttgttgtccaagaaacgtcaaacgacaccaaattccaaaccgcccaatccaaattcacctaaagtaatagaagcaccacccatgcccgcacagtctacaagagcccaagatccacaaatttcttctttaaccgatggaaatccagcaattgagctattgcaagagagcgataaaggaaattggcttaatttcaatctagtcgaggagcataaattggcgtggatgcgggacattcccgccaagataagtgaattgaagcctggagagcagttcaatgctcgctttgattggaaaggtgtgctactgccacacacgctcaaggatcaggatgcatcgaaacaaatcgatgagcgtgaactttatttacatggcgaggaggcagatcgtcccggctacgcactacaagagctatttcgattagccaggtgagcatcggctagatatttgctagataagatcgtttaaagttggtctcccgcttcactttttagatccaccgtcttacagcaaagattatctgcctttggagccatagctgggatctttagcatctataaccagggattctatgatcaagtcttgtctctacctatatcaaaaatattctttttgctgcgctttgggctcgatgacaatgcacctgcacaacttgaggttgtgagccgagcattatcaaacctgttctataacgaaaccgacgaagtgcttctcgatcacgttcatgacaatgcctactgtcattggcaaccaacactagaggttttggggaacggcagtgatggcaatggggaagatacagataccaactccatagcattcctgcagcgttacatgaagctactgaccaccagtaaatctgtgcgtgcagaagtggatgaagatgaatcggaaagtcgcacgtcaatggatgactttcaactggctgaaacagatctcatggactgcctgctaagaacaaatatattgcaaaggattcggtaagcagtgaaaagtgttagagctacagctatttctaatgcacctgtttttagattcatcttggtctctgtgaaaccagataatagcacagtggagtcctgtctgaaattacttataaggatagctcgtacaagtaccaaagtggctcgtcagttggccaatgagagccatcttatagatacactctttaaacattttctaccctcttcgagtggaagcaatcagttctatggccagccgcaagttctatttctaaaactaatccgagtgttgatttgccaccaccttgatatagctaagggtatttccaaaggagtcctcattacgcgacttcaacaatacctgttccttcaagacaataaggtttgtatgcgtacacttttgtcaaagtaattttattttttttattttttttatctctttggtaggtccagatggtgcgcattcagatcgaggcactgcgcatcctgcgctgtttgctgctcttgggaatcgtggatcgggatatatttaggttggttagcgctacccaagtagcactattatctcttcccatatgaattttccgtttacagcaatgtagcacttgacggtttcataagcggtatcacagccatcttttccctctgaaaagagctacatttgagtttgttctaattgttaaaaacactttgcatactctgagttccacatgaactgactaatccgttaatcgttttgtgtatttcctcgggtaaaacctccaacagtgcttccaagtgcattatgttttgtgaatcaatctatagggaaagtgattttctattattaagaaattatttcaatttttgtaaggatcacaaaccaatccgaacatatcaaacatgcagtagagaaaacacttgatctcgggatctgtaggtagtattctatttttcaccgacttgtcaatcacatctgtagtgtagggtatataaaccatttttgtttgaatttccaccaaaaaaaaaaggcttacttacct

SEQ ID NO: 33833 - DNA, 693 bp, DROSOPHILA
atgcgggacattcccgccaagataagtgaattgaagcctggagagcagttcaatgctcgctttgattggaaaggtgtgctactgccacacacgctcaaggatcaggatgcatcgaaacaaatcgatgagcgtgaactttatttacatggcgaggaggcagatcgtcccggctacgcactacaagagctatttcgattagccagatccaccgtcttacagcaaagattatctgcctttggagccatagctgggatctttagcatctataaccagggattctatgatcaagtcttgtctctacctatatcaaaaatattctttttgctgcgctttgggctcgatgacaatgcacctgcacaacttgaggttgtgagccgagcattatcaaacctgttctataacgaaaccgacgaagtgcttctcgatcacgttcatgacaatgcctactgtcattggcaaccaacactagaggttttggggaacggcagtgatggcaatggggaagatacagataccaactccatagcattcctgcagcgttacatgaagctactgaccaccagtaaatctgtgcgtgcagaagtggatgaagatgaatcggaaagtcgcacgtcaatggatgactttcaactggctgaaacagatctcatggactgcctgctaagaacaaatatattgcaaaggattcggtaa

SEQ ID NO: 33834 - protein, 230 aa, DROSOPHILA
MRDIPAKISELKPGEQFNARFDWKGVLLPHTLKDQDASKQIDERELYLHGEEADRPGYALQELFRLARSTVLQQRLSAFGAIAGIFSIYNQGFYDQVLSLPISKIFFLLRFGLDDNAPAQLEVVSRALSNLFYNETDEVLLDHVHDNAYCHWQPTLEVLGNGSDGNGEDTDTNSIAFLQRYMKLLTTSKSVRAEVDEDESESRTSMDDFQLAETDLMDCLLRTNILQRIR

SEQ ID NO: 33835 - DNA, 4378 bp, DROSOPHILA
ttatagatacactctttaaacattttctaccctcttcgagtggaagcaatcagttctatggccagccgcaagttctatttctaaaactaatccgagtgttgatttgccaccaccttgatatagctaagggtatttccaaaggagtcctcattacgcgacttcaacaatacctgttccttcaagacaataaggtttgtatgcgtacacttttgtcaaagtaattttattttttttattttttttatctctttggtaggtccagatggtgcgcattcagatcgaggcactgcgcatcctgcgctgtttgctgctcttgggaatcgtggatcgggatatatttaggttggttagcgctacccaagtagcactattatctcttcccatatgaattttccgtttacagcaatgtagcacttgacggtttcataagcggtatcacagccatcttttccctctgaaaagagctacatttgagtttgttctaattgttaaaaacactttgcatactctgagttccacatgaactgactaatccgttaatcgttttgtgtatttcctcgggtaaaacctccaacagtgcttccaagtgcattatgttttgtgaatcaatctatagggaaagtgattttctattattaagaaattatttcaatttttgtaaggatcacaaaccaatccgaacatatcaaacatgcagtagagaaaacacttgatctcgggatctgtaggtagtattctatttttcaccgacttgtcaatcacatctgtagtgtagggtatataaaccatttttgtttgaatttccaccaaaaaaaaaaggcttacttacctacagaagctcctgtctgatttaagcatcgcattcgcagctttctcacctgctttatgatcgtaggattaatttccacctaataagaggcacaacaactaaataaattttccaattattgcgtggcagcaaatacttactccttgattactaggaattaaatcatatagtatgagtagtgctaaaaaaaaactaaaatgccttgcaaccatttttgcttctccccaaaaattgctaaagttgaactgagtgctttttaggctgcgcctcatttttatagtcaaaccaagtagtaataattactatgattttgtgtaatttataggcagttcctgcccgcgctgcgacagctactggactggcatggcaatcactgcgctttcgatggagtgggaggatccgggctggtgcggcaacacgcagccgccctgctggtcgcactggtggccagtggcgagagcggagcatgcgatgtcgagggacagaagctgctcgtggagccgcttaacaactgctgctgcggctggatgcatgctgcttcccgcgtcgcgaagatcaaagatgtgagtgcctatatattcattctgctatatataataaattcaaactaattcttaatatctagtttagccagatgacgcttctgagcgcagctctatacgccgtaggctggttttctcggaacagcttgttgggaacgaccagtttcctgccctttctgcgcagcatccttccgaaatttgtgcagtccagcggatttatagcttgcgtacatgacctagtgtaagttgatcgtgcaagaccttaaatcacgcctaatttaattgctatattccagcaagggctccataatgctgagacgccccattgatcggcgacacgtgcatgcgccgttgcctaacgtgggcgcagtgctgatgcacgactacgggccgcagctggttgtcagtgagacgtatccggtgcacctgttgagtaacctgtgggccctgctcgccatttcgctggacagcggtgagaagccattattcgaggcgcttatacaaccagcagtgctcgaacctctggccgaatatttacgccagctgagcacacagctgaatcgcgtcctggccaccaacttctttgcccgcagcgagctgaggttcatccatcagctgcttacaacagatggaatcgagatctatctgaagcgacagcagatgctgcagttggtatacaattacctatgctgcctgtccactgcccatgccacacagatcaagagcatctttgagcgcttcattttcaatggcgactttgttaaattagacgaatctagtctgaaactgctgcagcaatcgtgtctggagatggtgtatcctcacattatagctgtaagtaattttatcctcaattgaagtcttataattatagcattatatattcctggcaccttgctcgattgacggaaaatttaatttacggtatctactaggaagcacttcacgtaataaattaaagtaaaatagaaaacaaaccacaagcataaacagactcaggagtagaattaagtaaaaaaataacagacttatgaaatcgattggcttgcaatttaaattttccagctcagagccgccgtcatacaatggcacatgttcaatgcatatttattgattttttgacttcttctaccaggacaactcagagccgtcgctgtccttgagctacacacaagcgcccatcttgcccacggactggcccttctttcagctccgggttatcctcagcaattacttgcaaaatgtgcagcagcgtccagcggctatacactcaggtgaggatgcttacttcaaactttgctttccttggggataaatcatgttttcttttttttttcttccttctattgaacagaaaaccaggtggtgctcatgacgttgactttcgttcggcagttggaacgagagggactgcagattgttagcccgctggaaaagcttatgtatctgatgattgccttcatgggcccggactcacagttcctggctccggatttgcatgagctgcttcgtgattgcctgatggatttctacagggagaatgcagcccatgaatttgactttgatgcagaacttgtggataaggcgagatttgaaccgctttactacctgtttgtcgaacactttgaggcggccagctatggtgatgaactgtttagttctctggtgctggtgcctctggcacagaaatatgataataagtggcgaaggcgtctttggtcggagcatgttcaggctgtgcgtttcataaactgtgatgaatctatggtaagtgcaaaaggcattaatttgaaatgagtgtgaactatatatggtttgattttccttctgcagctaatgggagggctctttgcgtatttggagcccgtggaggaggagccttcgttggtgaagctgtacggtgatgcattggcacaaaagatggttcgtcctggaagcattgcctatcggatagcccagcaccactttaaccactcgaagtcggtgcacaaagccacattgttttgataatctgaacattaatagttgataatagctcttcacgagactgcgataaacgtacttaatttcggaatccaaagtcgttttcatgtgacaatactctatttataaggcaagctgatttggttttatctgctccctgtttcaagtgctacctcgcagttactttgagttaagtccatcgaactgttgggtaaatttgtgtatttagcatatacctcctctcgtacattatatatttttctagcttaagagatagttccagttgaatgcatagcaaattactggaaattccacagcaggctggtcgtttatcatatattgcactgcactttggttaaggcaaataattacattttcggatagagaactcttaggttgtgtaaccgggctttttgggctaattgcgatgggccaacgaaaactgcgtgtgacaggccaacggttgcagggcattttgctatcgcactcaattaattaacatcgtttgacttattgacacatgggccacgacaacttgcctcctccttgcggcttcgcagtcgtaagctttgacggctgataaaatgtatgtaattaaaatgaacacaattggaggggccagtgctaattaaatcatttgatctaagtactcgtgcatgttggtttttctccattttcctaagtacatatgtatgtatatgacttggcgaatgacttgtcacggggctttcgtttgacacatggcgtatgcgcaacattgggccacataattcaactttcgcatgatttacccccatcaaaatcgaagaattcagcaccgcgaggcgatggtctatgagtgtttatgtgataattggctttaaatggctgctaattattttataactgctgggtgttagcgcgctccgtaaatgtttgcacagacctcataaatttaagcaacgctaatctgttaagtcaactgaaattaaatttcgatcgaatcgtctattaatagccagttcaaacttgattgccacttgaa

SEQ ID NO: 33836 - DNA, 1728 bp, DROSOPHILA
atgagtagtgctaaaaaaaaactaaaatgccttgcaaccatttttgcttctccccaaaaattgctaaagcagttcctgcccgcgctgcgacagctactggactggcatggcaatcactgcgctttcgatggagtgggaggatccgggctggtgcggcaacacgcagccgccctgctggtcgcactggtggccagtggcgagagcggagcatgcgatgtcgagggacagaagctgctcgtggagccgcttaacaactgctgctgcggctggatgcatgctgcttcccgcgtcgcgaagatcaaagattttagccagatgacgcttctgagcgcagctctatacgccgtaggctggttttctcggaacagcttgttgggaacgaccagtttcctgccctttctgcgcagcatccttccgaaatttgtgcagtccagcggatttatagcttgcgtacatgacctagtcaagggctccataatgctgagacgccccattgatcggcgacacgtgcatgcgccgttgcctaacgtgggcgcagtgctgatgcacgactacgggccgcagctggttgtcagtgagacgtatccggtgcacctgttgagtaacctgtgggccctgctcgccatttcgctggacagcggtgagaagccattattcgaggcgcttatacaaccagcagtgctcgaacctctggccgaatatttacgccagctgagcacacagctgaatcgcgtcctggccaccaacttctttgcccgcagcgagctgaggttcatccatcagctgcttacaacagatggaatcgagatctatctgaagcgacagcagatgctgcagttggtatacaattacctatgctgcctgtccactgcccatgccacacagatcaagagcatctttgagcgcttcattttcaatggcgactttgttaaattagacgaatctagtctgaaactgctgcagcaatcgtgtctggagatggtgtatcctcacattatagctgacaactcagagccgtcgctgtccttgagctacacacaagcgcccatcttgcccacggactggcccttctttcagctccgggttatcctcagcaattacttgcaaaatgtgcagcagcgtccagcggctatacactcagaaaaccaggtggtgctcatgacgttgactttcgttcggcagttggaacgagagggactgcagattgttagcccgctggaaaagcttatgtatctgatgattgccttcatgggcccggactcacagttcctggctccggatttgcatgagctgcttcgtgattgcctgatggatttctacagggagaatgcagcccatgaatttgactttgatgcagaacttgtggataaggcgagatttgaaccgctttactacctgtttgtcgaacactttgaggcggccagctatggtgatgaactgtttagttctctggtgctggtgcctctggcacagaaatatgataataagtggcgaaggcgtctttggtcggagcatgttcaggctgtgcgtttcataaactgtgatgaatctatgctaatgggagggctctttgcgtatttggagcccgtggaggaggagccttcgttggtgaagctgtacggtgatgcattggcacaaaagatggttcgtcctggaagcattgcctatcggatagcccagcaccactttaaccactcgaagtcggtgcacaaagccacattgttttga

SEQ ID NO: 33837 - protein, 575 aa, DROSOPHILA
MSSAKKKLKCLATIFASPQKLLKQFLPALRQLLDWHGNHCAFDGVGGSGLVRQHAAALLVALVASGESGACDVEGQKLLVEPLNNCCCGWMHAASRVAKIKDFSQMTLLSAALYAVGWFSRNSLLGTTSFLPFLRSILPKFVQSSGFIACVHDLVKGSIMLRRPIDRRHVHAPLPNVGAVLMHDYGPQLVVSETYPVHLLSNLWALLAISLDSGEKPLFEALIQPAVLEPLAEYLRQLSTQLNRVLATNFFARSELRFIHQLLTTDGIEIYLKRQQMLQLVYNYLCCLSTAHATQIKSIFERFIFNGDFVKLDESSLKLLQQSCLEMVYPHIIADNSEPSLSLSYTQAPILPTDWPFFQLRVILSNYLQNVQQRPAAIHSENQVVLMTLTFVRQLEREGLQIVSPLEKLMYLMIAFMGPDSQFLAPDLHELLRDCLMDFYRENAAHEFDFDAELVDKARFEPLYYLFVEHFEAASYGDELFSSLVLVPLAQKYDNKWRRRLWSEHVQAVRFINCDESMLMGGLFAYLEPVEEEPSLVKLYGDALAQKMVRPGSIAYRIAQHHFNHSKSVHKATLF

SEQ ID NO: 33838 - DNA, 3478 bp, DROSOPHILA
aaacaccagaatcgctgcagggggcaccctcacacttgaacaagatagaaagatacgcacgcgcaccaaatgtgagcgagatgcgcatgtggccataaaaacgaggggaagttcgttgtctatcgcctgggggacacttccgtctccattcctgtgtgctccgcagtgccctgcatgtctgcagttgccatgtaccgcagtaccccatgtgccccatttccccgggctgcctccttccatgtgggaactgctggagccgaagattgatgttgggacaatttcacgtcccactgttcgctgggcattaagtggcattaaagttgtcccggcttatcgctatctcacaagcacaagctcgcacctcaagatgcacctacactgagagaaatccatgccacgagctaaagtgaactctaaactagaagcccgcccattacagacttacaattacaattttaggatctaagcccgaaatcaaactatagctattttgcatttttattacatttaaattcatatggaaagatacagatagtcagcacagaaatcagattgtaacaaatcagatttggtttaaaaagatagttttgtagattgggacaaagtatttctccgtgtttttatctgcctagctagctcaactgatctgaactcatttccgctggaaatccccatattcgagtgcgttttcatggaggaccgttaaaatcaagacagccccaaaattacatatgtcaaattatgtttaatgtgcggcattagtcaggtacagtggtgtttagagaagctactggtgctcgtaaatggggagaaatgcaaagaaagcattaccttttatagctcaaatccatacaaagatacttttaaatgtacagtgccatacttcttgttgactttaagattgtattttaaccgtaagctaaaaaaaataaaaaaagcattaaccccatttttgaaatacttttaaatatgaaaataatatatttaaatattttacagtatgccctcgctgcagcaaattgcgctcgcgatggaaggtgaccaatcggagctacagacaccgccgctgccgatcaacccgccgcccaaggtgatggccaatggaatcgtctatggctttcgcacccgacacttgtcctgcatcgaggagaacgactcggactcgttgcacggatcgtccattccacatgcctacgatatgatgcagcaggcggacgagaccttccagaagttgaatgccaacgaggagcaggacgagtcgggtagcgaggatgggggattggagaatctggacgatacgatcgcaatgatcgatgaatcgcgccttttggaggccgattatctggatgagctcgtggccgaggagcagttgcaggagcaggacgaggatgaggaggaatcctctgatcttgtcgactctggcaatgtggaggaggatttctggcagccgagcttcaatcggaatgacatcatgatgacctcggtttatggagctctgaatggctcgttgacgagcgaagtgtcttcaactgcagcgccgggctactccgagtgtgccacgcccagaaaggaggcggaacccgtttatgccacgccggaaaagcgacgagccagcaatcggagtttcgactccacctgcgcctcgctcaccagttccttatacggcggatctatgaactcctcgctggatctcaagtactcatccttgggtggtggcgactcggtcagtggtggcattagtggaaccagcactttgcgaggaacttcagtgccgccaatggatctgtccatgatatccagcgatggcgttagtgcgctggactggggatctgccagtgtgagctgtgttttggactccggcgatgggaatcccgccgaggagctcaacgaggaaatggccgccaagtgcttgagtgcagcggaaagtggtaagtaccgggtatatacgataaattgcctatatataagcgataaatataagcagcgaataactttaataacacgttttaaagaagatcgaatacaatcgttaaatcaagaaccgcagccttaactttaggcgaagtccataaattcatttatatgcggattcatttacctgtaaattgtgagcaaggatcggttttgctattgatcactgtgtcgatttctctgtgatgatttcttttaaccgaaatggccatccatcaaggcagcagggcattaaactcatttacaatccttcattaccggacatgcaaacaggcgcaccgttttaatgacccattcgcagcggacccatttcgctctgctcgccattagaaaggcagcccgcgaggcggcaacactgacccccagcacttccacttccacatccaccttccccaaaagtatctaggggccaccaagaccccgatgtctcctgagtctcctgcgtcccccttcatcaccaatcttcaagtgcaacatcatcagcaatatcctcggccgaaaaactaacaaacatccattggccgtggggaagttaacatgcactcagaaaaatgcagctacaggtttatagcataaggctcttaattgttggcaagctataaagtttagctcagaaacaactttcacagaatctggcagatacattctgaatagctgaaaataaactatatccatatattttcatttaagtatatttattaataggtttttaatgtttttggagcattacgagtttcagtgcacacaattcgattggcaatagagtaaacaaagccagtgaaagccaaacaagtggccggactttgcccatttcacacagatgtttaacaagccgggccgggtcataaatcatccaaatggatatattcaccgcgtttatccatcttccatttggttagcatatgaccgagtcgccgatcgaacagatcctcggggtgaaaactcgctgacattgacagtttctaataggaaaattggccaagatttatgcacacgccgctgacttccattttaatttaaaaccaatcaataaactggcacacacatacaaaaaaaaacaaaaagagctgcgcgtccaacaaaagtgctcaacaaattgccaaatgatgctgcaaagtgcaatgtcacagtaatttacgtgccactccaatggcacaaagctgatgagaatttatgctaagggttaaaagtgtcagcctcaaattatgcatagtgggtggtttcgccaactgcggccattaaaatgcttttaaccattttgggcatcatcatctcacttaaaatgccttaagagtaaaaaatatattcaatgccgttcttatatttaggagatacattcaaaaattgtttaatatttttaatgcagttagcactacacaaatttgaataatttgaataatttcaaaaatattttagctctcaattaatatttctaataatcgagaaatatatagaactcaatttattcagacagtcagtctggtctagcttgtctactctcagctag

SEQ ID NO: 33839 - DNA, 1116 bp, DROSOPHILA
atgccctcgctgcagcaaattgcgctcgcgatggaaggtgaccaatcggagctacagacaccgccgctgccgatcaacccgccgcccaaggtgatggccaatggaatcgtctatggctttcgcacccgacacttgtcctgcatcgaggagaacgactcggactcgttgcacggatcgtccattccacatgcctacgatatgatgcagcaggcggacgagaccttccagaagttgaatgccaacgaggagcaggacgagtcgggtagcgaggatgggggattggagaatctggacgatacgatcgcaatgatcgatgaatcgcgccttttggaggccgattatctggatgagctcgtggccgaggagcagttgcaggagcaggacgaggatgaggaggaatcctctgatcttgtcgactctggcaatgtggaggaggatttctggcagccgagcttcaatcggaatgacatcatgatgacctcggtttatggagctctgaatggctcgttgacgagcgaagtgtcttcaactgcagcgccgggctactccgagtgtgccacgcccagaaaggaggcggaacccgtttatgccacgccggaaaagcgacgagccagcaatcggagtttcgactccacctgcgcctcgctcaccagttccttatacggcggatctatgaactcctcgctggatctcaagtactcatccttgggtggtggcgactcggtcagtggtggcattagtggaaccagcactttgcgaggaacttcagtgccgccaatggatctgtccatgatatccagcgatggcgttagtgcgctggactggggatctgccagtgtgagctgtgttttggactccggcgatgggaatcccgccgaggagctcaacgaggaaatggccgccaagtgcttgagtgcagcggaaagtggtaagtaccggaaaggcagcccgcgaggcggcaacactgacccccagcacttccacttccacatccaccttccccaaaagtatctaggggccaccaagaccccgatgtctcctgagtctcctgcgtcccccttcatcaccaatcttcaagtgcaacatcatcagcaatatcctcggccgaaaaactaa

SEQ ID NO: 33840 - protein, 371 aa, DROSOPHILA
MPSLQQIALAMEGDQSELQTPPLPINPPPKVMANGIVYGFRTRHLSCIEENDSDSLHGSSIPHAYDMMQQADETFQKLNANEEQDESGSEDGGLENLDDTIAMIDESRLLEADYLDELVAEEQLQEQDEDEEESSDLVDSGNVEEDFWQPSFNRNDIMMTSVYGALNGSLTSEVSSTAAPGYSECATPRKEAEPVYATPEKRRASNRSFDSTCASLTSSLYGGSMNSSLDLKYSSLGGGDSVSGGISGTSTLRGTSVPPMDLSMISSDGVSALDWGSASVSCVLDSGDGNPAEELNEEMAAKCLSAAESGKYRKGSPRGGNTDPQHFHFHIHLPQKYLGATKTPMSPESPASPFITNLQVQHHQQYPRPKN

SEQ ID NO: 33841 - DNA, 4433 bp, DROSOPHILA
gcacaggttctgccagcacgtggagtttgcatccggtatgcaggcggccagggtttcattgaagaagcttcctaaatcgcacttctgtggataggcaatctgctcgtcgcagatgtagaactcgccacaagaaccactattggctatgtacgctccgttcacctcggtggagcacacattggtggcctacagaagttcggatagaagttaagggttgggataaatgggtctttatctaactctaaaagcgaatctagaacctacctcagcgagtggagctaaaagactcagcttgcagagacttcgtcctgccattgtgcacttgccattcttggggttgtactccttgccgggtgcacacgtcaccgtgcgaacggcgttcttggcggtgcaacggtagtaggaggaacagttcaggggtttcggccagtgcatcggaaggttcctagtcctccggtatatgcattcaggatcggcggctccaactagggcaaccactgcagtgagtgccaccacagtgagcagagtagctggatacgagaaaagtaactagagtccatgttactatttgggtacttcacactctcacctttcatcttgttcacttctattattccacttgtgatgatcgagatgtactccacataattgccaaaaagttagtgccttttatataccacattattttcgactgactctaattgtcccttatctctatcaattatgccgatcatgttagacatggccctttcatgtcagtctaattgaggtgtgaactttgggaattgtaattcctggaagtcatcacctatttcagtgtagacactccccaaagtttggtgtttggaattcgcaaagttatgaatgaatgtcacgagcaaggtcttgttccacctcaagatcactcaaaagttaaaagaaaagccagataggtaaaataacgttttttgagagcatgctatttatttgtactttatgtacattactttactttatttgcttaggcacaggtcttgtcgcaagtctggtttaccgagttccagtacagatcacttggacaatccttgatgaatccaatatctccatcgcaatgtatgtataaatgacaatcgtacggatgtggcagaaattgcacaccttgatgagctctacaggaggcgttcgcatccacgttgggaattgtctgggtggtcgcacttgtcggatctgatggatcgcccgaggattcttctggctcatgcgtgggaattgatggttctccagtgggctcttcagtggaatccgaagtaccttcattggtggtttcccccgccggtattttagtctcttcagttgtttcttgagtcggttgacctgtgggactgtcagtgggttgatctgatggattagacgtttctccagtgggctgtcctgtgggatccgatggattttcagtggattcttcggttggctccgatggttcgtcgttggtgggacttcccgtgggattcaatggattttcagttggctccgatggattttcagtagatgtaatgttcgagggcggttcagttggtactactgtgggcttagcagtgggcttccatggttcatcggtcgaatcggatgggtcctccgatgagtcatctgtgggatcccagggatcatcagtggggtcgtcaggatcctcagggggctttggtgaagcagttggcttgacacattgcctggcactaagagcagttgccaaaagcattagctgcaaggacatcaacatccagaccactgaaacccagaagcgtttgtctttaatattaaaaaaataatattcattttcttttcaggtacttacacttcattgcagcgacgatcggtgatctacaaaccaaaaccaatgaataacttgcagtgggcggtgcatttatagcatttcgagctgcatttcattcagcctttaattagcatacaacaagtcactaaagtgtactcattatcactatcttgtccaaacatgataagactgcaataacttgattgataatgaaatatttattagagaaacggaaacaattataattggttaatcagaaacaagatcgttaaatctacaaaatcgaattgtaatgtttttaaatttatttatggatgctccattttttattgttacaatatacatatatggtaatgcgtaacccttgaacttccggttatctagaacaagtaattgacttttcaattattcgtgataagataatgttgaggcaaaaaaaaaaaaaatgtaaccaagataagtcacagaatcgagaagactcataaatggatgttgaaatcgtcaataaatttcttattgcttctaattcatgggattttcccctgaaggaaaccatattaaagtaaatcgtgtaagtcaactttaaagtttaatgcacatctttataaaatatgatatatataattgtaaaaataaaatacagtaaactatttgcgaatcgcagttcatatgtttccggatgcacttgaagtaactaggacagaagtactatattcctagaacacttaatgctgaagcgttagtagttgagaatggtcaatactgataaagcgtactaattaagaataggcacgtaaatacctaagaatcgacaagcaaatacttagcaataataacaataaaacatttatcgtggataattttatattatcctattaattgtgaacaataagataaatttttgtcaaccttgtagaaaaaaccattttttataatatgtatgataattactttaacgtgcaatgagaaaattcgtttcgatttactttttatagaaaattgaacggcaataaatttatcaaaagatgtgaagttgatttagtatgacttatgactgtcaatacacgtgtaaatgaagtagattccacagataaccaagaagagattagttctgtataaagttgaggaatatgctatataagcacagtactctagtaaaaagttctactctgtcggaacgggtaatttttaaaacatgaaaggtagttcaggctgttttacacaatgaactggaaccaatatcgtagttttcttaaggttttcagataatcggattacttggattgtttgcactccttgtaagtggatcgacctcgtctggagaagataccaacatcaaactaacaacagacgaatctactactgtggaggataccacggaggttttagtcacaacactaccacctccagtcctgtgtgctgatgaagatctgtttctcccagcacccgactgcagagagtattatcaatgcctgtacggtgagggaattttaaagatatgtccagacggcctctattgggatcgggagctgaatgtttgcgcctgggactcacagcattgtgctgatgacaagaacgagaccaccacaccatcgaccttgaattgcgcatccgggttaccatttttgccctatataccggactgcactaagtttatccagtgcgtctacaatattggctttaaactaagctgcccgagtggtttgtattggaaccaacctcttcaatcgtgtgactatacctgcgataatgcgattgagttctctggcgcacaccaagtgcaataaccgcaaatttaagaggtagtattttgtaacacccaaaaatgtacattaataccaagcaaaataaagaaatagcaatacaacgtaattggttttcatcagacaattgagttcctattaaagataacggacttcgcgaaaaagatcagataagatggtgaatgagcttcgattgggtttataaatatgattgcacaaagcacaggtatcatttcaacaaatgcttctgtgcaactcgaaagtaaggcggtagagatgaagaataaaaagtggaattttagggaatttataatatgtgttgcggtgacagtagtacttacaaaaatagtgcacgtaaaaactcaacatcaacagtcattacaaaaactaagtaatcaatacgtgatacgtgatggtgatactcagtatataaaatctcggacaagtgaaaaagttagccaattaaacttaaacaaaaacaatgacacggcatcaaaactgaaaattggcgcaccatactactatcaaataaaaataaccagtcccaccaaaatcaaatcgctaccggttgaagtagaaaatgatagaaaagatagttcgggaattgatactacggtagaagatttaacaccgattcctgaggaaactaccactgtcgcccaggaaacaacttatgatcctgaagggagcaccacgagagaagacgacacaactgttgcaatcgagacaactaccgaaaaacctgaggatgatacaactgtagaagattcaacaccgattcctgaggaatctaccactgtcgcccaggaaacaacttatgatcctgaagggagcaccacgagagaagacgacacaactgt

SEQ ID NO: 33842 - DNA, 807 bp, DROSOPHILA
atggtaacccggatgcgcaattcaaggtcgatggtgtggtggtctcgttcttgtcatcagcacaatgctctaatgcttttggcaactgctcttagtgccaggcaatgtgtcaagccaactgcttcaccaaagccccctgaggatcctgacgaccccactgatgatccctgggatcccacagatgactcatcggaggacccatccgattcgaccgatgaaccatggaagcccactgctaagcccacagtagtaccaactgaaccgccctcgaacattacatctactgaaaatccatcggagccaactgaaaatccattgaatcccacgggaagtcccaccaacgacgaaccatcggagccaaccgaagaatccactgaaaatccatcggatcccacaggacagcccactggagaaacgtctaatccatcagatcaacccactgacagtcccacaggtcaaccgactcaagaaacaactgaagagactaaaataccggcgggggaaaccaccaatgaaggtacttcggattccactgaagagcccactggagaaccatcaattcccacgcatgagccagaagaatcctcgggcgatccatcagatccgacaagtgcgaccacccagacaattcccaacgtggatgcgaacgcctcctgtagagctcatcaaggtgtgcaatttctgccacatccgtacgattgtcatttatacatacattgcgatggagatattggattcatcaaggattgtccaagtgatctgtactggaactcggtaaaccagacttgcgacaagacctgtgcctaa

SEQ ID NO: 33843 - protein, 268 aa, DROSOPHILA
MVTRMRNSRSMVWWSRSCHQHNALMLLATALSARQCVKPTASPKPPEDPDDPTDDPWDPTDDSSEDPSDSTDEPWKPTAKPTVVPTEPPSNITSTENPSEPTENPLNPTGSPTNDEPSEPTEESTENPSDPTGQPTGETSNPSDQPTDSPTGQPTQETTEETKIPAGETTNEGTSDSTEEPTGEPSIPTHEPEESSGDPSDPTSATTQTIPNVDANASCRAHQGVQFLPHPYDCHLYIHCDGDIGFIKDCPSDLYWNSVNQTCDKTCA

SEQ ID NO: 33844 - DNA, 3891 bp, DROSOPHILA
ggataacaccatcataaaacaatagactttggctttgtggccaggagcaagcgtaactttgattaccaagaagaatgtatgctattgagttcaataagaaaagccctgtttggtaaaaatgttttaaggtctgttaaggcatagcattaaaacaaaaaaacgctactttggaggttaaattctttttattgttacatgattccaatggatatttgttttatattttatagttactttttttcaaataagtattacaataaaatatctttgcattaacatggactttacattacatactgttaacatggcgacccactgccatacttttttgttgggccaggtcacttacgatccacagcatccatccactggggggtactccttgcggaaactgttgctgctgctgttagcagtgccgttataaagtaacggtaccgcagcactgaagagcccagtgtgttggcagcgccgcgtggcaacggtaattgaattgaaccgggtagcgttagcggttttatccaacggaaaatgtgacggaatattggcgggattgacgtgttataatttatttgttttagtttacgccgtgatattggaaaagcataacaaacataacattgttagtgaaagagtaaaaataggtagcgtttggaatccgattattatatctactatcttatcatttactttcacttacataatagaaacgttattttttgtatattatatttattacttagcttacattattttacttgctttcaatatattatatgtacatataagttgtacctcctttataatgttatatccttgaatacttgaatacttaggccaccaaaaatgtgtttattttcataaatatgcaaattaaaagtaaatagaccagaataagtgctaatactgaaacataaataaagatgatttgcgtgtcattactcaaatatcaactaaaattcgtgaaaaagaattaacaatccatgagtgactaaagggaaccatgtcttctggcgagtgggacctgcgtgctttgaaggcgctggaggaggaggagcagcgcgagttcctggccctcagccagagaaacctcttcgatccgctgccgaatccctcaccggatgtgcccagtgcgaagccttcactaacttatgcccagctgcatcctcacctgctaaagctgccgacgatcgacgagtgccagctgatggccgtcaagcagcagagatcagcggctctgcgattcagtcgcgccctctccttgtccgcccactcactcacctcgcgaaccggaagcgcaacggcaggcggaagtggcctgggctttggccgtaaactgaaagcccgcttagtgggcgcgaagtcgagtggctcactttcgcccggtcggcactcgcacagctacagtgtttccccggtatatacgccgccgcccatgagaagatgtgccaccttgcatcacacgcaaccggtgcgaaaagtctttaaaaatctccaacagctgcaggagcgaaaacgtcaggcggctggaagtcatctgcagaggatcgctggcactggaaaaacgtactggaagtacggagccaattccacggccgcctcgatagtgggccaacgtgcacgccaaaaccaacagatcgaagtcgaggagcccaacggttcggatgagctgaactcggaaacacaggaaatctccgaggcggaaacgggctcctgcagtgtgccgctgccgtcgaaggacaccaatgaaatactccgcctcatgctcagtgcggccagctcggcggtaactgtgacgccaacggcggcggccattggtaacggtaacgtggccggagcaactggtggcgccccgccaatgcgtcgctaccagaatgccagcgatgttgaggaggacgaaactgttgcgtacggagctttccaccaggcggccaaaagcttcgagcgcggcgctctcctgcgagtcggcagcttaacagcccaagagagcgataacagcaaagttaatgccattagccccagtccacagaacagtcccgccagggaaacacaatccacagcggtgggcggaacgggtggcagacgtgtgttcaagtcctgctcattcgattggcccggggaagcgcaacagcatctatccccgcagccacatcaagctgcaaatcctgtagagctgttggagcagcagggaaaggacattcgctttcgccagagggatcactgggatctcgagcatgcccacttccatcacgaggcacttggacacctaacaaccagcaccaccgtcatcgatgacgagctggagcagcatatcaagcactgttcctgctcctgcaaccacatgggctatggcaactcaatggactatcaggtgagtgaaaactacgttcaaaagagattaatacaaataaaaactgaaaacaatttcggttgaataagaaacatatgattaacaaattgtaactttcgaagcttatattgtctattaatgtcggtctattgttataccatcagtataggaaggcaaatggctttagttattgaaattttagatattttgcaattaagtggaatgctaattgtttcctgtttgcccatttaatccaaaaccgcgtcaaattcccgccgtgcacagcccttttacaagtgatggcgccgtgtaattttaattgcagcaactatatctgcagtgcgggtgtccggcaattcaggtgaatggcggcacattcagagggcctccactttctatccagcttttaatgcactctggcggagattccaatacacaggcatttcccaaactcattatcagcgaggccttttgtggacattccgggttcacggctggattggtcctggcagattgccgcctggagatcgccctggggcactgactctgccattgccaagtgctccattgtctggctgcgagtggcccgcatgggatgggttcaacttttaaactaaattgaatacccctttgaatccgacaatgagctggatgcctgttcttgccgggattaagctcacagttgggtttctcgcaccctcacatcgttattgtctgtaattgttaagacgattttaggtttaatagctgccatttcaaatagagttggagtctgttggctgacccctcgaaaactcaagactttatcttttgttttaccacaaggatgcaattgcacactctatgtggccctaaggggtgtgagacttttattgtgcaatactcaggaacaaacggcctgggaaacttaaagcatgacaggagtcttcaactaggaaatattttctcggttaataatgcactctaaagaacttttaaataccattgtatgtagatgatgatgtagatgataccattgtatgatgaaatgattgcctgatagttaggacctgaaaaaatgaattctagccatttgcatagtttgattacgactttataggagattgtttacagcgtacagatagttctacaataggtgcgattgcgattgggtgtgctttactaatagcgttactaacatagggcgtttatttctaactcgatcgaacatccaggggggtcatgcgtctaaaggctgtgggtttatccgtgggatgatccgatcactgcagcgtgctctgtggcggagtgagcggggtccaggtgtcggcagctacggccggagctccattcaccacggcggttggcaccgagaccacggcagctccaccgccaacagtgccccgttccccggcgtgctccagggatgaggactctatcttgatgtcgtgagagctcttcagggaggaactggcgcactccagcgttatgaccgagccctgctcatcgctcggcttgtacatggcagcctgggggtcgtccagtgtctttgaaacatcaacggg

SEQ ID NO: 33845 - DNA, 1587 bp, DROSOPHILA
atgtcttctggcgagtgggacctgcgtgctttgaaggcgctggaggaggaggagcagcgcgagttcctggccctcagccagagaaacctcttcgatccgctgccgaatccctcaccggatgtgcccagtgcgaagccttcactaacttatgcccagctgcatcctcacctgctaaagctgccgacgatcgacgagtgccagctgatggccgtcaagcagcagagatcagcggctctgcgattcagtcgcgccctctccttgtccgcccactcactcacctcgcgaaccggaagcgcaacggcaggcggaagtggcctgggctttggccgtaaactgaaagcccgcttagtgggcgcgaagtcgagtggctcactttcgcccggtcggcactcgcacagctacagtgtttccccggtatatacgccgccgcccatgagaagatgtgccaccttgcatcacacgcaaccggtgcgaaaagtctttaaaaatctccaacagctgcaggagcgaaaacgtcaggcggctggaagtcatctgcagaggatcgctggcactggaaaaacgtactggaagtacggagccaattccacggccgcctcgatagtgggccaacgtgcacgccaaaaccaacagatcgaagtcgaggagcccaacggttcggatgagctgaactcggaaacacaggaaatctccgaggcggaaacgggctcctgcagtgtgccgctgccgtcgaaggacaccaatgaaatactccgcctcatgctcagtgcggccagctcggcggtaactgtgacgccaacggcggcggccattggtaacggtaacgtggccggagcaactggtggcgccccgccaatgcgtcgctaccagaatgccagcgatgttgaggaggacgaaactgttgcgtacggagctttccaccaggcggccaaaagcttcgagcgcggcgctctcctgcgagtcggcagcttaacagcccaagagagcgataacagcaaagttaatgccattagccccagtccacagaacagtcccgccagggaaacacaatccacagcggtgggcggaacgggtggcagacgtgtgttcaagtcctgctcattcgattggcccggggaagcgcaacagcatctatccccgcagccacatcaagctgcaaatcctgtagagctgttggagcagcagggaaaggacattcgctttcgccagagggatcactgggatctcgagcatgcccacttccatcacgaggcacttggacacctaacaaccagcaccaccgtcatcgatgacgagctggagcagcatatcaagcactgttcctgctcctgcaaccacatgggctatggcaactcaatggactatcagcaactatatctgcagtgcgggtgtccggcaattcaggtgaatggcggcacattcagagggcctccactttctatccagcttttaatgcactctggcggagattccaatacacaggcatttcccaaactcattatcagcgaggccttttgtggacattccgggttcacggctggattggtcctggcagattgccgcctggagatcgccctggggcactga

SEQ ID NO: 33846 - protein, 528 aa, DROSOPHILA
MSSGEWDLRALKALEEEEQREFLALSQRNLFDPLPNPSPDVPSAKPSLTYAQLHPHLLKLPTIDECQLMAVKQQRSAALRFSRALSLSAHSLTSRTGSATAGGSGLGFGRKLKARLVGAKSSGSLSPGRHSHSYSVSPVYTPPPMRRCATLHHTQPVRKVFKNLQQLQERKRQAAGSHLQRIAGTGKTYWKYGANSTAASIVGQRARQNQQIEVEEPNGSDELNSETQEISEAETGSCSVPLPSKDTNEILRLMLSAASSAVTVTPTAAAIGNGNVAGATGGAPPMRRYQNASDVEEDETVAYGAFHQAAKSFERGALLRVGSLTAQESDNSKVNAISPSPQNSPARETQSTAVGGTGGRRVFKSCSFDWPGEAQQHLSPQPHQAANPVELLEQQGKDIRFRQRDHWDLEHAHFHHEALGHLTTSTTVIDDELEQHIKHCSCSCNHMGYGNSMDYQQLYLQCGCPAIQVNGGTFRGPPLSIQLLMHSGGDSNTQAFPKLIISEAFCGHSGFTAGLVLADCRLEIALGH

SEQ ID NO: 33847 - DNA, 3409 bp, DROSOPHILA
aagggcctaacgaaaaatcaagtcctattcattgaaatataattccgtttgtactgctgcaacagggattaaatcatgaaaattaataaaacatcacataatttcttagccgtgtgatgtaaagagaataaataattacacagtttatttatgatcaaagtaaatgtagttagaagcaatcgaatttaatcgaaaatcggccatttcgcccactgtacgtcgatggtgtaaacaatttttgagaggttatttcgactgaaacagtcgcggtccgcattttgttccgttttgcacttcatttaccagccagttcgacccaaccatccatccaaccacccagtccaaaagtgctcctcgcagtcgacggcatccaatccattcgaccaagtcgtcctccttgggggcagtaaattctgtttacccactgcgttgtccttgtctttgcagtagatgcatcgccaggacagctatttgttatgtcgtttgactgaagctggtgacatttatccagaaactgcagcaagcggaaggaatattcagaagatgttgccttagatattaaatcgcccccaggcgataacttactggggtagaatttttgttggatattctagccttgaaaatgtcgcatccataaactacaagaatggatgagcaaatggtccttctagaaactccattcattatttaaaattagtctactgcaagaagttatttgttgttgtctgcatactctgattacatgttgtttgctgccaaaatcaaaaacatcaagttgaagaataaatcttatttcaggttcgtagttaggaagttttcaaagttctttcacttctgctacgaaagaccatttgttaaagtttagctcgaatatatgaaaccacagaagttggcaaccacaaaaggcaacccttcagtaaatgcagtctattattttggatttgattttactaagcttataaaatgttttcaatataatcgaatccatcgctaagccaacttatttgcgtcttccaccgggtgtgggtctaaatggttttcgccgcgattttgaatccacaatgagcactgattgtcgcttcaggaagttgcgggatggcacttcgttgtcatcgtctgcggtggccactgtgggtgaagtattttcgaaatattaaagacctgataaggagacggctataacgaactgaaactaacccgccgctggagcctgttctggagaggatgaggaagtgcccgcagctctttgtgcccgtccagcgaatagattgtagtagcaaacgggcatgggttgcggcttctcaccctcttgaatggatggggacttgggctgctccgccttgtacatctcctcctcctcctcgtcgacgatgtccagcttgggtatctcgaacggtggcacatcctcggatttgctcagctcctggcagcgcttgatcttcactttgagtatcttttcgagaagaaacgattaacattgtgactataaaaatggaggagtgtaaacttacctcaatcatatcctcgtcctcggcagtatgggccaaaaagttaggtaattcggcaacgctgacatggagctttctttcgggtatctctatgttgctctcgtccacctcctgcaccttgaagatcatctcgcagatgcgttccttgagatactttaatactcccattgattttcccgcctcgtcagtgtccagtttgcgatcctgctccttggcggcgatactgttcttaatttgctcaataacctcttgatttctggaaataatcgtgatattaaactgaaactatattttcttgcagcacttacacttcgctctccttaacatccgagaacttagaggcctccagttcactgctcaaagcttctcgttccgcctccagattggccttttccgcctccgccgcctttcttaggtaattcaaacgggctgctgactccttctgggcgctgaatctttcgaagacctcaaatggcgatgtggcaccggaagcctccataagctgcttgaacaatgattccatatcgctggtaacactctccagttgagacaccggttcctcctcgccgttttccgttttcgcggtatgctggtcacccgaactggatcctacgctatcctgatggacaagtgtcttggtctcggcaaataacttgcgtccaatcctctccagctccagcttgcgggcctccacttgcttgcggaagtcaagagcctgccgctctctggtcttttgcgagacattagcctgctgctcctgccgctgcaggatcaccttggctgcgtccctcatctcgaccgcctcgttgtgcacctgctgcagtcgctcgatctccgccttctggtcgctgagtgaggcctccaattcccgcagactacgctcgaaacgctccgcatccgtcatcaaggatgcctcaatggagcggtacttctttcgaatgtgctccgcctccatccattggacatttgtgcgatgaatctcgttttccagctggcatacgagctgtggaatgggttaaaaataatatactacttcttttgaaacaccttgcctctctgcggtttccagaagtaatctactcaccttcctgttggcatcctcctctagagtttcgggtggcttctcacccatattctgattttgtgcctccttattggccagtaatcctcgatatttctccaccaatttactaaagtactgttggcgggacttaaaacgatgccgcaacagatccatttgcttacgactctcagtgattttgaggtcggtgagaaagatggcatcatcggcgtttttggcacccaccggataggtggccttgcccacaattaatgtgggggtgcagctttgtgcccttcgggactccccagtggattccttgatgaccactgggcgctgaagtggatttcgcagtcgactcgctcgtatagtctgttccttaatgtcctttttcaacgagctaattgtgtcgcaattaatccgattttgcttctgccattctgccgcatttgccgtcttctggccctctgtaaggattcacttcaaaattgctactttgatagttttggggcttaaagaacttacctgccaataaaatccgctttttaatctcatttatttgtcggttcaattcgtttaacttgtccgattccatgacttcatctgagcggcttacctttgcaaattagttttcagcaatcttgctctctgaactgttgtttgttaaatcaatacgaatgttgttgtggcaacaacacgttcgactggttaccaaacactgcatacgcttcctaataacaataataatatatataaataaataaagtatatagtagtaatatgaacgcaaccatttgtttttagctataattttttaatattcaaatcgcaatattacaaa

SEQ ID NO: 33848 - DNA, 1845 bp, DROSOPHILA
atggaatcggacaagttaaacgaattgaaccgacaaataaatgagattaaaaagcggattttattggcagagggccagaagacggcaaatgcggcagaatggcagaagcaaaatcggattaattgcgacacaattagctcgttgaaaaaggacattaaggaacagactatacgagcgagtcgactgcgaaatccacttcagcgcccagtggtcatcaaggaatccactggggagtcccgaagggcacaaagctgcacccccacattaattgtgggcaaggccacctatccggtgggtgccaaaaacgccgatgatgccatctttctcaccgacctcaaaatcactgagagtcgtaagcaaatggatctgttgcggcatcgttttaagtcccgccaacagtactttagtaaattggtggagaaatatcgaggattactggccaataaggaggcacaaaatcagaatatgggtgagaagccacccgaaactctagaggaggatgccaacaggaagctcgtatgccagctggaaaacgagattcatcgcacaaatgtccaatggatggaggcggagcacattcgaaagaagtaccgctccattgaggcatccttgatgacggatgcggagcgtttcgagcgtagtctgcgggaattggaggcctcactcagcgaccagaaggcggagatcgagcgactgcagcaggtgcacaacgaggcggtcgagatgagggacgcagccaaggtgatcctgcagcggcaggagcagcaggctaatgtctcgcaaaagaccagagagcggcaggctcttgacttccgcaagcaagtggaggcccgcaagctggagctggagaggattggacgcaagttatttgccgagaccaagacacttgtccatcaggatagcgtaggatccagttcgggtgaccagcataccgcgaaaacggaaaacggcgaggaggaaccggtgtctcaactggagagtgttaccagcgatatggaatcattgttcaagcagcttatggaggcttccggtgccacatcgccatttgaggtcttcgaaagattcagcgcccagaaggagtcagcagcccgtttgaattacctaagaaaggcggcggaggcggaaaaggccaatctggaggcggaacgagaagctttgagcagtgaactggaggcctctaagttctcggatgttaaggagagcgaagtaaatcaagaggttattgagcaaattaagaacagtatcgccgccaaggagcaggatcgcaaactggacactgacgaggcgggaaaatcaatgggagtattaaagtatctcaaggaacgcatctgcgagatgatcttcaaggtgcaggaggtggacgagagcaacatagagatacccgaaagaaagctccatgtcagcgttgccgaattacctaactttttggcccatactgccgaggacgaggatatgattgagatactcaaagtgaagatcaagcgctgccaggagctgagcaaatccgaggatgtgccaccgttcgagatacccaagctggacatcgtcgacgaggaggaggaggagatgtacaaggcggagcagcccaagtccccatccattcaagagggtgagaagccgcaacccatgcccgtttgctactacaatctattcgctggacgggcacaaagagctgcgggcacttcctcatcctctccagaacaggctccagcggcggtggccaccgcagacgatgacaacgaagtgccatcccgcaacttcctgaagcgacaatcagtgctcattgtggattcaaaatcgcggcgaaaaccatttagacccacacccggtggaagacgcaaataa

SEQ ID NO: 33849 - protein, 614 aa, DROSOPHILA
MESDKLNELNRQINEIKKRILLAEGQKTANAAEWQKQNRINCDTISSLKKDIKEQTIRASRLRNPLQRPVVIKESTGESRRAQSCTPTLIVGKATYPVGAKNADDAIFLTDLKITESRKQMDLLRHRFKSRQQYFSKLVEKYRGLLANKEAQNQNMGEKPPETLEEDANRKLVCQLENEIHRTNVQWMEAEHIRKKYRSIEASLMTDAERFERSLRELEASLSDQKAEIERLQQVHNEAVEMRDAAKVILQRQEQQANVSQKTRERQALDFRKQVEARKLELERIGRKLFAETKTLVHQDSVGSSSGDQHTAKTENGEEEPVSQLESVTSDMESLFKQLMEASGATSPFEVFERFSAQKESAARLNYLRKAAEAEKANLEAEREALSSELEASKFSDVKESEVNQEVIEQIKNSIAAKEQDRKLDTDEAGKSMGVLKYLKERICEMIFKVQEVDESNIEIPERKLHVSVAELPNFLAHTAEDEDMIEILKVKIKRCQELSKSEDVPPFEIPKLDIVDEEEEEMYKAEQPKSPSIQEGEKPQPMPVCYYNLFAGRAQRAAGTSSSSPEQAPAAVATADDDNEVPSRNFLKRQSVLIVDSKSRRKPFRPTPGGRRK

SEQ ID NO: 33850 - DNA, 1553 bp, DROSOPHILA
tctcgaatgcgagaaacgccaaggaatttccaaggaaatcaactagaaggcattgaaaagaaatcattacaaattaggaactgcattcgaggcgtgattggagtgcactattccggatccgggcgacaaactcagcagcgtggctgggttcacggaaggagcaggcgatcctctccagggtgccatcgcggcagttggcgtagttgatgttggtccaacggcagctataggaactcttggtcatgtagtcgatgcgccacttctcgtccacccgcatgtggatgatgagctccccgctgaccttgtcatggagtactatgtagtatgatccgtggtgctcgatcacctcgatttgaccctcgcctgagaaggagggggaacggtaaggactctcatggaaacgtggtactttaccttgccgtttccactccttcaatttgttaaaacagaaaagtctaacgggctggctgaacaataccctaccattgttcagaatgttacttagttcgccaatcgatctggtcgaactaagcccctcctgtgtttttttcatcgcaaataacttattgtgcgtctccgatacatcactttcggaaacctcactaaaaactgaatccttgcttacgttcaagccattacaagttagtccttcgccagcatcttgtcggtagggtatgggtagtggttctttgtatgcgcttgtacttttaaaattgggttccccagactccagtgagttagcatcagtattctgctggcggctttctatcttcgaagttggctgaaagatgttctgcctaaatactcgtgaaaaggttaaagagctttttagttgttcaaatcgtttcgatcggctattattggaattatctgaaagtaatgttcgattagcatgggaatgaagtagttaaattcctaactatttaccacactgtgatgcctctagccttcgctgcattgtgaaaactgaaattaacgcctttagtgctttagaagcttgctgttgaacaatttccttggattttttgtttgtcctggtcgttactctatcaccaaaagagagccttacactgggcgttaaagccaacttgtttcctgtcaagaaactaataacacccagtttagttgctatcttcggttgttctactaatggagaaatcaaatcttcgatctgtagaggaggtatttgaattccaagtgattttggctgtagtttggcagcactttcaactagttgactatttggttcatcacttatgggttcatttatttcttcggctcctgtaagattgacttcttcaatggatatatttgatttttccattactggttcactgaattctgctaaatttaaaacatttagtgcttccgttgacggtaacttcgtttcattagtttctgttgttatcgaatcgttgataggttgattttccggtagcttcaactgtggtccagtttcgaatacattttcctccgcaacttgctcaacttcttggccagcacaagccatatctaattcctgaataaaatacggctccatagtttgttcctct

SEQ ID NO: 33851 - DNA, 480 bp, DROSOPHILA
atgaaaaaaacacaggaggggcttagttcgaccagatcgattggcgaactaagtaacattctgaacaatggtagggtattgttcagccagcccgttagacttttctgttttaacaaattgaaggagtggaaacggcaaggtaaagtaccacgtttccatgagagtccttaccgttccccctccttctcaggcgagggtcaaatcgaggtgatcgagcaccacggatcatactacatagtactccatgacaaggtcagcggggagctcatcatccacatgcgggtggacgagaagtggcgcatcgactacatgaccaagagttcctatagctgccgttggaccaacatcaactacgccaactgccgcgatggcaccctggagaggatcgcctgctccttccgtgaacccagccacgctgctgagtttgtcgcccggatccggaatagtgcactccaatcacgcctcgaatgcagttcctaa

SEQ ID NO: 33852 - protein, 159 aa, DROSOPHILA
MKKTQEGLSSTRSIGELSNILNNGRVLFSQPVRLFCFNKLKEWKRQGKVPRFHESPYRSPSFSGEGQIEVIEHHGSYYIVLHDKVSGELIIHMRVDEKWRIDYMTKSSYSCRWTNINYANCRDGTLERIACSFREPSHAAEFVARIRNSALQSRLECSS

SEQ ID NO: 33853 - DNA, 2891 bp, DROSOPHILA
gacgaacagaacgaacacgatgaacaggactactcctcggggattcccacgccgcacatctcgccaagcggcaattaaaatcttgtattcgagttgcgggcgcagctgggaagtactttaatttcccacgacgtacgaaaatcaacatggcttcaaaacagacgtcgggagcaatcaactccggcaccaccgagataagcctacagtgagagaaaaagcattgaacttataaagtgtgtttaaaaacaccgttttcacaatttttaatatttaattaattcagattttaaattgttggaaaatctacaccccctttagatataattatctaatttagcacatatatttaacaaattaattttatacatatttttaaaggataattcctatttctgtcgactttcacaagcatagaaacaataattgaattaaataccaaatacaaaaaatggtttggtttttacatgagtagaaacatcttatgaatgaatccattagatactttttgttgtcaattttctgactgtacgaaacggaatcaaaacaaaacacgccaagtgagggtaaaaaggtggcgcgcgtctccggcgaagagccgagcctggccggaggattacgatcggcgcatgcgttccgtctgcacagactccggcgaattgggggcgcaaaaatctccagagattgacagacatactcagttgctgcaggactgtcgcggaatcaagtttatcgcaaggacgaagacgctccacgtttttttcccggtccggcgcgatgtgagcaagtcctagagaacgcgcgcgaaaacttcccacccagtccacccaactccacccccccccccccccgaaaataaaatcatcggtagcttttgtacgccgtacaggtggaaaggcgtagacaaggaaacgggcagtgaaatctataaattgacgcaaaagtgaagtgaagtgaagtaatttaaccacgccctaagcaccaaaaatcaaacaaaccagacatggagcacttgcgaccgctgagctacgaggagatgtgccaaatggagctgctccaggcagccggcggatcaacgacatcctcggctccgccggccatgatgcctatcatggtgatacccacagcactgctgccggctcccatcgacggggcagcgggcggtggagttcccggtggtggtggcattggtggtgcggccatggtggagcactattatcagctgcagcccacgcaccacctcctgccagccgagccgttaccaacgacggcgacagcaacagcaacagcaaattccggcgaattggcgctcttgcaaggcgaacaacagattccacatccgagcatacagcatccacagcaaatgaatatcctgtgcaccggaacactgggacgccaaaggatgccggcatcgggtggtggcgggcataatccaaacataaatcccaatccaaatccctcggtggcggctactttgccgcgcggtttccagcccgccgccttcgttacggacgtcgagtcggatttcgagggcagtgaatgcggtgcgggcagcatgaccaccacctgcattccgcactttcgcttcggagcgtgcggccttcagtccctgcaacagcaccaccagcagcaggatgcagtggtgggctgtggttcgctggcctacatgatgggctctggcaccttgggtcggggccgtcgtctggccggcggtcagggcaaacctaagcgggtttccttcaagggcgacaacctgccaccgccgtcgccaccgccgccaccagccgttgagctagacgagaatgggctgcccataccgggtggaccgggagatgcgggtagctgctcctacatgcacttcgacaactacatggactaccaggtgggtggatgagtcaggggaaaaccaaagatgcagataagtgggaataagagcactcaactattaaaaagtatctgtatgtttggtatatagatagattaattgcttccctatgaagagtatgcaaatatttaatctagataaatttaaatttaaatttcgttagcacttcaaaaggttattatcataaaaataccatatagatgtcattaaataaaacagagctcttttaacttagccattagcgttgaaactgaggaatagaatagaagtcctgcagcttgaaaggtgggcggaagtctgataacgataagaccgttgccgcctttgtaattggcattcatggcgtttatcccacagaaattggatgaagacagggaagcatttacgattattgccggcgctttgtgttcgtgccgcgatttcactgatgccgcagcctggtgccaccaaacgtacactgagaataatttggtgtcaaagtctgaaagttgtttaaagctgattgcaggtgcaagtaactcatctggctttttcagttacgcactacacaaaaaaaaaaaacatttaattgatttcaaaaagtattttttcccagtacactaactctgccctaacagaattaatcgacctggcctttaatggaagatgtgacgtttttattttccgccagatatacaatcccttatgcagattccgtcataaagtagctcgtatacttttatgccgcacatatccgtatatccctacattaaacgatatgccccacacttgatttgatttggaggcgacacagaggggctttgagaggtcaaataatcgctaaatcagggaaatgaatatgagtcccgatcgtctggctcgatgaaaatgtttggtctcttaatgccttttacgattttatgtcgaatcaatatttttataaagctgtactctactgcgattcacaacttaagcatagcaaacaggaaattattctgcttaacaaaatcaatgctaaataatggtctgg

SEQ ID NO: 33854 - DNA, 891 bp, DROSOPHILA
atggagcacttgcgaccgctgagctacgaggagatgtgccaaatggagctgctccaggcagccggcggatcaacgacatcctcggctccgccggccatgatgcctatcatggtgatacccacagcactgctgccggctcccatcgacggggcagcgggcggtggagttcccggtggtggtggcattggtggtgcggccatggtggagcactattatcagctgcagcccacgcaccacctcctgccagccgagccgttaccaacgacggcgacagcaacagcaacagcaaattccggcgaattggcgctcttgcaaggcgaacaacagattccacatccgagcatacagcatccacagcaaatgaatatcctgtgcaccggaacactgggacgccaaaggatgccggcatcgggtggtggcgggcataatccaaacataaatcccaatccaaatccctcggtggcggctactttgccgcgcggtttccagcccgccgccttcgttacggacgtcgagtcggatttcgagggcagtgaatgcggtgcgggcagcatgaccaccacctgcattccgcactttcgcttcggagcgtgcggccttcagtccctgcaacagcaccaccagcagcaggatgcagtggtgggctgtggttcgctggcctacatgatgggctctggcaccttgggtcggggccgtcgtctggccggcggtcagggcaaacctaagcgggtttccttcaagggcgacaacctgccaccgccgtcgccaccgccgccaccagccgttgagctagacgagaatgggctgcccataccgggtggaccgggagatgcgggtagctgctcctacatgcacttcgacaactacatggactaccaggtgggtggatga

SEQ ID NO: 33855 - protein, 296 aa, DROSOPHILA
MEHLRPLSYEEMCQMELLQAAGGSTTSSAPPAMMPIMVIPTALLPAPIDGAAGGGVPGGGGIGGAAMVEHYYQLQPTHHLLPAEPLPTTATATATANSGELALLQGEQQIPHPSIQHPQQMNILCTGTLGRQRMPASGGGGHNPNINPNPNPSVAATLPRGFQPAAFVTDVESDFEGSECGAGSMTTTCIPHFRFGACGLQSLQQHHQQQDAVVGCGSLAYMMGSGTLGRGRRLAGGQGKPKRVSFKGDNLPPPSPPPPPAVELDENGLPIPGGPGDAGSCSYMHFDNYMDYQVGG

SEQ ID NO: 33856 - DNA, 1825 bp, DROSOPHILA
cagattctagagacatagacgcagcgctatttttttgacccatatagccacgcccaaacttttgtcaaatttttccctcatattattattttttttaccgatatcacaaaacatattacaatttttcgttcacagtcccagctgagtaacggttatctaatagtctcgttttcttattatcaactgagcaagtctccgacttgcgagtaatttgcatacgaaatttacatatctgcagtccccacccacaacgccatgaaccatcctattccggcgtattgatgtatcgcaaccaaaaatgcagcacagcatgggtgtcgaaggcagcaacaaagggtgaaacagaatggacggtgaccaactgacaagtgacacttttccaattgaaattccccctcacccagcaactgcacaactccactggaaaaacccgacaagcagtgtgcatacatatacgtacatacaatacatacatatgtacattcaaagtagtccacgatggtcatgtcagccgagatgtcataaatttgcacgggcacaaagatcgaatattccaaattgagctctggcgttttgtattttgtttttttgaaattttcaaatactgccggctaaggaagcacaatggatggctgccacaacgacatcttggcgcccctcatcctggccattatggtggccaatggacacccgctcaccctggacgagatcgtcgatgaactgacggcggtgatcaattcgcaaaccgagctcgccattgcgcatgaaaatattggagacggaaaacatagccacaagtcgtataagccgagacgaaggcactaaggatcttaacatgcgttatgtgccaaatttaaaatgcaataacttattcgagatttgagtgaatttaatctcttgaactataatttataataaactgatcgtgtcggcggcgacacttatttccgtccgtgagtgaaatagttatttaataaatttcgaaacaaatgtgcttaaaagtgattaaatacacattgtacattatttcaagacggacatatgaaaactatgcacatgtatgttgttttaagctcaaatatcattaggggaaaagtaaatattcataactgaaaagaaaatacttgctacagattgacaatttatcatttattttaaagctacgagtattttttcatcctgttcattgccctcaagcatctcaaattactggctgtagcaaagcaactctgcatacatttttctgccttgatgggatgtacatatgtatgtatgtacgtacatatattttcgtaggtggtggtgcgcgaagcagcagcacgtgtgcaaaatctacggacagagcgagttaaaagtttttcagcgtcgcgaaaaattgtttatgtttcgccttaaaaggagcagggaaaaatttcgaatatgtaaagatgtgtgtggattgctggagaaactacgactaccaccggcatagcgcccacgaggatgtgagtgcggcgaaggaaaaacacttttcctgccgcggatccgtgaagttggggaaattgtcagcacctgtaaccgggatgggatgttaactttgggtaaagaatcccacacgtacgaccgttcgcctaataatcacgtgccgtgaaagctcattaaattcagaggtgaaaagcagcctcgtcccctcttctgttgccattttataaccacataaatgtgcatatgtacatacatcaagatgtacatacatgcatatatcctctggcaggtagatgaaatctgcgaggctcgattacattttattctcatcgccagtgaatttcactgagatacatttaat

SEQ ID NO: 33857 - DNA, 201 bp, DROSOPHILA
atggatggctgccacaacgacatcttggcgcccctcatcctggccattatggtggccaatggacacccgctcaccctggacgagatcgtcgatgaactgacggcggtgatcaattcgcaaaccgagctcgccattgcgcatgaaaatattggagacggaaaacatagccacaagtcgtataagccgagacgaaggcactaa

SEQ ID NO: 33858 - protein, 66 aa, DROSOPHILA
MDGCHNDILAPLILAIMVANGHPLTLDEIVDELTAVINSQTELAIAHENIGDGKHSHKSYKPRRRH

SEQ ID NO: 33859 - DNA, 2753 bp, DROSOPHILA
ccgacaacatagatactattgcctgtgttttgatttaatttaacaatgctgagccagtgggaaagattgtgtgcatcaggtcttgctaagaacacttgtacgccctaaaatgttgcacttatattgatattccttcatattttgcatctaggttggcagtatagcgttggcttcatcaatgaggaaatgatcgccgcccacctgcttccggccaaggacgataccattgtgttgctttgcggcccaccaccaatgattaactttgcctgcaatccggcgctggacaagcttggctaccatccggacacccgttttgcctactaatatgatggacattatgggacgaaattgcattttcgttgtgttatattcctctttttttatctgttgtctcttaccagctcatcaaaatccaagagttcgccaagatttcggcaatgtgattgaaaaccaagcgaataaaaacattaattagtttaaagtttaaagcattttatgtttagtgttattgtggacataaaacatagataacattgataacatagccaaacatcgttattgctaagcattgatgtcgctaaacattgatattgctaaacattaatgttgctaaacattaatgttgctaaacattaatgttgccaaacaagcgatgtggccgcttagaaaaggaacaacttttccaggaagaaaaggtcaagttgacgcaggaggagtgggatttaggttattttattaaccaataaaaaatgctgttcgtttgtaattaatttatttcataagtattgttgttaattaatatgtgattcatttatgaactgaatgttctgactcctattgatttttacttcgtttttaatggccattcagtcaaacaaaaacgttcagttcgcttgaaattttattaaaatgtactaacaaattctatgctaactacttttaacaaaaattatcttttgcaactgcagtaaataataatttaaagtttatttaaaaaacttcagggttcgttgcgacaaatgatggaaatgcgacgtgtcctgggcaccagcgcaccctgaaactgggagtgctccttagctagtatctcgtgtgtgaatttgtagcgagccgtgtggctcattatgtacaaggagcggcgcggcaacaggatgtcagcgtagaagttgttctttagagacgcctccggttgatggcgataggctgcatcgggttctgacccctgggaattcggatccgttgcagttcccgacgattgctgttggtaccgctgctcatccgtgcgcacaagtcgcatcacactgtcgctaagtaggctgattccagagatggtgttgccgcagtactattaggatgaacgaaattaatgataagcctttctggtgatatcattgcaatgctggacatactctcgtgctatccacatggggcttgataacgccatcgggtgcaagatctaggatgtggacatagggcataactgctccatcgaaggcgacttggcgcacgcgctccaggatctctctgtttttagggaaccacttctttcgctccgtctcccgaaaaccgtgtatggcctgcaagacggccagcatcaacttggatattatccatgctaacatacatgttcgtgatcttatcccacatcgtcccagtgatcgaactcgtagcgcagacggctcatatagggctcgatctcctcgtgcagctgctgttcctctggctcactaatgaaatccgtgatgatgcgcatatgctggcgaaactccttctgctccgtttcgggccattttccaaaatatgctgttaaattggcttttatagcgttgctttccaccgcttaatgacgttcagttgtaaacacttttaattggcagctgatttatgaaaacaatatatctacttaccttggcgatggcaccgtctcaaaatgtggcctataagaggacttctgttctggataatcatttcttgaaagttacgtgtaaattgaaaataagcaacagttaaacagctgttcgataatctcctggcgctgtcacccggtcgacttttttttattaatcgctgacttatcgatagttactaacttcattcacgttctccgtttacagtgaacgcattaaaaatcgaaataaaggaactaatcggcgggacaattgaaaattgaacaattttaaatacatttcttattttataccccaatatcactcgatatcccagaaaaatgatgaaatttcgcgatcgcgtttctactacctatgaatttattgttttttttttatatagttcaactggaatcacagcacggccttctccatcatgtccctatcctctttgatccgcaagaggccaaacttcgccaattgcgtttcctaaaacgccgaagtggggagaatagggtccgtctcttgatttgctcaggcttaccccccaaaagcaacagtcagctcctccgtcttgtcctcctcgttgcttacctgtgttgcaggtacggctccaaaaaccgcagctccgctatccactgccaaccgtaggccgccttgtccatcccacgaatttgtgacgcagctttgaccactgcttcttacaggctgaagctaatatagatcgactcggattgtatatctaatcataaatagatctataccctatggggtctgcaaatattataatattttaccaatctgttacaccccttcgctactcgagtagcagttatacataaatatgatctgaaattcttaatcgta

SEQ ID NO: 33860 - DNA, 621 bp, DROSOPHILA
atgcgcatcatcacggatttcattagtgagccagaggaacagcagctgcacgaggagatcgagccctatatgagccgtctgcgctacgagttcgatcactgggacgatgccatacacggttttcgggagacggagcgaaagaagtggttccctaaaaacagagagatcctggagcgcgtgcgccaagtcgccttcgatggagcagttatgccctatgtccacatcctagatcttgcacccgatggcgttatcaagccccatgtggatagcacgagatactgcggcaacaccatctctggaatcagcctacttagcgacagtgtgatgcgacttgtgcgcacggatgagcagcggtaccaacagcaatcgtcgggaactgcaacggatccgaattcccaggggtcagaacccgatgcagcctatcgccatcaaccggaggcgtctctaaagaacaacttctacgctgacatcctgttgccgcgccgctccttgtacataatgagccacacggctcgctacaaattcacacacgagatactagctaaggagcactcccagtttcagggtgcgctggtgcccaggacacgtcgcatttccatcatttgtcgcaacgaaccctga

SEQ ID NO: 33861 - protein, 206 aa, DROSOPHILA
MRIITDFISEPEEQQLHEEIEPYMSRLRYEFDHWDDAIHGFRETERKKWFPKNREILERVRQVAFDGAVMPYVHILDLAPDGVIKPHVDSTRYCGNTISGISLLSDSVMRLVRTDEQRYQQQSSGTATDPNSQGSEPDAAYRHQPEASLKNNFYADILLPRRSLYIMSHTARYKFTHEILAKEHSQFQGALVPRTRRISIICRNEP

SEQ ID NO: 33862 - DNA, 5089 bp, DROSOPHILA
cctgacttccgacatggcttatgtcataaatggcggcgataagccctccacagactttcactatttcgtggacctatgttgtcgagcctttaatatcgtgcggaaaaatgctgatctactcttgcacaccctggcccacatggctacagcaggcatgccgggagtaaactccaatgctgtgcaatatgtacgacgcgccctattgccatctcaatcgaatcccgaggcagctgccacatttgccaagatgattcaatcctctttgaaaagctggttcacgcaattcaatttctttctgcacaatctggcccagatgcgtttcaccccagacgagggatcaggagagctgctatcgttcgtgccacgaaaatatacgtacgtttttgtatcctttagtttatcacttttatctacaaatgtctccggtttcagaatgcagcaggatggtcgcttgaagattgtaaaggtggtgtgtttccagaagcattacagcatggaaaagttttatatgtatattctggaagtgacgcgacatggacagcccgatccgacacatttgttccggtcatatcgggaattcacggaattccatcagaagttatgcatgcactttcctttggttaaactgcacaggtaagtttcagtttgtctaatttttagaccacaagtagtgttattagtttgattcgctttaaaaactaatgacattgataacgtgctgacttcttgtgtctatcaggcgcattatctagacattaaataatggcaaaaatgtgattcgttattgattcacctcccattggaggaaagtttgaacacatttttatcataaatggatttcctgccattactttattattttatgtagtcaacatgatatggcaatttttcagtgatatgtatgtacataaataggtcatagtcatttggctaaatttaacacatagaatactgtatttactaaggaagtcaagacttgcggcagtttcctgttttcggactagtcatcggtattgtttctaacagcgtttgtcctaagtgtcgcagtcatggagcgatgttggctgatagctcgtccaaagccattatcgtcatcactgtcttcctgggagacctgggatccgaataggctgggcactccagtattactcggttcaaaaatgatcgaacgctgcgtgggagttggctgttgcatcggctcatcctcttcagactcatcacctgatgttaccacctcagcggactggtagtactgcagattatccacatcaaagcggactttgagcgatttcggatcacgtttggcaggttctggagctgatcgtgctccctcctccccatcggtatcactggaactggagctgggaagctcttcaggttgatagcacgcaaggggagaagtactaccacgaacattgagggatctggctgatttggtagacctgggcgcgggctgaggagcttgacgctctgatggcaccaccacagccatttcctggcacaaggcctcgaaattggggatttcattgctctggttgacttgagaaccgtttatctccacctcattaacatccagatccgcgtatagatcctcaatgctcattacataattggatgtcttggacctttgttgcattacctcggtgtagtcgggcaatttctgaccgttctttgcaatatctagccgcatcagggattcgtaatctggtagatagggcagaccaggatcgtatggcggtggatttataatgggagctggcggctcaggctcgaatatatccattctcggctctataagctctagttgatggaacagaccctccacctgttccacatcgtccagtctgacggcagcctcattaagcgtcgcctccacagtgggcacttgctctaagctattcggatgcagagaccaattgggctctggcacatccaccacggcgtctaggttggcaaagttctcccagtcctcgtcgatgctcttgccaaatcctggtggactactggccgccggcagctgcagctgatccaaatccaggatgtcggcttcgttcatcacgaatgacgaacgtattcgcacgaaatcactgtcgtgctcaccttgtggtaattcaaggttttcaaataggccattttgaaaggtgggctgtatactaggagtcgcttccgcttcgggacttcctgctatgatttccacgacaaaagctgagtctgtattgctgggtcccccaaagggatcggtatcatttggtgcttgcggttcatctttcgattccgtttcttccttgggtatggctcccctatgaaccacagcggtaactgacatcgctcctcccaaaccatcatctggagttagtaactccggaacgggatcctcaggagtgagaatttccggcacatcatcaactggctcgaacttcacatagcggccgctgttcttgcttcgcaactgtgttggtctagtgggcgcagtcgttggttttacactaaacaactcgtacttttcagcaaagtgatcgaagttgggcattcccagttcgctaggaggctcgggagctgtgtcgacagaagctgcaggtcctgaaggcttggatgcagcagctcctctcatggtcctgggaggtggagcagggatggattctagtatcttaggtagtgaaactaccgaggcagtttcagctagtacttctgattgtagtggcggagaaggtggcttgcgggtaggtggagcggtgtagaattcatagtgctcactgtgcacctccagtcgttgtgcctccgacttctctcgataggaaactggtgattcttccgtggatttgggctgtcttgggctggcgccatatagttgcagatttggaacactgccactgatgaagttgttccctgcagggtaggattttgtttaaaaaatagtttccaaagtgaaaggtcgtcgaaccattcaatatcatttcgactgtagtttcaattgaatggttaccgtttcctatcttcacctgtcgttgctgatgccgatggccatgggctttcgaattcctcgagattgcgacgtcggaacactccatggacagcagtatcggtgccgttaacctgggaaattgcacaaattgtactttaggctattacgatatattcggaattatattagcaccgagcacatcagctgtggattcagctgtttgggctgatcacttgcatgcgtcaccagtggaagttctaagtggtttacacatgaccacagacacgccagctcagacgactattaaaacacgttcataggaaaggggattttgggttttgtttcgagctgtttaagaacatattatcatagatgaatcattaattattgaagttcgattatagtgtcgtcctaaccctgttcctttaagatacatttaacaattttgctctttgcacatcatttattggttttattcaatcgatttcctctttactatacacacttaggagtttgaatgaagaacacccattctacctgagattcaaataagtgaaagcttgcgatttgcattcctcacgcccccatcgctatcttcaatccccaacttacacactctctacaatcatatagccgcaacacctgtgaatgtttgtgtttgtgtttgtatttgccctgccttatcagaaccactcgtcgctggatcgctgagtgtcgtatatacagatacatatgtatgaatattggtatgggtatagctttccttgtggtggtatcggtatcacattaacctttattaactgcgtgcatcgggtgttaagttcttttgatttgcatacgcacctgcgattcgaaagctgcgtaacgtggcggcggttgttgctgctgctgattctgctgttgccgctgcacctgcgatcgctcgaaagtcagtcgccgccggaagccgaagaacttgatccccagcagcgcgaatatcagccccatgagcaacatggccgaggcaagcatggggccaacaacaagaacggcctgttgacctgctggggaatgacggggttggtgaaaagtgtgggcatctttcgagctggccacctaccttggcccacattcttcagctgggccatgtctttttgtctcaccagcaaatctgttggctcggcattctggataaagtcgctggttggcacagtcgccctttgttttgtggccaaaagtgtaatgaaacttcaccacgtcgctaatcggaccgctctcggctccgctaaccagctcgctcgtcgactgattgagcgctgacgttggcgcaacagcttttggcagcgtagtcgccgcttatcggagcgattcggcccgatatcgtttactcggcccgctcttctttcacccactatatggggtctgctgctctcggtctctttggttctccgattctccggttctccgattctacgatttggtgaaatcagtctgcttcattcgtcgatttatcagctattagcggtgttacctcggcgacatgggcagtgataagcaatcgcgaatttgtactatgatttgtcaacgcaccttgacaaaccactgactatataaaaaccatgaaatgtaataataacttgaccattttatcttcggtgataaaagccgccttgtaattgggaataatgtgatagtgtaaacatttaattatgagcttacactaccattttgaattgattacagcatataaagttctaattatttataatgtaattaacagcgtagcttatgtttataattagttttcctacgttgcaatttgaatgtttttaatatatttcagtctgccggctggtgtgcatgtgggccgttccaatatcaaatccgtggcagaaaaacgactacctcttattcagcgatttttgaaatcgttgttcgatgcgtccgaggaaatagcccattccgagctcgtttacacattctttcacccgctgctgcgcgatcagcaggaagccaagcttgggatgccgaagataaagggtaaattacgatgcactaatttccaaattgcattgcaatatatatatatacggattttgcagaggtgaagcaacaaccgtcgcgggataatccccacgagattggcca

SEQ ID NO: 33863 - DNA, 2208 bp, DROSOPHILA
atggcccagctgaagaatgtgggccaagcaggtcaacaggccgttcttgttgttggccccatgcttgcctcggccatgttgctcatggggctgatattcgcgctgctggggatcaagttcttcggcttccggcggcgactgactttcgagcgatcgcaggtgcagcggcaacagcagaatcagcagcagcaacaaccgccgccacgttacgcagctttcgaatcgcaggttaacggcaccgatactgctgtccatggagtgttccgacgtcgcaatctcgaggaattcgaaagcccatggccatcggcatcagcaacgacagggaacaacttcatcagtggcagtgttccaaatctgcaactatatggcgccagcccaagacagcccaaatccacggaagaatcaccagtttcctatcgagagaagtcggaggcacaacgactggaggtgcacagtgagcactatgaattctacaccgctccacctacccgcaagccaccttctccgccactacaatcagaagtactagctgaaactgcctcggtagtttcactacctaagatactagaatccatccctgctccacctcccaggaccatgagaggagctgctgcatccaagccttcaggacctgcagcttctgtcgacacagctcccgagcctcctagcgaactgggaatgcccaacttcgatcactttgctgaaaagtacgagttgtttagtgtaaaaccaacgactgcgcccactagaccaacacagttgcgaagcaagaacagcggccgctatgtgaagttcgagccagttgatgatgtgccggaaattctcactcctgaggatcccgttccggagttactaactccagatgatggtttgggaggagcgatgtcagttaccgctgtggttcataggggagccatacccaaggaagaaacggaatcgaaagatgaaccgcaagcaccaaatgataccgatccctttgggggacccagcaatacagactcagcttttgtcgtggaaatcatagcaggaagtcccgaagcggaagcgactcctagtatacagcccacctttcaaaatggcctatttgaaaaccttgaattaccacaaggtgagcacgacagtgatttcgtgcgaatacgttcgtcattcgtgatgaacgaagccgacatcctggatttggatcagctgcagctgccggcggccagtagtccaccaggatttggcaagagcatcgacgaggactgggagaactttgccaacctagacgccgtggtggatgtgccagagcccaattggtctctgcatccgaatagcttagagcaagtgcccactgtggaggcgacgcttaatgaggctgccgtcagactggacgatgtggaacaggtggagggtctgttccatcaactagagcttatagagccgagaatggatatattcgagcctgagccgccagctcccattataaatccaccgccatacgatcctggtctgccctatctaccagattacgaatccctgatgcggctagatattgcaaagaacggtcagaaattgcccgactacaccgaggtaatgcaacaaaggtccaagacatccaattatgtaatgagcattgaggatctatacgcggatctggatgttaatgaggtggagataaacggttctcaagtcaaccagagcaatgaaatccccaatttcgaggccttgtgccaggaaatggctgtggtggtgccatcagagcgtcaagctcctcagcccgcgcccaggtctaccaaatcagccagatccctcaatgttcgtggtagtacttctccccttgcgtgctatcaacctgaagagcttcccagctccagttccagtgataccgatggggaggagggagcacgatcagctccagaacctgccaaacgtgatccgaaatcgctcaaagtccgctttgatgtggataatctgcagtactaccagtccgctgaggtggtaacatcaggtgatgagtctgaagaggatgagccgatgcaacagccaactcccacgcagcgttcgatcatttttgaaccgagtaatactggagtgcccagcctattcggatcccaggtctcccaggaagacagtgatgacgataatggctttggacgagctatcagccaacatcgctccatgactgcgacacttaggacaaacgctgttagaaacaataccgatgactag

SEQ ID NO: 33864 - protein, 735 aa, DROSOPHILA
MAQLKNVGQAGQQAVLVVGPMLASAMLLMGLIFALLGIKFFGFRRRLTFERSQVQRQQQNQQQQQPPPRYAAFESQVNGTDTAVHGVFRRRNLEEFESPWPSASATTGNNFISGSVPNLQLYGASPRQPKSTEESPVSYREKSEAQRLEVHSEHYEFYTAPPTRKPPSPPLQSEVLAETASVVSLPKILESIPAPPPRTMRGAAASKPSGPAASVDTAPEPPSELGMPNFDHFAEKYELFSVKPTTAPTRPTQLRSKNSGRYVKFEPVDDVPEILTPEDPVPELLTPDDGLGGAMSVTAVVHRGAIPKEETESKDEPQAPNDTDPFGGPSNTDSAFVVEIIAGSPEAEATPSIQPTFQNGLFENLELPQGEHDSDFVRIRSSFVMNEADILDLDQLQLPAASSPPGFGKSIDEDWENFANLDAVVDVPEPNWSLHPNSLEQVPTVEATLNEAAVRLDDVEQVEGLFHQLELIEPRMDIFEPEPPAPIINPPPYDPGLPYLPDYESLMRLDIAKNGQKLPDYTEVMQQRSKTSNYVMSIEDLYADLDVNEVEINGSQVNQSNEIPNFEALCQEMAVVVPSERQAPQPAPRSTKSARSLNVRGSTSPLACYQPEELPSSSSSDTDGEEGARSAPEPAKRDPKSLKVRFDVDNLQYYQSAEVVTSGDESEEDEPMQQPTPTQRSIIFEPSNTGVPSLFGSQVSQEDSDDDNGFGRAISQHRSMTATLRTNAVRNNTDD

SEQ ID NO: 33865 - DNA, 2606 bp, DROSOPHILA
gatagatatgaattttgggtttttgggtttttcgcattcgccaaaaattagcataagaaatgtgctgatgtggttattattcaaacgctcgactaatttgcatcgctatgcggatttaagttagaaaacttatcgattatcccctggacagatcgccaaatcgccagatcgccagatattttcctacggcttaattcattgaattattcatgtgtgaaggtcgtccgacgtctttggctgggaatacctggcatctaggcgactggcttactaatctataagaaattatcgcggactgcttaaaaataggcgatgagttcacgcggccggcgattaattgcacaattggctggaatgcgtgttcctccactcttcgagtggtaaattaatggcgagtgccattaatcaaacttacccttctattcggcaatttatttttgaacccaacaactcaacaattccccgccgcaggcacttcgttataaataaaagcacgagtacgccatacgccgtacgcgctacatcgccatctgtctgctcgacttagtgctcgaggtttaaaaataaatgccagtttgcggtgcgccaaatcgtaaccacaaccgcaggctgctcattcctcttgtctctgatgtatttttatcccagcaagcatacagccgccacttgtgtgccaattttcttgtcgaatgactgtcaagttcgtgccttaagtctttcgttttctccgcccgtgcaagtcatggatagttacaaaaatagatcccttcttcagacgcaaaagtttccattgcctcagatgaagttataagccattttaaatttagaaaatacatatggagttaccttgtttgctctcaatactctttaaactcggaaatctccccttgagctggtttgttttcgttattttgttgctgttttgtaacccagtccagtctgcgatatgcacatatttaaatttcgttcgggcacaatcacgatttatagccacttcctcatgagctcgcaagacaggggttagcgcataaataaatcgcagtaactacgaccgcatcggggaagcaacaaagaagactggccacttccgcttgcagcacagtaaactgagaacaatttttatgctttgccccagcggaatgtattatttttccattaagagcactaaacttaagagtcttgaccctgccaaactggaaacagatattacattttgattgtttccgtacaacaggaaaattcatatgataagtgttttttttattattgcaagtaatattcggtaatatagaagaaatttgtattattcctctgtactcatttgccttttctctttctattttttgcagcccatcctggcaagtgcttcgacaagctgacccgcaaggccctgctgcccgacaaggagtacaagccgaaaggcatctgcgcggcgatgacttgcagcctggaggcgctcgagatcagcatcgagacctgtccctatgtggaggcacctggctgcgaggagctgcccagcgaccccaactggcggttccccaagtgctgtccgcagttcaagtgcgtcgatttcaagaccggcaaggactttatcgtctcgctgtagatcggctatatgtatagatccatcctatatagccgcaactgaaacgtgattttacatgaaatgtattcgtagttttgtaatacttgaatgagagagagagagagagaatgagagatataatgaaagcgagaacgagcgactgtgtgtgtgtgtgtgtttcattcttaatttatttattttattttgtaaataacacattatctgcataaacccttacaaacccgtcatgtttgaaaatgtgaacataattcgattttgttttgatttattcaaaagtccctgtatgcgatatttgcaagtatgactaaccaccatccaccagctatgtttagtccataagatttaagcgaagtaataaaaaatcagaaatatgcaaatgtttactttaacgtattgacttggaaacgtgattggcagagtcatgtccaaatttgaggtttatttgccgttttgtccaccggattacgcgctcttctttttttggactttgtcaataatccacgagattatagccggctgactcatctgcggaccactcgttggtcaaacatcgcacatgccgcatgtgaaacgaaccgcagcgcagatccaaatacgatcaaaagtttattgctcggagagtccaacggtttgccgactgtgcgcctgatgcgaatgctaagtttatagccgagtttatgaggcccaacaggaaatgcccgggccttagcaattgaggtggccatctgcggatgttacgaaaatagaagttgtgcttaaacgtttaaaaccaataaagaaaagatattgcaagccgaccgcttgatccggctttcgagcattttatttttaaaaggttctgttctttaatagatcttaaatgtgtcattagcttattattaagcgaaagtgtttcctttgcgtctattaaatggcaacaatttgatacaaagattctaactttatacttgctattacatttttagggacatttaaaatgttgatttttaatcaaattaga

SEQ ID NO: 33866 - DNA, 276 bp, DROSOPHILA
atgagctcgcaagacagggcccatcctggcaagtgcttcgacaagctgacccgcaaggccctgctgcccgacaaggagtacaagccgaaaggcatctgcgcggcgatgacttgcagcctggaggcgctcgagatcagcatcgagacctgtccctatgtggaggcacctggctgcgaggagctgcccagcgaccccaactggcggttccccaagtgctgtccgcagttcaagtgcgtcgatttcaagaccggcaaggactttatcgtctcgctgtag

SEQ ID NO: 33867 - protein, 91 aa, DROSOPHILA
MSSQDRAHPGKCFDKLTRKALLPDKEYKPKGICAAMTCSLEALEISIETCPYVEAPGCEELPSDPNWRFPKCCPQFKCVDFKTGKDFIVSL

SEQ ID NO: 33868 - DNA, 3122 bp, DROSOPHILA
cctgcatggtgtggatcaaagcctatattggacattttcgtagacccagctaagggaacacttttggagccccttttgatacttcctcgcagttccttcgccaacttttggggtccattcacactcggaaatgagccgggctttagttttgttggatttttgcggctaaagcccaattcgtattgcatatttcgctcaaagtcattgggtgcaaagtgctcattgcaaatacaggctgtttaaaaagatgcatctataattttttaactttttaagcagttgatgttaaacattaccagttgtggggtttatattatctcgctggcaaaaatctatccacctttggaggtttggcttttctttggggaagtgaaagtatctccatttcgttctattggcaatacgattattatttccgcaattttttacagcgcagcgcatttaatatatttatgttaaagaaataacaaacaaacagctgattatcaggctaccaaactgaaagttgtgtgacgactaaattggtttgaaacttagctgcgcgagcggataatggataaattgggtatattattcgataactaattgtcgtttccttttttatttaaggaaatagagaaatagttgtcattaagaaccaaaaagaatagacgtatttagcagatgaaattctggtttcagcaattcatttaaattataagaattttgttcagcttatcgataacactttcatttcttaacaatcagctgcttttgttttttaatctcttattggtttgtttattggttttatttgatattatgttgaagagcagcaatataaataggtaaactgaattttagagtgtattatacattgtgctgttgtaaaattggcattcctagtgtcctcaacgaactccctaatgacccagcaagggattccaccgcccaatcttctcacaatggaaaaccaaaacaagatgcggaaacctgttgctcctcccaggacaacgaagtcatggccagtctagccgctttacagttgtccgctggcgtcctgcaaatagcggagcctccactaaaccatgtgcgcacccagcttagggaattgatgtaagcactgtggttcggattttaaaaatcacttcacggactgcaagtctcatttcagcggtaggcagaacaaaacatacatcgatttgtccaaggagaaatataaactggactgcagcgaagtggccaggctgaatgatatggtaagtaccacctggccatgtcaggaagtgttaggtacctaaatgttgagaagattttcttctggccaactttcacttggccttcagtgggatagccccgtttttaaaacatattgtaacttataaaaaataacaaaaatatgtagtagaaattcgaaagttgtatttatttgatgaatatccaaagaggttacaaatcataatacccttcaattaggtttaagagaaagatttattttattttgtcgaaacacatttataaaatatcagtattgatcaaagactaaaacacatagtctccagtatacccgagtttcctaggtcgactgaagccgttcagatatcacttctgtttcgaggcaactatcaataattctgaccaattagggccattctataaggcactatccatcgcataacttaagtatcagatagctcagctaattaagttgaccaaaatcttatcagtgggtgtagtcctacgtctggaatcacaatctaatctaaagacaaacagccaacaaagtaacttgccattcgagagttaaattaattggctcaattaccatatccattttttttagatgagcgatgtaaagcgatacaaagataagctaacaaaaatcaagaaggaaatgcagggcgtctatcagcgcaccaaagagttaaaggtgagaaatgatttaagcaaagaaaaaaatccataataaaacagtaaagaaagtaatcaaaaattgaaatcccgctgttgattaaagtgtttattagctttgaattgctgattacagaaacgagccgctaacgtggcggcctgcaagcagcgtgactaccagcggaaactcgagaggctacagcacgaggagtcgctcattggcagccagtagacgaaggggatcagtcaacacctaaccaggtgtctcccggaatcttcaagctacctgtaccacctcgttaaagcgcatttacattgggatttccgtttacaactagccaatattgtaacagataacagttgaacaaaagttaaaccatttgaatacataataataataattataataataactgtatacgttataagaccaggctatcgtatgtctgcgattagttggaaaacattacattgtatattgtgtatagttaagtaagcacttaagagatttcacagaaaaaaaaagataaatgcgtccaatgagtaaaggaagcaaattactactatacatttagctgcaaatattatttataaatatacaaatatttatgtttaacattaagatggtgtggagaaacaatagttgaacaatcacagcgccaaggcagcggcttatttaaactaaaattcgcggtaaacattgtttttaactactagaacatgcaaacaaccagctgcgcttgaaattctacaaataattaagttctcacattggtttcaattgtaaatgagaaaatgaggaagagcttcgcttacgcgacatgcacgcgtaggtggcgatccgtgtgagtgtggggctactgagataagttactacttaattaaagcgagattacaatacaggtagtacatcgattcaacatgcagctcgggagtagaaatatgttggagtgcagcattcatttgaactgtagaagcgtggcccttgtcgccgctgttttttaggctggcgctcgttggtgattggtgttgtgggtggtgatgcgtccaatacaaacattgtttagctaactctactatactcctgatcattcagcatgtgcattgcatctgtcggtgcgaaatacttgacagtgcctaaaaatattcagaagagttagtgaaacatttatattattgtattaaataataaatttacaagtaaaagctaaagggggattgaatctaataaa

SEQ ID NO: 33869 - DNA, 363 bp, DROSOPHILA
atggccagtctagccgctttacagttgtccgctggcgtcctgcaaatagcggagcctccactaaaccatgtgcgcacccagcttagggaattgatcggtaggcagaacaaaacatacatcgatttgtccaaggagaaatataaactggactgcagcgaagtggccaggctgaatgatatgatgagcgatgtaaagcgatacaaagataagctaacaaaaatcaagaaggaaatgcagggcgtctatcagcgcaccaaagagttaaagaaacgagccgctaacgtggcggcctgcaagcagcgtgactaccagcggaaactcgagaggctacagcacgaggagtcgctcattggcagccagtag

SEQ ID NO: 33870 - protein, 120 aa, DROSOPHILA
MASLAALQLSAGVLQIAEPPLNHVRTQLRELIGRQNKTYIDLSKEKYKLDCSEVARLNDMMSDVKRYKDKLTKIKKEMQGVYQRTKELKKRAANVAACKQRDYQRKLERLQHEESLIGSQ

SEQ ID NO: 33871 - DNA, 5181 bp, DROSOPHILA
aggaatatggctaattcccattagcaaagtttaagcggcttacagacggtaattgcagttctacagtctcaccttatggttcacacgttatcctttatcgattatccatgctcagcaggcgcagttaaccctttgactttctggccacataagaaaatactgttaaataatattctttaaatttacccaaaatatgctctttagttctcgcgctttaagcgaagccctcaaaaccttgttagtagtgcctttatccacagaaacgacaaataatcccagattcgcaaaggaaaagcaagctgcacaaacaagccagaaaatgacacggcaaaatgtggaacagggtaaaccgaagtcgacataaatggaacgagctgaggaactgcctcagtttaaataagtagaacagccgctgaggctgtgcgctttaaatagccgtggtaattagatgcatgacacattagtctatctcaagattgcatgcagcttagcaacaaatctggagcaagtcagatttaggtaaattggattttgccgagtaaccacaaagcctagttaccactcaaatggtattataagttataagcttacgttctgctgaattgtttaagccatcttaaataaagtaggaaggaaactatttctcataatatcttttctatcaagcaagtcaaagaaatgaaaagttacttttgaaatataagtgctcagctgtttttttaatagactcgatttattactatatatttatgactgaccatatatatgtatcttcatttcgacccaacactgcgtatacttaacggggtattaaaaagaaacttatgtgaaacttaaatttcgatttaaacggggcggggccaactgaacgcttcagtaaggcaacatacttatattcgaactccagaggactcatttcctgggacgtgctcactgcaaagtggagcatctgcaggcggctacgtgagccgaaggagtcccagctgataccccaaaactaatgccaaactctgcccgtttttctcctccaattacagtgcactccctgccgcatctcacggtgctaagcctctccggctgcagcaaactgacggatgatggagtggagctgattgccgagaacctgcagaagctgcgcgccctggacctgtcctggtgtccccgcatcacggacgcctcgctcgagtatatcgcctgtgatctgaaccagctggaggagctgacgctggataggtgagtaccagtccaccggatcagtgcacaaggtcgcgtctcctcattgcccctcaccacccggctgcgtaattattcatgagtaaaattcaatttccgtcgccgagtagctcaacctcatctccgggggcaaccattagtcctcgaaaactgcagcgagttgcagacagaaaaaaatcattaaactttcccgtttaaattatgaacaaccataaacaaagccgctcaaaaaagcagaacaattttaaaaccagaaacaatttggttgatctcaaatacattactcttaaacatatttagttttttatttatacaaatattattattcaatttaattcgtttgccaagtcgtacatataaaatacttattactactttcatttataatttaattgaaaattgttactttacttttcgaaacatttttgaagttaatgacagttatgaatatgagttcacagtttgctctatccaattcgtatatctcataacatttgtataaactagaacatttgaagtggaataacttagaataccaaacagagcaacacatttctttgccgaatacattagaattttacccaacacttcgcctctgaaataatttgtattagtaattccgaaagaatctgcgatacaaacttgattctgttcgatttcgccatgtagttgcttcgcacattcttcgggactaattagctcaacgttatgctcagtaatgaggatgcgattttcactttgttctggtacaaatctggagaaaggcggagtagattctgcctccatctgatgccttagcatttgaagcatacagattggcttgataccttctggaaaatagttacctaaggtgactggctgcttaagtttaagcagtgctatatcatgtttatcaaatcctgagtagttgccatatctaatgatcgcatcgacagcaagaatattgctaatagttgtagtcaacggtagaacatttctgtataagaaggtaaagctttggctacttgttttattaatcaagttaatgttacttacactatttctggcaagcctctggcaattgtaataacaaaatctagaaggaatgagggcaattaatttaattgattttgtttttagtaatcactttagtatcactttcagtgataaaaaccccattcgccttaaaattgtttccaaaaacaaggcccatttgtagcgatgttatggtatcgccaccacaatccttatacaaccatatgtccgggttactaacacttgcagctcttgagtttccggttaaaatttcttcttcttgtattgcattcggaactgattcctccaaattcaatctatccacataggccgcaatccagtccacatgggatgtaatgtcggtaaagacaactggtcctttgcggtttgggtttttataacttactatcccgatctgaacttcgcgtttgatagttccagcaatgatgacgcttttggtcaacggatttccagaatagagaccactggtttctccatttaaggcaccagcacatatttgattcaaactgggattaatattacactcgttttgatttagcctatgaaagataagctcgtgcagattttcgctttccaagccccgactttttggagcccaggcaaaggccttgaaggttcgaatcgactgtacggaactcatgattctcttatccgtaattatgcatattgagtgaatgtcggctataaatgagtggttttacgactatcacaattccgtttaattgccaacttacccgaaaaaactacgctgtacgacagtttaagcaatccaatatcattttggatgggcgatttagaggcgaatcggtgtacaactgctgtggaaaccggaattctagagtccatagtatcagcatctggaatattgtaagcccccaactccacaaatctaaaataaataaaaataatagtataatattgatatttagtaaagataatgatgcttttcgaaaacagatattcctccaaaaatatgtcagtatctacataatttgaggatacttacagattgacctgttgatcaatacaccgagcagcggttagaacaatgcctaatcaaagatttgtattatcaaatgtgagaatcttttattgtttcattatgtatttaaatacgaacgtttgtgaatcagcgtgccaccgcacaggaaatgcgaggcattactgatggctgtcatccaagcagctgcctgtagtcctgccctgttcagctccttggaatttccacaggattcatccaaaagcttggctgaaacctggtggccaaggagcagagtgaacaagggaatccaagctaaagatgactgcatgctacgcgtggcacgaaacgaatgaaacataaaatgcaagaccggttctcacatatgaatttcttatcaactgtttcatattcggacttcttagattttttatttaccaattttttttttttaattttaaaaagtatttatttaattcttaaaagtatgaatgtgtacatatatacattataaataaatttttttatttgagatttgcctattgatataaacagtttgtgtatggtcttaaactgcgagtttccgcattttacatcgagttatttatataatagatttatctaatatcctttcaggtgtgtgcacataacggacattggcgtgggatacatctccacaatgctatcgctgaccgccctcttcctgcgctggtgctcccaggtgcgcgacttcgggctgcagcacctctgctccatgcggaacctccaggtgctttccctcgccggctgtccgctgcttacctcgtcgggtctgtccagcctgatccagctgaggcatctgcaggagctggaactgaccaactgcccgggtgcgtcgcacgagctgtttgactacctgaaggagcacctgcctcgctgcctgatcatcgaataatcgatggatggagatgatcggatacggaacccctgagcactgattttcgattcggttcggtttgggttcgggttcggtgcgatgcggcgaaccatttgagtatgctaatttggtacacctaacctccagtcggcaagttcctcgcgtgctatgtgactttaactttccgtcaacactgtactctatcccttatagttttagacttattttgatttctgctgtgatttgatacggaacttagttaagttgatctgtttaagacgatgatgtaccacaaaagacccgaagatgatatttatttacatgcaatacaatatgtctaatatacatatacatgaatatatatttatatttataaatatacattatttatattattgtagtttttaacaaacgttttatttactactctcgctgtatttaaacatgcagactacgtgtaaaatactactgaaaaaaaaagaaaaccagaaaaaaaccaaactcaaaaaaatgaaaacaaaacattgcgcccaaaagacgaacaaacaacaaatagaaattacaaaacataccaagtgaatcaaaatatgcaattaattacattagttcaaagaagcaacacaacaacaaaggatgaatatttgaaaatatttacgagtttagcgaaaacgtgcaaaagttgccatcagctttagattgaaattgcaattgaaatttacaaaaatcctcgacttttgcataccctgaccagtgaaacctaacttcgattgtaccatatgactaatctgtaattaacttactgctactgaaagtattttaaggtgacataatgagcacgctaccaatgaggtcaatatttaacataatgtttagcaaattgttgtcaaattgcaaaatgcaattgcgaaccataaacaatcgacttctggccgtcaaaagatactctatatatctagcttacgttatagagccgctctcctcattaaactaaagccctcactaaaacttaatgtaaatg

SEQ ID NO: 33872 - DNA, 531 bp, DROSOPHILA
atgccaaactctgcccgtttttctcctccaattacagtgcactccctgccgcatctcacggtgctaagcctctccggctgcagcaaactgacggatgatggagtggagctgattgccgagaacctgcagaagctgcgcgccctggacctgtcctggtgtccccgcatcacggacgcctcgctcgagtatatcgcctgtgatctgaaccagctggaggagctgacgctggataggtgtgtgcacataacggacattggcgtgggatacatctccacaatgctatcgctgaccgccctcttcctgcgctggtgctcccaggtgcgcgacttcgggctgcagcacctctgctccatgcggaacctccaggtgctttccctcgccggctgtccgctgcttacctcgtcgggtctgtccagcctgatccagctgaggcatctgcaggagctggaactgaccaactgcccgggtgcgtcgcacgagctgtttgactacctgaaggagcacctgcctcgctgcctgatcatcgaataa

SEQ ID NO: 33873 - protein, 176 aa, DROSOPHILA
MPNSARFSPPITVHSLPHLTVLSLSGCSKLTDDGVELIAENLQKLRALDLSWCPRITDASLEYIACDLNQLEELTLDRCVHITDIGVGYISTMLSLTALFLRWCSQVRDFGLQHLCSMRNLQVLSLAGCPLLTSSGLSSLIQLRHLQELELTNCPGASHELFDYLKEHLPRCLIIE

SEQ ID NO: 33874 - DNA, 3235 bp, DROSOPHILA
cccatggacttctacgctagcggcagcctgggaccctggactcccaacttcaagccaccagcgataggagagtgcgagaacaagccctcggctgactgttgtggaagatgcacgcgagcggaattggagaaggacgattccggcaaggcagcggctctggacgatcttctcgactttaagaagggataagcgatttgaccggctcgcttccaactgcccacggagccctccatctcaatcgatcagccacgatcgcctgcccaaatatattgattacctactaatttagttagtacaaatttggtttttaagttcttactttaagggcatcttttgtgttcatcacagataggttcataatttttatgttcgcaaacacttttctaacagagatgcaattgttaattagcagcaacaatgtacagaattttaaacattaaaataatgtttaaaacgaaacctgaatatttcaatattgaaaggctctttaggaatattttattaaaaactaataaatataaaatcatttttctagagacatatgttctcgaatacttaaaattatgtttatctgaataatattttcggcttctttttcaaatttttgttaccttttatgaaaatagtccagtgcaaagaaccccccaatttgtgcaaatttccttttttggttcttataaatttcattctctattgcaaaaaaatcaaaaatatttaaaatatatacaatttattttaaaaatttactaaattatgtacacttgaactaaaaattttactaaatttgttaaattatctatagtttgtttgtatatacatttggtctattgaattgactaaaaattggctaaggtaaatatgtacaattgcactacttagactaaattggctaactaactaggtatatacaattgtgttgatgatgtatatatacaatcgaaatgtgacattaactaaaatgtacaattgatctatacaattaactagaatttacaattgtctaaattcggctaatatgctgacactgcatggtcttcaagattggatccttatggttgctcccaggatgtgtggtgttccacgtcgctctcgttctttgattcttcagagatccagcgccggatacgtgaagctccgccaggagctgacgtcggtccgcgatggatgttgtcggtcggagaacatcgcttgcagtgcaggtcgatttcaaaacgaccactggtttatatactcctacaggtagacaaagtgtgaattcaactggataagagtcctttgcctgctgtaatgacttcgaccttggcaaaaaaactaccacaccgcgattacccaaaaatttccaggaaagataagcgcgaacaccttcaaaacatttttgaatacccgctgattttgtggaaagtgctcaagtcgatagagagaaaggaaaaaggtgtgggtaagtaggtagacaaaaatgttgaaggattttgcccaagactcgacgtctgtattccatatgtttagtaaaaggctttcctaagctaccagattaaatacaaatttttagcttatatgaaaacacacacattttttttcataattcataatttttaattctgttggattcagatactgatttgataatatattattacgcttgatgtcagcttttaataactggtcagtcgtttatgtttacgtagatatctggtctttttcaaaactgagatttcctctaaaacaataaaaacgttactcaaggaacaaaccaaaacctcaaaccaacttttctgcttttaacaacaccttggagttgtttttctgcgagttcttcctctgatctttttattgtgtccttgagattacgcatttcagcctttatcttctggtattcgtctttgaggaaaaatacctcacgctttaaggagcatctaaggacgaataagaaatttatgacttatcaaatgtcacataacatgtattaaagtcttacatttcgagctccaagtgcttcacataactgtcgccttccgaatcgattatctccacatgatccttggcatttgactgcgggttaagaggatccaatatttctacttccacgagccggggacctgaaggacagtcgtcatcttcggcttcttcgaagccctcaatatctgtattaaaaccacagagttggatttctatggtttcgtggccttccgaggattgcgttcctgcatggtgtggatcaaagcctatattggacattttcgtagacccagctaagggaacacttttggagccccttttgatacttcctcgcagttccttcgccaacttttggggtccattcacactcggaaatgagccgggctttagttttgttggatttttgcggctaaagcccaattcgtattgcatatttcgctcaaagtcattgggtgcaaagtgctcattgcaaatacaggctgtttaaaaagatgcatctataattttttaactttttaagcagttgatgttaaacattaccagttgtggggtttatattatctcgctggcaaaaatctatccacctttggaggtttggcttttctttggggaagtgaaagtatctccatttcgttctattggcaatacgattattatttccgcaattttttacagcgcagcgcatttaatatatttatgttaaagaaataacaaacaaacagctgattatcaggctaccaaactgaaagttgtgtgacgactaaattggtttgaaacttagctgcgcgagcggataatggataaattgggtatattattcgataactaattgtcgtttccttttttatttaaggaaatagagaaatagttgtcattaagaaccaaaaagaatagacgtatttagcagatgaaattctggtttcagcaattcatttaaattataagaattttgttcagcttatcgataacactttcatttcttaacaatcagctgcttttgttttttaatctcttattggtttgtttattggttttatttgatattatgttgaagagcagcaatataaataggtaaactgaattttagagtgtattatacattgtgctgttgtaaaattggcattcctagtgtcctcaacgaactccctaatgacccagcaagggattccaccgcccaatcttctcacaatggaaaaccaaaacaagatgcggaaacctgttgctcctcccaggacaacgaagtcatggccagtctagccgctttacagttgtccgctgg

SEQ ID NO: 33875 - DNA, 618 bp, DROSOPHILA
atgtccaatataggctttgatccacaccatgcaggaacgcaatcctcggaaggccacgaaaccatagaaatccaactctgtggttttaatacagatattgagggcttcgaagaagccgaagatgacgactgtccttcaggtccccggctcgtggaagtagaaatattggatcctcttaacccgcagtcaaatgccaaggatcatgtggagataatcgattcggaaggcgacagttatgtgaagcacttggagctcgaaatatgctccttaaagcgtgaggtatttttcctcaaagacgaataccagaagataaaggctgaaatgcgtaatctcaaggacacaataaaaagatcagaggaagaactcgcagaaaaacaactccaaggagtatataaaccagtggtcgttttgaaatcgacctgcactgcaagcgatgttctccgaccgacaacatccatcgcggaccgacgtcagctcctggcggagcttcacgtatccggcgctggatctctgaagaatcaaagaacgagagcgacgtggaacaccacacatcctgggagcaaccataaggatccaatcttgaagaccatgcagtgtcagcatattagccgaatttag

SEQ ID NO: 33876 - protein, 205 aa, DROSOPHILA
MSNIGFDPHHAGTQSSEGHETIEIQLCGFNTDIEGFEEAEDDDCPSGPRLVEVEILDPLNPQSNAKDHVEIIDSEGDSYVKHLELEICSLKREVFFLKDEYQKIKAEMRNLKDTIKRSEEELAEKQLQGVYKPVVVLKSTCTASDVLRPTTSIADRRQLLAELHVSGAGSLKNQRTRATWNTTHPGSNHKDPILKTMQCQHISRI

SEQ ID NO: 33877 - DNA, 4348 bp, DROSOPHILA
tgttacgagctaaatttcattattaaaggttggatattcatagtataatactataatccataaagagtaattgaaataaatctgaaatttcctttcaaattataaacaaattattatcgagctaggcaaaaattgtttactgaaaaacaccgatttcgagtgtaagcgaaatatattcaaaaattcgtaatacaaattccatgccataaatgaaactgcgcctcaaacaaacacgtttcttaattggccgaacgaatctctggtttttacccagatcgattgtggactcaccttttggggcactgggtggacagaggaggtggcactgttccctgcaacgacgagttcgctaattgatgcaattgaatcgcctttacctaattaccacaattccattagcatgcccgtcgcgtttggtctggtaaatgctacttataatgcagcactcagcatcaaacattggaataggatctgttccattccctggaaactgtgatctttgatctcttatgcaacatcacccactccactccaagcccttctgaatcattaaacttatatcatactagttgcaacaaattgcatgtttgaattattcatctagcttgcagtgccctttttagcaatgggttctaaactaatagtcaatagtacgatggcagctaattattttctattggtttaccgcatagtgattagaatttactacacagaatcaggctataaaaagaacttcatagctttacactaagatgcatccctaacttaaatcagaactaaagattcattcaacttaattgactacttaagttaaactgaacccctttgaatgaataaaacccggacattgactggctgactaatccgaaatggccctgttgacttggaatggaaaagcgcactccatgtcgcggaacagtaacaacaaaaaaaaaaaaaaaactacaaataaaatagaaaacgtgtcccgagctcgacgacttttggaggggaaaattattcaatcaatgttgggcaattttcgcttttcactgtgcgccaacataatattgctgtcgttgtagttgcaattgttgctgctgctgccgatcacgatgatgatgatgatgatgatagtgggactagtgatgatagtgctaatgatgaggttgtggatgtggatgttttggtcaccaacctactgtagtttccattgatgcggggcacacacatcgaggaagtcgcaatgtagctgcgatatgtgaatatgtatgtgtacttatccatgtgccgagataaatatgtacacaaaacattaagctcacataccgacttctggctatatatatatttactcaaacagtgggttatgaacccgccataccccaaagaaaacaacaacttgtttgcttaacacactgcagaaaacagaaattttgcaaatataaccaatttaactttgggtatgatctagaattaatgagcattgaaaatcattatacattttgatatattaaatatatctttatatattcatgggaagcactgttctcatgcttatcgttcgttattatattccacatggcaatcacatttggcgacatctcgctgctgactgttagttgcacgttgcacatggcgtatgagcaataattaatcagcagtcgtacttgagtttgactctgcaatgaggaagctcaacttctggccgccggtagccatgaaaactaagttattggtgagcagtttccttagcatttccccctgtctgtcgaaagcatttcaaaatcaggcaattaaagtcttgattaagtcaacaagtggctggcaaatgccctatagccatcacacttcttagagactgaaattaaaatcgcaattgaaatggcacgagtatatttccaagggcatattgctaatattatgtattgctttctagacttttgattatattagtgtcgttctttttaatattttactacaataaaatgctaagtgccttacaaagtagatatccggcaattactaaattaattgcactaggatcggagatactatcaagccctattgaataaatcaggcacaataaatcaatacatttttagcaccctacgattaacaagtattaaaatggcaaataaattacttaattgggttataataattttgtacacatgcttagcaatattttacattgtgtgccggctaaaacgaagaattttaagttggtttattaaatgacaaaagaggtacacaacttttaaaattatgcatacaaaatgaagacccttcaatcaaacttgtttcctattgccaaatgtgatcactttgaaaagtgatttcattctatcaaccaaaatgaacttgcgcctctgccgaatgcattatattattcaatccattcgattttgtgtcaatggcattcatggtcagagaatccgcacttaagtttgaactttcgcccaaacacggcggggggaaaactcgtttggcaccagaaaaaagaccaaaaggttgtggccataaacgtggcccagaacgtcagccgtttcagccaagagtgtcgaatgtagtttgaaacgaaacgcaccaagcagatgtaacaagttgagcaattgacattagaaatgaaggcatagaaaagggcaaaagagctaaccagctggccaccacaagcttttgattatggagcagttaccacttgtccagacaacgacttgaccataagacgaccattacctccgatgtcgaggaaacattgcatatatagctcataaaacaaagtccacacagatgcccagatacataaactcgaatgcaagaaaaaaagtgtgcaatacaaatatttggcatttggcaggcgttgtgaaatcgcatgccatgaaggacttgtgtcgttatcacacattaacacatatgagttaacccattaaactattgttgatgtgctgcaatgagatatttcgattaactaacacgcccataaaaggcaatatgaagcggcaagcaaatgggtctaaaatttaaataaccactacaacactttacgaccagcagagggttaaattaataaaaagatagttatacattttgcttaattattcaacgaaatgaacaagcactgtttggatatcagcaagagctagatacttgtaccaagccaaactagatgtcatcacttccatgcattatgcagtactgtttctgattgaataattcattctaaatgtttagttattgaataaatactactatatactatgtatactattactcacagaaattcttgcgctccttgacggtgtagtacacatcttggaactccacatttttggactgtttggcgagtaagttctgcgactgttccatggcgacttctaatgaatttgtttatcgttttttaatgccgctttcaaaagctcatagattaatgaacgatgtgggtggcaagggttggctccgatggttctgatggcgatggtgtctacccggcttttcactgacggattcagatacgtactatgctcgctcgcatctagatacgtgtgctggctgccgaatgtgtcattacctaccgcaccaaagtcggaattggaatgggaatgggaatgggaatgtgtgctggatctgtgctggctgccgcgcggttatttatttatttattttacacttgctcttgtcttttttgttgtacttttgccagcttcgcgattattattgttgtgatttttttatatttttattttgttttttcttctgacttttgattttgttattgttcctctttatgcacgcatggccgtgtgattgcagatttattacccgttttgttttgatcgcactggcgtcttacgcgctgcaaataaaaaattaatcattaaagattttgacatgcgtgcgaagaaaaagcgtggctaaactaaaaacaaacaaaaaatagaaaagcatatgccgattatcaacttttttgatggccttgagtttcgcacctcaaaaaagcaatttgataaaggttgttttttcgggctgaatctaactgcatgtgtgtatgcacatatgttctttaattttttaccagttagctcttctaatagagtttgaacttgaacttgaattgtatgctaattgcggtgatttttttcaagttcaagtatttcaattggccaccagatcgacgacccacagaatccatacgccaaacgtaaaagtcaagaaaaacttgtttctcagctagaatacgacgtaatgtagctgattagcattaagcgtactgcatatattttagccattgtttataaacatttaagtccttttcttaagttgttattaacattttgctgaacatctttataactcctactgaatgcaa

SEQ ID NO: 33878 - DNA, 230 bp, DROSOPHILA
atggaacagtcgcagaacttactcgccaaacagtccaaaaatgtggagttccaagatgtgtactacaccgtcaaggagcgcaagaatttctgtgcactatcatcactagtcccactatcatcatcatcatcatcatcgtgatcggcagcagcagcaacaattgcaactacaacgacagcaatattatgttggcgcacagtgaaaagcgaaaattgcccaacattgattga

SEQ ID NO: 33879 - protein, 46 aa, DROSOPHILA
MEQSQNLLAKQSKNVEFQDVYYTVKERKNFCALSSLVPLSSSSSSS

SEQ ID NO: 33880 - DNA, 2335 bp, DROSOPHILA
tgaaaattgatcataactttataaaaatattttaaattagttacttaaaatctgatataatataatgatataagacttaagtaaaccttagttactagaaccaaatcagtaaaagttttcttatggcaatagttattttgatcgtgtgcgaattcaaatagaagaaaatttccatttgcttatagattattcagcattagagttccctatagagcgtttccgataaagccgtttccaaagtatctttgttgagatgcaaagaaccgtgttttggcacacagactccattgagtcgccgaaatcctttgcggcaaacgcacttgggattatagcagaaattcgccgccggacactcttgtccaaccgggcatttaataatcatgcaactaactgactcattttcctcacaatctacgcctacaacttgatagggattttctgtgaatttataagatagttaggattgtagctcaattctgctagggattaacatttcaccattctgatatcttcttccacctataactaatccgactaacgaaacacacaatattaacagatatacattcattgcaacactgatcgcattgttaaaaataactattactaagaccgaccaaaatcagcgttgctaatatggttaacaattgtctagaactatacaaatactcagttactctttaattgaattgaaagtcaaataaaataaaaagaaaatatacataaattcgagtacctaaaatatttttataaaaagtgcattgaataagaaatatcatgaattccgcagcagttggcttacaaaaaattaaagcgtttgaacttgcatcacttccaacccagttttgaactctgtttacttggccatctaacacacaccaagggcgcacaaatacccacttcaccgtgcttcagacataaaggacctgctcccgcatggaggacctcctgctccgaggactgcaattcgtgtgtgtgtgtgtgtgcgtgatttgcatatatgcaggccaagtcgagcagcagccgcagcaacaacaagtgcaaccaaaacaaagatgctgcgctcctgacactgaaacccgcacaaggccaatcgacgaaatcaggccacgcacacgaatcccgacacggtggcggtggcgatggcgatgacgatggcgatggcgatgtagatgacgtagcgttgcgatgcgatgcccccggcaatcagcctgccacagcctactacagaaggctggctttcccagacccggagacattgccactcccactcgtactcccgaacatatcccaaacccagaagcagaggtaactgcactcagtccaacacggtgaacaaatgctagcaaacaattttcggaatatcatcactcaaattaaagtgtagtttctattaaataaaataaatagattttgtatatctatttataataaaaattttttccaagacatctaagaatattgaagtgcataccagccttaggttaaaatagagctttaagttaacattagtcagcggaaaacaaaaactgaatatatatttttcgcagtgtactcgctatgctgcaatcggtggcgagtaagcgccgagaactcacacatttctgaatcggagagtaagagtgtcggcggcaagaggcggctggaaatgtggagtggtggtgggtgcgatgcggatgtgctcggcaagtgcaactcgctgatgcgcatgtggatgtgcagtggtgggtgtgggcattgtgtgcgtgggcacttcgacgcctttccggcattcaggcattgcatcaccatcaccatcatcatcgtcgtcgtggtcgttatggcggtggggtattgtggaaagcgaacatgcagcaagtcgacgcatcctgccgtattctgccggtcaaaccgtcaacatttccattcttataacgcaaagtgtgttacaagtggcaggcaatgtcgctcaacagcgttttaaaatttttagaaaatgttgtacttataaataaaggctaaaaatatgtttagttcagtctcgaataaataaaaaaatgattgcctacatttgggataccttttagtatttaaagcggcgtatacttgatattattgcgcatacgcagcgcgtttattcttaagctggtgaaccataaaatgttgataaatgttatgggtgaataacgtttcttttaaattctatcaaatgttgaaggggaaaaatatattcggtatgccattttagtacttagcgcggcgtatacttgataatattgcgcatacgtaatgtgatgggtctccgttaaaatatcgtctataactagcaagataattgctgaatagtaaagacttt

SEQ ID NO: 33881 - DNA, 335 bp, DROSOPHILA
atgcaggccaagtcgagcagcagccgcagcaacaacaagtgcaaccaaaacaaagatgctgcgctcctgacactgaaacccgcacaaggccaatcgacgaaatcaggccacgcacacgaatcccgacacggtggcggtggcgatggcgatgacgatggcgatggcgatgtagatgacgtagcgttgcgatgcgatgcccccggcaatcagcctgccacagcctactacagaaggctggctttcccagacccggagacattgccactcccactcgtactcccgaacatatcccaaacccagaagcagaggtaactgcactcagtccaacacggtga

SEQ ID NO: 33882 - protein, 103 aa, DROSOPHILA
MQAKSSSSRSNNKCNQNKDAALLTLKPAQGQSTKSGHAHESRHGGGGDGDDDGDGDVDDVALRCDAPGNQPATAYYRRLAFPDPETLPLPLVLPNISQTQKQR

SEQ ID NO: 33883 - DNA, 2285 bp, DROSOPHILA
ccgcgaggcgaacggcgggtgtgggcgtgggtggtggggctcacaggattcacaggactcacagccacaccgccaagcccggcgaccaatccgccgccagcagagcagccttgccgcatctgagccccgttgattgttgcagttgcaaggaccttcctgtaggcacaatcacgaccctcgccactccggtgatttttaagggggttcctcctgcctgtgtgtcctacactgctcgaagctccaaattgcagtggtggagcagacactccccgagccacagacacccatccagtgccactcatactcacactcatcaggttggtgctgaactcggactcacaccctgagattgtcaatatgctctcttcctatatgtatgtatctcgtccttgctctctctctatcgccctacgtaactgtatctcatgtttttgttagtcctgtggattcatttcacagcatcatgttattaacaggggagacttgtgttaagtttgtgtagagccagagaattagtcacattaaagaagagttgcaactgatttaaatgttcaaaaaactgtcgttctagatatcaactaactaagtaatagactaaaatattaagagtaataatacattttcgcccattaatcattttaattcaggctaaaataataacctatatagttttatttgttagtattctaggtattgtaaaagacattcgtcaccacgcgccagattctagtccccaaaatatctttaatgttgatacaactgtcttgtggtaggctaagttctttgcaagtcattatttgcttagcccaattaaacagagccaaagttctgtatcaaatggtattatgcgtaaggttctcagtgagaacttctcacgctaatgtaaataaacacaaatccgtcaaaagttcgcatttctacctcagccaggggatataaatatagcacgatttagatcagtttagcatcagttgatcatattcaattaccacacaacaacatgaagtactcctgtgttttgctcctgttggccaccgtcgcctgtttcctggtgagcctgtccagtggcagtaccacgaccacaagcacagatgccaccaccacaacgaccaccgcctcgtcctcggacaccactaccacgacaacttcgtcctcggacaccacgaccaccaccacggcatccccctcctcctccaagaaggagcacgtgatccactacaagcgcaaggtgcaccgccccaagaaggtcaagacgatccgcaggaagaaaaaccgcagcggttaaacatctttagattacctcaaacacacttgcaattaacctgaactccgaaccccgaagacaactaccatatcattaagattactatatttattattgagcaaagaaacgtacttcttacttaatatataattaaattcaaaaattgatatttcaatattttattatttcaacgaggactggttaaagatttacttcatctagtcctatgcacaaaatgttaatttcaaaaagcaatgtgaaaaatagtaagcaacacatatggttttgcgtttttaaaggatccaaactgatagtaaaccatttcttatttctatgactattttaactaagcaacaaagtttcttgagtatcctcaagtgtggatatgattttcgtaagaaattcccatctcttatattattaaaaaaaattgtaaaataattaaagtcagtagtttttacgacagtggaagaataatttttgtttataactatgtcgatacttggcagtatagacgtaatctatggtcttcctgcttttgtgttgccaaaatctctacatagtttttaattgtacgcgttaaagtttgcttaaaattatataagcaaaaattgttatattattattaatattattataaattattataaaattattattgtacaagctatcgcttgtaaaagttagcttaagagtataaaatttatacatttttattttaaaaatatataaataaatatagtttacactgcaatagctattaagtgaaatgctaattgaattcaaggagttagagttcgtaacaagtgcaaatctattaaatagtaaaatattgaaatacattttctgaatttaatagttgaacttgttggtttgcggagcaataaatatattgtagtattcttaatgatatggcagttgtcttcggaggtcggagttcatgttagttggaagcgggtttgaggaaatctaaagatgtttaaccgctgcggttcttcttcctgcggatcgtcttgacctt

SEQ ID NO: 33884 - DNA, 285 bp, DROSOPHILA
atgaagtactcctgtgttttgctcctgttggccaccgtcgcctgtttcctggtgagcctgtccagtggcagtaccacgaccacaagcacagatgccaccaccacaacgaccaccgcctcgtcctcggacaccactaccacgacaacttcgtcctcggacaccacgaccaccaccacggcatccccctcctcctccaagaaggagcacgtgatccactacaagcgcaaggtgcaccgccccaagaaggtcaagacgatccgcaggaagaaaaaccgcagcggttaa

SEQ ID NO: 33885 - protein, 94 aa, DROSOPHILA
MKYSCVLLLLATVACFLVSLSSGSTTTTSTDATTTTTTASSSDTTTTTTSSSDTTTTTTASPSSSKKEHVIHYKRKVHRPKKVKTIRRKKNRSG

SEQ ID NO: 33886 - DNA, 2497 bp, DROSOPHILA
atttggccaggacttttaatggcgtctgccttttgtgtcaggaaaatcttttagacttggaagtaagcgattttgaatatgcctataaacatgcttatattatattataatatacaatatattttctaggagacaaacctacctgtgatttccctagccctgatggtcacgcaacccgtacccttcttcgaccagtttctggagggcatcgagagtctgaactatcctaaggaaaaacttcacttgctcatctacagcaatgttgcatttcacgacgatgacatcaagtcgtttgtaaacaaacatgccaaagagtatgctactgccaaatttgctctttccactgacgagttggatgaacgccagggcaggcagttggccctgtaagttgtataattaattatttttgaattaattgaaatgggtgtacgaaccactttatttcataccatatcatatcgaagtttgtattgaagaccttttatttgttccattttttccagtgacaaggctcgtctccaccagagtgattatatattctttgtggatgcagatgcgcacatcgacgatggcgaggttctccgggagctgctcaggctgaacaagtaggtcaaggccactgcaatccctttccctcaaataaccataattgatatccttgcaggcaattcgtggctccgattttctccaagcacaaggagctgtggagcaacttctggggcgctctttccgagggaggctactatgccaggtcgcacgattacgtggacattgtaaagcgggaacttatgtaagtgcaagctttatactctgttaactaaagggtagagaaactttctttagtttgggtatacactattttattccattttttaaacgagattttcttcataaaagattcttttttgtcatgtactctgatatatttcagatttattttttatgttttgccaagtgcaacaaatttgaaataataagaatgataatggctttgttgcgatcagtcgaaggcaatggagaaatccgtcttaaaactgcgccgatcgatggagtacatgttgtcggcggtgcattcgtagagtccagcgtccatctgtgtggcagggtcaatttcgatcttcgacttgaccttgtcgtcgccgatgcgccattcgtgtacgtgcatatagaggtgctgatagatctccgctccgtccttgtaccaggtgatatggggtcggggattgcccttggccacgcacaaaaaggcgatcttgtggcccagaacgtactcaagatcgaagtgcgaggcttgtaggattttggcgccctaaaacaggcaatagttaatagggaacttcagcaaatttcaccttcacttacattattattattgtagtactgatcggactccggatcgcgatattttccggtaattggcaatccgatctgcaccctggacttggttcgtccacgtccacgccctcggcgcgcttcgcaaacgggcgtggccagcattaatagccccaaagcgagacagacgatcaggcacttaacctgcatgactctccggataatggataatgctgctgacggagatgatcactgtcgctatattttcctgctgctgctgctgctgctggcgttgctgtgcgaatctcgtttgatcggtgactgatccactcggccagagtctgcaccactctgctcggctcatctaatttgccacaattgtccggcggatttaaaccgtttggtgtgctctcgaaattcgccgccgctcgcggcttttttattctggattcacatttctcatcgccgcatttccacatttcactcaattccctagctagatttgatttggtagcttgctgatatcgctcgccatcgtaggccatggcacccctttccatgtgtcttgctgggattcggtctagtttacagtggcaatggcacgatagtacgctttcagggaaagtagttaaaggaactggattgttgtattcaaatattttcccgaatatgcagataatagtttatacattttggttcgtcaaaacaatttgtagatacaatgagatggatttagattttattactacttagtgctagaagaacatcgatttgtaaacttgttattctattttaaaaaacatgtttgtgtttctttgttccactgtgcctttttgaaggctatagagcactcaacactttagaaccaaaaagcctcggtttgtttggtttgctttcacacattttaataaaataaatgcaaaaaaatcacttgaattgggtaattgagtcaatttgtcggctttgtgcgcacacacacctatgtactttgccactcacagatactcacataaatgcacacgaggaagcagaaaggtcggattgaaatagactttaaatttccataatccgaaacgcaaaaatgtatttttaaatatttttatttaattgtatcgaaagcattgtagtttatagttacatctcagctttactgtgtcaaaggatt

SEQ ID NO: 33887 - DNA, 444 bp, DROSOPHILA
atgctggccacgcccgtttgcgaagcgcgccgagggcgtggacgtggacgaaccaagtccagggtgcagatcggattgccaattaccggaaaatatcgcgatccggagtccgatcagtactacaataataataatggcgccaaaatcctacaagcctcgcacttcgatcttgagtacgttctgggccacaagatcgcctttttgtgcgtggccaagggcaatccccgaccccatatcacctggtacaaggacggagcggagatctatcagcacctctatatgcacgtacacgaatggcgcatcggcgacgacaaggtcaagtcgaagatcgaaattgaccctgccacacagatggacgctggactctacgaatgcaccgccgacaacatgtactccatcgatcggcgcagttttaagacggatttctccattgccttcgactga

SEQ ID NO: 33888 - protein, 147 aa, DROSOPHILA
MLATPVCEARRGRGRGRTKSRVQIGLPITGKYRDPESDQYYNNNNGAKILQASHFDLEYVLGHKIAFLCVAKGNPRPHITWYKDGAEIYQHLYMHVHEWRIGDDKVKSKIEIDPATQMDAGLYECTADNMYSIDRRSFKTDFSIAFD

SEQ ID NO: 33889 - DNA, 4261 bp, DROSOPHILA
catgttggtgatctacatagatttggataatattatatcttctagtggcttcaggcggcagcatcaatcaactggtttagagtcctgcagtcgctcttctcgtaaagggaggcctcatccaggcagatttctgatggctatggccacatttcataaatctgcctttgctcgttcggcattagattagatactttgaatattttacgtgtatttaccatcgccgtttttggttcgagattcggaatttcaaccgttcgtatctttttcaaataccaattcgaatttttccatcggaaagatagcaacagtagaattcaactaatctttgtgctagttaaattataatctggtgcatcgtctaacaagcttacaatatgtggcactaatcttgttaagtgcttaaatctatacgttttctgggtcttttcaaaaccctaacactacgaattaaagatatattgtatccgatttctcttattatattggtaatatgcaaaaagatttaatagagatatttaaaaatatttaaactccgttttctggttatattatttgatgttcttactggtttttggaacttacttgtttggtttgagaatcaagcagttgaaattcttttttgcattggtcattcgccaagaaagtcgatttatatcatagaccaagagacaacatgacaagctcacatgcttaataattaataaaaggattaaattaaacaaaaatatatataaaataaatgtagtactagttctttggtttaagtatctgagctgttaaaattgatttaatctgatcctaattattcactttcaaattcaattggaaacgtatcctataggcaaataaatttttacttttaaaaaaataaatgttattgatctaattttgtaaataagagacatccatttctaatcactttgatgatatctcttgcgcttaaatgtgaatcgttctgactttagcaaaggagttcctaaagcaaactggattctgcattctactgtgtggtactaaaaagataactcaacatcgatggctgcacgtgaaagcttatagttgcctcttcccacttggtacgaatcagacgctgcaacggcgtgttgagcgtcgactcctccttggcgaccacatcgttaccaccgctagcgccactagcagcaccaccaacaccgccgctagcgccacccacaccgccgccggcagcagcacctcctccaccggaaacggtcgttggcgacgttgcgcccccgccatcctcctttccggacatcgaggtactctccggcgtgattggttgccgctccaacatgaccaatgcctgctcgttgtacgtgcgattgtcgatggtcatcagtatctgatgaccggagcagctgtagtagttaacatcgaaacgcgactccgcatggtaattgcgcaacagatccggattcttgttaaagatcacgccaaagtgacccgtgcagctggttatccaaatgggatagttgggcgtcttgagtcgcgagcccggctgacgggactgattaactgcagccttatatttaatatataataaaagatttaatagtaaatgcacatagtaaatatatggatataatatatgtaggagaaatcgaaattgaaattttgaaataaggtttttgaaaaattccaaaattaattccacttacgctagctgactcgatgtcccagagcagaagaccaatcatgcatcgtttaaggacgccgtattgaggaaccgcctgaaagaaccaaagtaaacccactgcagttcaaggaaaatcttcctaaatccactacccacatagctactctcatcgcccacatttacaacaccattatgaatatagggcgtggcacgtcccgtcaacagcagggtgacaatcatcagggatccctcctcgtgattgctcgacgtcaggggcgtggatttggcggagtccagatccgttcgaactctgcaaaaacattcgaaagtattcaccgccgaggggtacaattaaatggaatataaatggttatctggaacagagaatggcatttgcatgcacagacacttgggctcaatcttactttcccatggatcgcgtgaggacggcgctatatagaaacagcagggtgcctggggtctcctcttctgtaaacttttaggcatgttaagtgcaaactgtttgatcaaatggctgggcaagtaagtagttaactttgtgggtcttacgtatttaaaatttcgcttcaaaaagtattccaactcatcgttgggtgacagcgtgaaaacatagagctgcaaatggtaatttgattaggactttataagtttagcatcacatttggcttcgcatattctcaattaaactgttataaaaatggttaccatataaaaagaaagatttcttttgtttgatttaatataagaaacctaattgataaacataataaatctatctaatccgcgaaaatgcttaaaaatcaatatgtcgtctataaattgaatttcaattgggaaattattaaaaagtataaaatccatatgtaatattaaaatttgtaagtaatatctttttactataagtttaattcctttcaatttctgaattaaaatgtgatatttttttaaaatttttatcacgtattgcttttattagatcaataacgctgacttatgcaattgtggcacgtaccttctcggtgacggaatcatgaaaatagcaggcgctgtggtccacgaacacctcgtcctccgacggcagcaccatggtgaccttgcccttgtccgaaatggtgcgcagtatctccaagagggcgcagaacaaggcctccctctgcatatcggcggtggccaggagcgggctgaaataaaaacacacacaaacactctgcaaaaccaagtcgaaaagcggaaacggaaatggaaacgcactcggtaagcgaagccacgcgactggtcttccgggcgaagagcagatacttcaggacgaatccctggacgacggacaagagaccacgtgtggcattccggggcgaacgaagaccgtaggccagctcctccttgggagcaccaaacacaaaggatgtctgtagccattcggctcgcatgggaattgctgccgtaccgaaaaccaaattgcgcagatcctaaacgatggcacaaaatctacaggatcacattgagtccaagtccggataactgctaattaccgtggccaattcagcggttataggcgtgccgccctgcgtgataaactctttgttcattttcgttttctctaattaactgctgatttccgtttccgctagagacctttgctccactctgcgactcgtcggcgaatgatttctcgtcgagcacggttccgggctccaagtcgagcctcagaggtggaggctttggcagacagctcccaggcatttcacacttcagcatggatttttaatttcatatttagccgtgggcgcacggggcgtatgcgcaactaaacagaaccctctcaggtggcagttggttacagtgggatcatttcgttttcatttcattattacttactaaacagaaaatatcagtgctaagtttattcttgcagttcagcgcagcaatagctaaagtattttataaaatgtttttcacaacttagaatgattctaccttttctttttttgtggcccactgtgttgggttttaggcttaggctgagagggtcgtttgctgtctgtcagtcagcgaaagtaactttaaatgaaattgaattgaatttagttctgtgtgcggcacacgaaactcgatgtatgtggcacaataagtgaaagtgttacggcgggacgcgatggagacgaaggcggagaaatgggacataggacatgggcttggccataggtggaggttacattcagcttgaatctggcatgttgcagcctgtcagggcgctccacacaaccggaaatatgtagttgacgcccatttgtgcctattccgaggcaaaggaacacctgtaccccggagcaggttgcgagtgtgtgtgcattactgggtgttaatattccattgatacaccggaaaggcattccaggacccaccgcagtatggctcaggcattttaaatttagacagcactcatgtttcgggcaggctacccccgattgatttgttgaatttttgggagggcctaaatggaagtgaaagtggcccaataactggctgattggctgtctggctggttataaccttgggcaagtcagcgtcaattttattaaagtccca

SEQ ID NO: 33890 - DNA, 1278 bp, DROSOPHILA
atgaacaaagagtttatcacgcagggcggcacgcctataaccgctgaattggccacggatctgcgcaatttggttttcggtacggcagcaattcccatgcgagccgaatggctacagacatcctttgtgtttggtgctcccaaggaggagctggcctacggtcttcgttcgccccggaatgccacacgtggtctcttgtccgtcgtccagggattcgtcctgaagtatctgctcttcgcccggaagaccagtcgcgtggcttcgcttaccgacccgctcctggccaccgccgatatgcagagggaggccttgttctgcgccctcttggagatactgcgcaccatttcggacaagggcaaggtcaccatggtgctgccgtcggaggacgaggtgttcgtggaccacagcgcctgctattttcatgattccgtcaccgagaagtttacagaagaggagaccccaggcaccctgctgtttctatatagcgccgtcctcacgcgatccatgggaaaagttcgaacggatctggactccgccaaatccacgcccctgacgtcgagcaatcacgaggagggatccctgatgattgtcaccctgctgttgacgggacgtgccacgccctatattcataatggtgttgtaaatgtgggcgatgagagtagctatgcggttcctcaatacggcgtccttaaacgatgcatgattggtcttctgctctgggacatcgagtcagctagcgctgcagttaatcagtcccgtcagccgggctcgcgactcaagacgcccaactatcccatttggataaccagctgcacgggtcactttggcgtgatctttaacaagaatccggatctgttgcgcaattaccatgcggagtcgcgtttcgatgttaactactacagctgctccggtcatcagatactgatgaccatcgacaatcgcacgtacaacgagcaggcattggtcatgttggagcggcaaccaatcacgccggagagtacctcgatgtccggaaaggaggatggcgggggcgcaacgtcgccaacgaccgtttccggtggaggaggtgctgctgccggcggcggtgtgggtggcgctagcggcggtgttggtggtgctgctagtggcgctagcggtggtaacgatgtggtcgccaaggaggagtcgacgctcaacacgccgttgcagcgtctgattcgtaccaagtgggaagaggcaactataagctttcacgtgcagccatcgatgttgagttatctttttagtaccacacagtag

SEQ ID NO: 33891 - protein, 425 aa, DROSOPHILA
MNKEFITQGGTPITAELATDLRNLVFGTAAIPMRAEWLQTSFVFGAPKEELAYGLRSPRNATRGLLSVVQGFVLKYLLFARKTSRVASLTDPLLATADMQREALFCALLEILRTISDKGKVTMVLPSEDEVFVDHSACYFHDSVTEKFTEEETPGTLLFLYSAVLTRSMGKVRTDLDSAKSTPLTSSNHEEGSLMIVTLLLTGRATPYIHNGVVNVGDESSYAVPQYGVLKRCMIGLLLWDIESASAAVNQSRQPGSRLKTPNYPIWITSCTGHFGVIFNKNPDLLRNYHAESRFDVNYYSCSGHQILMTIDNRTYNEQALVMLERQPITPESTSMSGKEDGGGATSPTTVSGGGGAAAGGGVGGASGGVGGAASGASGGNDVVAKEESTLNTPLQRLIRTKWEEATISFHVQPSMLSYLFSTTQ

SEQ ID NO: 33892 - DNA, 2345 bp, DROSOPHILA
aatatagatatagaatagttggatagataggtcagtaaagtcaaaaccattaccttttaatcgccagaaatgtgtgttcagtacaaatccgaatgtgtaaatccaaaaatgacactaagcaagtttctcaattctcacaattatgttttggttcaaaaatccgagcacttagcactccgaatgtcgaatttttgggatcgttacgagtttagagtgaaccaaaccgggttttttttttgttttgtttagaatcacgccgtatcgggaatagcgaaccgaacgcatcgaagcttaaaactcaactgattccaagttgcggctaccgttttcttcgagcgccacgcgctcaaaagctttcccaccaaagctttttcacatggaacaaaacttttgttgggctttcttgaccatttcgattaagccaaaaagttgacatctttctggcccgaagttatagcgagctataagccgaaatactatgttttatctttaacaacaatcttaaagttaaatatttacttaagtgttgtgtttttcagactttcaccgacccaatggtatgtggactaaaaaatgtttaattccaaatatacaagtactaagaaataatattactcatccgccacgttaaacatgtgcatatagttctcaaaagccattttgcaaaagtgcaaacttatgacaataatcaagaataactattgaaccataactattagtctactccacatattactaagtaatcctctaagtataagtccatcagttagctttatatcgttttctgcatggtatttatatggaattaatgcttgtttagtttttgaaagcatagtttgtaaaaaacaaaacccaataattaaacaaaaaattttaaatatgtttttatttaaatattgcgaacttaataagagtaaagtaacattaggattaacaaggtgcgtgtgggtcgttcatgtagatcttcagggtctgcggtgttccaaacgagatgtccttcttattcccaactcgatcggttcttcctctttccatcacgtgagtggcggaacttgcggcgtcggttcgacttgtgggtcttcttcttgtagtggacaacggtagccttcttctttggtttcttggtggtgggagtcacggtggtgctgcttccggttgccgaaggcgaagtggtggacgtgtctgtatcagtggtcggaatagtgaccgaaggaatagtgaccgatggaatagtgaccgatgaaacagtgaccgatgaaacagtgaccgtggcgggagaagtcagtgcccaggcagtcgaaacgaaagccgcgatggcaaggaagatagttagctgggatcgcatcttgaacaatgttttagactgctatgactgatgtgcttctttctgggcgaagctggcgtatatatagccaaatcaagaggaagatctcatatatgttttccctaagcaaacagcaaacagtcgttttaaatcgaatcggaatgtgatgttttagtaaatttgggttgcttaaacagagatcaataccacattttcgcaatgtataattaggctatttatacagaggctcacttaattatacgccattcatttatttttaaaatactaatttcttagagaaacggatgtaagttgggtgggtagccaaagtattgaaataaaagatttttttttgtgtcataacttcgtatttattttccgtataactacatagtgaaatactttacgaactgactctcaatggaatgtaaatttaaatcggactggagagccttatacataaggttttgaattgttacgaaccgaacttggaaccaagtgtacgaattgtaaataaagacggcaatttaaattgacacgaaaaaaaaagataatataaaataaaaattggtcttaccacaacgtataaacattttctgttgcacatagtttgtattttattcaaatgttttgctctgatctattaattggtgtaaaataacttgagtggttgggactaactttacaaatgagtctcaaatgcattttaagtaatgtgaagttcgggtataaactaatcaaatcgaggtgtatagatataaaatcaaatcacggctttgcttggcgtacacacatattaaataatattaatatcagttagactcagagacgttctatgagctaaatacaatgctttagttaggcgagtaatttagttaagattttaccactttttcttgagtttccttttgcgtgtttaatatttaagttttgtgttttccaacttgtacaattacgaaacattattttggttttgcaattacaattaataattgaatggcaatctctgttccatctttag

SEQ ID NO: 33893 - DNA, 345 bp, DROSOPHILA
atgcgatcccagctaactatcttccttgccatcgcggctttcgtttcgactgcctgggcactgacttctcccgccacggtcactgtttcatcggtcactgtttcatcggtcactattccatcggtcactattccttcggtcactattccgaccactgatacagacacgtccaccacttcgccttcggcaaccggaagcagcaccaccgtgactcccaccaccaagaaaccaaagaagaaggctaccgttgtccactacaagaagaagacccacaagtcgaaccgacgccgcaagttccgccactcacgtgatggaaagaggaagaaccgatcgagttgggaataa

SEQ ID NO: 33894 - protein, 114 aa, DROSOPHILA
MRSQLTIFLAIAAFVSTAWALTSPATVTVSSVTVSSVTIPSVTIPSVTIPTTDTDTSTTSPSATGSSTTVTPTTKKPKKKATVVHYKKKTHKSNRRRKFRHSRDGKRKNRSSWE

SEQ ID NO: 33895 - DNA, 3543 bp, DROSOPHILA
aaatctggaaatgttcaatttaacctaatttcactgtttttgttttgtgagtttttcaattaaatgttttaacaacattcctttgactttagtttcctaaataaaactatttagctatatccaaattcctgtgaaatctgaaaaatgtcgcatgggaataagcaaaatttcaccaagatctgggatcttggaaagtgggaatcgcgggatataaagcattacagcacaatatcgcgaatccaaaaacaactacgtctcggaaactgggaatatctctgtcagcatccagaggtattgatgcgattcaaattttcaagcctaccgattcagtcaatcgcctttttttgtttcagatacgggccataattcgtgttatccttcatcaggcactcaatggaaaaccgaagccggaaaatctccgaaaatttgttgctgatttgttcaactgcgcacagaatccgctgctagtgcctatggtaaaaaaaatgtctacgcccaaacgaatatatcttaaaatatttatgtttttaaataaccaaatttgcgtagattaacacacagctgaagtacgttaagaacgaattgaaacgtggccgctggagtcagttcgacgccgagatgctcttcatggagagtccatcgacgcactcactcctctcgacggcatccgaggatagcaatgtccatccggtgcttacatatgcgctggtcttcaagaaacccgatgagtgcggcatcgacaagccgccgttctagcaccaaaactaaatttatgtattaaagtccaaagtactacaattaactccttggtttgcgttcattggaatctcgaaaagattggattgtgcaagggcaaaagctaatccaaatatatacatatgctgtttatgcattttttacatctttatttactattggagtctattttatcagtagtgtatcgttagaagaaggcatcacgacgcctgaatcttccttcgcgcacacggatgcgcctcacgacgcggccaccatcctcgtcgccgtcgcgctctctgcggcgccttaatccaccgccaacgcgtcggatgatgatgatcctccggcggcggtgcctgcggcgatgtttcttcttggactcctcagttgtgcttgtggtggtggtggtcgcggcagttgtggtcgtggtagtggccgttgtgtccgatgaggaggaactgctcgttggcgaggtggaggaactgctcgtgggcgaagtggaagagctactcgtcggcgaagtggaagagctactcgtgggcgatgttgaggttgcctgcgaggacaggacaaccagcgtggccaggacggccagggatagcgcaagaataggacgcattgtgacttctcctttgaactgagccttgaattctggttctatcacccaatctaccgacttatttatagttggtccatctgaagcatctggagtaactgccagatcttcgggtgtttgtagaagtcacatgtaacgtagctcgggattttcccacttctggatgctttcgttgttaaagatctggttattgttatgacacaaaagaaagtatttgtatcttttgttctttcaaaagtttggaatacagcttcttaaacacttaaattcagttattaaactattatcttagagatagttcaaaaatttggaatacagcttcttaaacgcttaaattcagttactaaactattatcttagagatagtttacgatgcgatgagatacatatacatttgtatatacattttgtgaggactaatactactactttccggatttcgcttgattattaacttatgagcttgtttaatcaaatttctatagaatattttaatgaatgtcttgaacttaattttgttattgtgttctttaaatatattttctacttatagctcttttcaagtattaaacataagcgctactaagtaaagtaaagcaagactaagtaaacagcgtgtgaatatttaagtaagtgactgacaagcaaacaaaatgaataactgaaattctcgctgaacaaaggaattcaagtcaaagtgtgtatagaaaagaaaacatttctaattaaacagaccaaagaattaatagaatggatgctgtcatttgttaaaatcggattcaaaatctgaaaagtttccattcacctgacgtaaattggtaaagtggagcagagctataaatgcggcttaacatattcgatacccgcacattacctcaaagtctcccaaggaatcaaccacagacaaaatgaagctcgtcgcaatcacattggtcgcatttgtggccatttgcctgtattccgttgattgcaccacatccggtacaggatcagctgctaccagcggatccggctctagttccgccagtggaagtggaagtagcagtggatctggaacaggaactggcacgggaactggcacgggaactggcactggcacctcgactacgttggctcccacgaccaccactaccacaaccaccaccgttgctccagtgaagaaagtccatcggaaaaggcgccacgtcatccggaaaatcgtacggaggcgcgccggcgaacgaaggcgtcgtggataaatagaacgcaaagtttttcgaatttcttttttttttttattattaatttatttattaaggcatacggggaagtcttgaatcccctttgtgtccttcttatctattaattcagcccatttgggctcgccggctaactatagttagctttttcaaatttacagtaatttaactacaattacataacaatcacatataacaaataggatttaagataagcgtcagcttctgcggacccttgtcaaaggagatcgggtaatgagatccctcggttgccttctattgagcctccttggtgggcgagatctgtttaaagcgctggccagccgatttctgtggcgctccagcctgtcatggtatctgctcgagtgcttgtttatttcgtcaaataccgttgcgagtttcaggtctctgtgcagggtggtgtttcgaacaaaccactcgcagccggtgatgagtcttgctaccttattttgaatagcctggatccttttgatgtggctggcgcaggctaagccccagatttggcacccatacttccagtttggtgctaggatctgtttgtaaattgtcagcttgttggatagcgacaatttactgcgcgaagaaagtagccagtagtgcttcgccaccttagcacgtaggcgcgttctgatgtcggtcacatgcttggaaaatgtgagtctgcgatccagaagcactccaaggtactttgctgcgttcggctgtggtacggggacttcctcgatgtagacgggcggtggcgttctccgctttaaagtgaagcagacgttgttggatttactgctattgatgccaatattccatcgtcttgcccattccgagaaccggtatgcaaagtcctggataccatcggcttgcgtcgtgctcgcatcgggacctgtaggtgacgcacacgtcatcggcaaatgtggccaacatagatttcccgta

SEQ ID NO: 33896 - DNA, 435 bp, DROSOPHILA
atgacgtggcgccttttccgatggactttcttcactggagcaacggtggtggttgtggtagtggtggtcgtgggagccaacgtagtcgaggtgccagtgccagttcccgtgccagttcccgtgccagttcctgttccagatccactgctacttccacttccactggcggaactagagccggatccgctggtagcagctgatcctgtaccggatgtggtgcaatcaacggaatacaggcaaatggccacaaatgcgaccaatgtgattgcgacgagcttcattttgtctgtggttgattccttgggagactttgaggagtccaagaagaaacatcgccgcaggcaccgccgccggaggatcatcatcatccgacgcgttggcggtggattaaggcgccgcagagagcgcgacggcgacgaggatggtggccgcgtc

SEQ ID NO: 33897 - protein, 145 aa, DROSOPHILA
MTWRLFRWTFFTGATVVVVVVVVVGANVVEVPVPVPVPVPVPVPVPDPLLLPLPLAELEPDPLVAADPVPDVVQSTEYRQMATNATNVIATSFILSVVDSLGDFEESKKKHRRRHRRRRIIIIRRVGGGLRRRRERDGDEDGGRV

SEQ ID NO: 33898 - DNA, 2630 bp, DROSOPHILA
taccgctcgcagatcctccatacaccaagacgcaaattgaggatttaactaaactctgcgatgcacagcttgaagaattttatgaagaggaagctatggaagaagatagctcttcagaggagagcaacaatctagaccgtttggaacgatttttggaacaagcagctcaaagcaaagagcatacatcagactggggagtttggaaattagacaagcgtaagttttgatttggctttgcatttatgtgatttgaaaattaatcaattatcgctcttactgtaaatgctatttccagataccgattggcccaaatgtgcattgggtgtgctcccttgggctcaataaatacgcagattaatattaaataaagtaattaataaaaactagtactagatccagatttgaatttttatttggcgcgcatttcttgtccatataatcatttaccattcacaccgagcgccaacatcagctgagtctgcgctcatagtgaatggcagtcggcatcactgacgtcaacaattattggcgattttggtttattttgatgtaaataggaataacttcgcgcaattatgtttactttgtggacactgattgaatcttcactcctgtgcctgaatgcggtgtgcattctgcacgaggaacgctttctggccaagtgtaagttctcatacagtatttttgcttccaatgccacgatgttcaattttttggcacactttttagttggctggggacgacaggcgggccagcaggactttggagcacctacggccaaggatcaggtgctaaacctcattcgttccatacgcacagtggccaaaagtgagtaccatattactatgtttctataaacatgattgcttcaccatatcccattctttcagttcccctgatattccttaacataattgcgattatatttaaactattacttggttgacatagaatctaatataataaatgtgtaccataaagcccttttaatggagaagtcttattgcgccacttgaccgcctccggatttcctttgcagcacgcacttgacgcgattttctagggctatgctgtatgcgtccagtttataggccgccgcctccaatttgtcgacggtgtcggaaatctcatcgatttgctgcatcatcggagctaattgctggaacttgaggctcaattcactggtcgaagtattcagattctcggcaatctgccgcatgtccttgtacttggcaatcgtagccttgttcatctcctccagcagcttgtaatcctccagcggagcgttcagttcgtgtgtgatgtactcctccgttttgttgaacattttcgtggccaaacgactgagattggggtcgtgtcgcgtcagtgcctcgaaactggaggcgctggacaacgttggtccgtgttgtggggagtccggaagaaggttggaatcctgagccgcagcagcagcggcgctagttgtgggtttatccatagtctatccaaggaagttgcaacacgattttcttagttttccaaaaacaaagtaataattgcaatcagctgatgcttgcgtttcgatgggaatggaaattaaaagttgattgcttgacattcgcatcgaaactcgtattatatacttagtcaatagaaactcgaatgttaaataccctatattaaacttttaaaacctaacctagaataggcaagattactattcagggaagaccgtttttataatgactctttatcttaaaacaaatatatgtattagttatgacgttatagattataatcgatagagaagcatattgaaatattggggcaagtgctaacatcctatagcttttcatcaatctggaaaacattgtgccccccatgctacaactaataggtatgaaatgccgagcattaacaagttagatctattcacattttgtaccataaatgcaagtacacatcgcttagataaggcataagtatgccaagaacagaacgttaaacatgttgaaatccagtcaagatcgcaagctaaagcaccttttcgatggcggtgattggaatgtatacgctccgaacatcctaaatctcggagtgggtgctccaggaccagatatcctgaccgccaactgtgatagcttccggacggccacagatcattgtctggtgggtacgactcttacgcaataccctccttgtaacgaacattgtgggttctctttgcaggaacgcgaaaagcgggaaaaccagtcgctaattttccaatatggaccaacaagtggaacattcgaggtgcgacgcgagatctccacctatttcaccgaaatgttcaaaagtcccgtcaattggtaaccttatacgttttcgcgatcttaatatatatctaattaatattgtggttttggttttcagtgaggatttgataataaccacaggagcatcccatggccttcacatacttttgtccacaatgttggactttgagggtttcgtattcgtcgatgagtacacctatatgattgctttagatagtataaaacactttagcactgtgaccatagttcccgtaaagctcaacgatgatggcgtggatctgaaggatcttgaagagaaggtatcaaaacgacgatttcaatcgaagaaga

SEQ ID NO: 33899 - DNA, 520 bp, DROSOPHILA
actaagtatataatacgagtttcgatgcgaatgtcaagcaatggataaacccacaactagcgccgctgctgctgcggctcaggattccaaccttcttccggactccccacaacacggaccaacgttgtccagcgcctccagtttcgaggcactgacgcgacacgaccccaatctcagtcgtttggccacgaaaatgttcaacaaaacggaggagtacatcacacacgaactgaacgctccgctggaggattacaagctgctggaggagatgaacaaggctacgattgccaagtacaaggacatgcggcagattgccgagaatctgaatacttcgaccagtgaattgagcctcaagttccagcaattagctccgatgatgcagcaaatcgatgagatttccgacaccgtcgacaaattggaggcggcggcctataaactggacgcatacagcatagccctagaaaatcgcgtcaagtgcgtgctgcaaaggaaatccggaggcggtcaagtggcgcaataa

SEQ ID NO: 33900 - protein, 159 aa, DROSOPHILA
MDKPTTSAAAAAAQDSNLLPDSPQHGPTLSSASSFEALTRHDPNLSRLATKMFNKTEEYITHELNAPLEDYKLLEEMNKATIAKYKDMRQIAENLNTSTSELSLKFQQLAPMMQQIDEISDTVDKLEAAAYKLDAYSIALENRVKCVLQRKSGGGQVAQ

SEQ ID NO: 33901 - DNA, 2189 bp, DROSOPHILA
ccaaaatcgccactaaaccagactaagctcttcgtgggctaggaattgattacgtccaagtggaataaaagtaaatttttaggccaactgcggcaagggggatgcattaaaatgggaattactacctgaattccgcaagcgcataaaaaatggaaagccgaaaacaaagcggcatttgcttgcagtcgtgtttatctagcaaatcatggacaaaaaggcagccccacgttgggcgccataaaaaagaaaaatcagcaaacaaaaaaataggggaccatcgatagctgcaggatgcaacagcacgcgctgcgggaatgatggaggggccagggggactcagcagaccactcgctaaatatcaataacatttttatttattttgtttgcgggcatttgggcatttttgagtgcatttatttgaacgtcctcaaaccgaacgttttgtaaaacgttttgtctgatctccccccttggttacgcctccttttccactatttggcccccttctctggcgttacgatccagtgcacgccgagatttttgttggcttctctcgtttgactcccgtttttcttcgagcgttgtgcacttaaaataatggctatataaagaacataatttcacttaagtactattcttattagggaacaggcctagatttgttatcattttgattatgaatacacaattttggtaaaattgtattttctacattatattaagtaaaagaaatgaagtggatattcctttttaataagccaaagaatcgcatactcttttcttgccgtgcgtagtttccagtagccatggctcgtggtgcaatcggcaaactggcaacgtgcaacttgcaacttgcgagttgcagctgcagcatggactgcacttgtcgatgcctcctccttggcctgcctcctgccgccaacgccccctgtttgccgccccgtcttcgcccattctgggccaacaataaataataaaccttttgtggattttggtcttgatggcggcggtggtgctggtggtgctgttactgttgttggtggtgctggctaccgatcagaggcctggcacgaagatcaaagccccgaaccgccattgttccaaagaggcattgctgatggtggagcgggaatcgcaggaggtggagtaccttaaggagccgagggcacttggaaagtccagcgcttagacaagtgctaagtgcgaggcatttttatgaaattttaattaaaagcggccagcgaaaacagaaagggaaaatcgagcggaagcaactactggcaatatcagttaaaatcggtcacaagtaggcataaaaatctctccacaaaaaccggtggcaatcttggtcagttttcggtttcacttaaaaaaacacaaaaagtataaaaaaaaaggtaaggtaaaaggtaaagtacaagaaaaacacacaagacgatgtcggcatcgtaaaattcttaaaacataagtattttatggcccagcaacaacagtcgcagtcgcagggggtcaactaaaaagcggcgaagaaatatactaactacaagttgacaaatttgaggcccaaaagaggtcgagccccatcatgcggcaggggaggcgcccaaaaggaaaaccaacctcataaacgactgcgatttaatttaacgattcccatacgccaaccggggttggggccaaaatgggcagttaactggaaaacccacagagagcgggaatgatgtaccgccagacagaagccacccacataaagcagcggattctgaacaataccgaaaccattgtctctcgcatcaggcgctgaaattcacttgaaaaaagctcgtaaatgccgaaaaaaccgaacagaattggaaattccattgcaatgagtagccgaataaataatgctcttacagctaggaatggactgaattttgtagagagattttgatagggatttaattggtaagcatattcggtttttagtttgcgtagcttaaaatgcaagtatatttataggcaagatattataaaaacattacgtagtttcaaaggtagtatgcttgtataaatctatcagccttttttgaggaatctttctcctccccttgacgtttttccaacaggttgattttccatcagcattgtaaacatttcaaaagtcagcatttcgagagcaagcagagcccacccacccgaaatctaag

SEQ ID NO: 33902 - DNA, 189 bp, DROSOPHILA
atggcggcggtggtgctggtggtgctgttactgttgttggtggtgctggctaccgatcagaggcctggcacgaagatcaaagccccgaaccgccattgttccaaagaggcattgctgatggtggagcgggaatcgcaggaggtggagtaccttaaggagccgagggcacttggaaagtccagcgcttag

SEQ ID NO: 33903 - protein, 62 aa, DROSOPHILA
MAAVVLVVLLLLLVVLATDQRPGTKIKAPNRHCSKEALLMVERESQEVEYLKEPRALGKSSA

SEQ ID NO: 33904 - DNA, 2815 bp, DROSOPHILA
gccgcatcgtgcagcggccgttgcaattgttcttcccccagcaaatggatggcgtgaggcaggcacacaggcgcagcagcaacaccgccgcaacaccgcagcaacaccaccgacaccgcagcaacactagccgcaccagcaacaccttcactctctttggcagcgatatcgcgatgatgtatggccatggctgccccggacaacccccccccccattcaaggcccccccccccctttcgatggagtggggacttgctcggattgtaggcgtcaactcacgtttatgctttgtagacattatcgcgcctgtttatctttaaattgcaagtaaattactttcggctcgcacagtggatgataaattgtctgggccgcgttgaaggctctgacggatgcaatgaatcccaaatggttggcgctggagggggatgtgttgcggggggaaaatgggaaagtatcagtagctaggccaattattcgctggatgaattcacagattctcacccgtttatccgaacatttcgtgagcaattttaacgcttaataaattcaaaatcatattagaaaatctcgcaagggggtgactaaccactaacaaccagccggtgggttgcgtttaagtcataatagaaaggtgagaagttggtgggcgaaaaccttttgctggctacttaataaatattcattacgccaaattgccaggaacgctaaaattatttatgtgcattcgttttaaccgattaaatacctaagattcctttaaaatcagtcaaatcagaaaggaggtgcataaaaattaaaacgactttagtcaaaataaatctgtattaacaattgacttaaatatttatttttacaaaaatcctgagcttatctgttcaacttgtctcacccgtttaatcgagttatttttcgttagcttaactattgacctaataaattatgagccatgagggagctagtcagaggttttatggacaatggatgtttttggaatctctcaataatgggtctcggtgatcctgacctttccgtactttccgtgcagggcgtgcttggcgaaggacaggaggttcgagtggctgtggacatcgaagtgggccggggtactgtgatgcaccacggcggcgtgggtgtcatggtgatgatggtgcaccaccggagcggagtgcaggcgagcgtagtggtagtgaagtggctcatggtggtacactgtggttggcagcgactcaaccaggtggtgatccaaatgatgatccaaatgatggttcagatggtgatcatcgtgcaccaaagcggcactgtgtcccagatggatgccatccgaatgatggatctcagcgtccagcagatgaggcagttcctcatggtggtaaccatgatggctatccacatggggcagaagacctggggcagcctgggccacagccagcacagccaagatgcacacgaagaactggattacaccaattaatatttttagtatttaaaaaaaatttttttttaaattccttcctcctttaccttcattctgagagattccttgcttaagttgaggggttatccaattgctaagcttacgctttgtctgctgaactgttgtcgattgactgtgccttcagcgaatggaactcaatcattttataggaggctcggcccaaagaaaattcaaacgaaatcgaaaattgtggataaggacgtgatttgaattaatgtcaattcgaatgaataagcggtcttccctcattatgtaaaggggagtgcgccggggccactgtcaacaaaccccaagtaggtgcccaccgatcgtgtcataattttatggcccacagccccagtgcaatggttaatgagtactcccaccactgagtactggccatttggcaatccgcgtagtgaaagccccgctgagtgaccaacattttgccgggcttcaatcaactgggacgtgagcagtccaaatatttggcaaacatctcaaatctcgaatagaggtgcgaaaatgtgatcgacgcaagtcgcacaactcgaaaatcaaagtttcaaaatagcgatgtgtgggtgctggtggcgattgcaaatagaagaggtgccagaaatacctggaaccgcattgttggagaatcaacaggcgcgttgaggtgggcgatgcgtaaagaatcaattggatgctaattgaatagatcactcccacaagatgccaattagagatctcctaacctagagactgactggtgtgaacttgcaaagtaaataaacgtagcaaactgaactcattaaaatcggttggggagtttattatggacattattcatagggcattcattgaaaatgacaaattgagcacttagggaatgatgataggcatataagggcatataagcttttaagggagacgaacgttgataattttcaaagatttattctattaatttattttgctgtattaattaataatacgaattttttagtcaccagagaacttacatttgtaaatattcactaacactcactagcttaagaattcttttaattaagtctacaatcaaattcaaataaacatgaacagcgaacataaaatcacaattaaatttcaattatcttgatttaccagtatgcagcttgtaataaaaacatgtaagtataacattttattaatccgttcataaatcgctgatttctttatgagcatgaacaaatgcgagtcatacatttgtagacacttatagattgagtgagtattgccaaacattcacccgctggaataattcacttttattcacatttagtatatggatttgccaatcggccggcg

SEQ ID NO: 33905 - DNA, 468 bp, DROSOPHILA
atgacacgatcgttcttcgtgtgcatcttggctgtgctggctgtggcccaggctgccccaggtcttctgccccatgtggatagccatcatggttaccaccatgaggaactgcctcatctgctggacgctgagatccatcattcggatggcatccatctgggacacagtgccgctttggtgcacgatgatcaccatctgaaccatcatttggatcatcatttggatcaccacctggttgagtcgctgccaaccacagtgtaccaccatgagccacttcactaccactacgctcgcctgcactccgctccggtggtgcaccatcatcaccatgacacccacgccgccgtggtgcatcacagtaccccggcccacttcgatgtccacagccactcgaacctcctgtccttcgccaagcacgccctgcacggaaagtacggaaaggtcaggatcaccgagacccattattga

SEQ ID NO: 33906 - protein, 155 aa, DROSOPHILA
MTRSFFVCILAVLAVAQAAPGLLPHVDSHHGYHHEELPHLLDAEIHHSDGIHLGHSAALVHDDHHLNHHLDHHLDHHLVESLPTTVYHHEPLHYHYARLHSAPVVHHHHHDTHAAVVHHSTPAHFDVHSHSNLLSFAKHALHGKYGKVRITETHY

SEQ ID NO: 33907 - DNA, 2291 bp, DROSOPHILA
gtaaggagttaatcccaaccaggactgatttcccagctaccgctctaacgggactccagcgccatcaatctccgctgacaattcgccgtctttgttgctatgttaatgctaattcctcgagagaaaccgggaacagaatggagttggaattggccagaggagcgacaaagttgccaatgatttagtggaatttttatggcaaatttatttgcgcgcaggagaaagatattttaattgattttcttttcgagcggagaagccaaagtgtgggaagacagcaaagacagcagccagccagaaggaggagcagttgaagaaagtaagccgagagccgagccgccaaatgatatattgatttgtggcaatgttattaaatgctcgtaggcccccgtaataaagtggctatagaggggcattcgctgcagaagtagcctgcctgctgccacatcaatttctggtttcgatgctgccccattcttgaggcataattaatgcgaaaaccaacgcacttgatgcgtaaggaaggccgaaccgatcgcgacccaacccaaggcgaggagttccagttgcacttgctcctccgaatcgaatcgcacaagtgggagctgcagcccgcggtggggcatacacacacacacacacacacacagatacccgagcaaggatcgctgggtgcaacggcaactggaaacggctccccacgcaacgcggcggcaaacgcagacgcagacctcaaggcaggctacaatgcactgagacaaaatagggggaaatattacttgatactaaacttaataccagagaatgcgcagtgcagaattttgtttaaatacaacttgcttatcatgtctaaccattggtaataaatttttcttagtgctcatcttcccgccaactgcaaattccggaatttttaataattgcacttgttgcgccccaaaaaagagacaaaaagatatggacccagaagcctcgcggacgagtaaaagagaacgcacgaatgcagagtgagaaggaaaatgaagccggctcttggaagtccaaggcgacgatgaagacgacaactgcagcagcagcagcagcagcaccaccaccacagcaacatcgcagcaaccacgacagcggcaagatgacgaggcaaggctgcaggtgcaaccggcgttggaagtcccaggaaccgctgcgtctgcgtggtcattctccagtggaagaacaccccctgctcgcgaaaagaatgccccgccgcagtcggcgatcctccgcctcatttgacttctcgttggtgagataaattatgtcgctaatgcaaagtgctccgctttgtgtggtgcggggaggagttgcagatacatacatacgtacgtatgtatatgaggagggtttcgaggggccggaaaggtaagacgcactgcctcgtcgggctttatctaccactgtagtttcctctgcatcttggcgacgcggcagactctgggagtaggcgtattccatattagcggtacaacttgcagaagttgcagctgaagatcggcgtggcaatgcaaagcggcgaggaaagacagtgagattcgtataaaagaaatacgaaaatccgttgataaagtgacatcgttaggctggcgctgtctcctcggctaattactccagacttcagtctgaggcgtgggaaaacattagagcgaagatggacgcaggttctatctggaggagattggggtttcttcaacgcacagctctcgaacaagttgataagtattaagtattaagtattaaatattaataagtatttgcttgaagtatccaactaacatggaaaatatgaaattgggtgtttaggaacaaaattaaattatcttttgagctaacaaaagcaaaagtaaaaagatacaaaaatatacattggcaagctctttaagcaagtctcttcgatgtgagactaaatatttgaaatgatatgcatgctatgtctatatctacctattctaatagttaaattttaattgtttctgtcaaatatactctattatagattcgtacactggcgagcgcgtacatgaaataaatgatatatctcgcagacctataaattccccttgggcataatcaaaatcttttttatgtctcgccattgccgccttcaattcttggcaacaggctgagaacaacaaccacatccctcaaatccccggcccttatatcccttaacgaaaagtttaggtgaacagagattaatatgtccaattactgtgacaaaaccgcaaaatgttgtctgcattccctccgatttttgc

SEQ ID NO: 33908 - DNA, 291 bp, DROSOPHILA
atgcagagtgagaaggaaaatgaagccggctcttggaagtccaaggcgacgatgaagacgacaactgcagcagcagcagcagcagcaccaccaccacagcaacatcgcagcaaccacgacagcggcaagatgacgaggcaaggctgcaggtgcaaccggcgttggaagtcccaggaaccgctgcgtctgcgtggtcattctccagtggaagaacaccccctgctcgcgaaaagaatgccccgccgcagtcggcgatcctccgcctcatttgacttctcgttggtgagataa

SEQ ID NO: 33909 - protein, 96 aa, DROSOPHILA
MQSEKENEAGSWKSKATMKTTTAAAAAAAPPPQQHRSNHDSGKMTRQGCRCNRRWKSQEPLRLRGHSPVEEHPLLAKRMPRRSRRSSASFDFSLVR

SEQ ID NO: 33910 - DNA, 2564 bp, DROSOPHILA
aactaaaataaacacaaatatttacatgcttatataaaaagactgggcgttaattatttaataaatatttatgtggatggctgtctgtaaaaaggcagttaatataataggcaaagtaaaaagtggtatctactgcatttcaggcattaattatgggtaaaacttccaagaattaattcaattgtaatataatttaatattacttcaagggaaatatatgaagctttaaatgtacttcatatttgttaataatacttctacacacgttggtaataataaatttaagaaccttgtaccgattttaaacgccttcaagcgcactaaattttatgcgttaaagtagcttcctggtaacaaatttaatttgtgttctagacaaaggcgtacacagagaattgttattatagtaaagctgtattgcagttttttttagaatttttccacgttataggcagcaatttaaatgcgagactccacggatttccccgtataaattcgagcaatttaacttcgcgcttcccgtaaaaaaaaacattgaatatttacgtaagcacctcttcgctaattattcactaaatatttatggcatccacgtagctaactgctattttattcactactctaatgtaagtaatcagtaatataaatataaacagccagacttaatgtaacaataaacaacgtattgtttgcctcggttttttccattctatctgtaatttttcgctataattataatgacaattataacaagtaggtgcttaaatgtaattacgaagctgaatttagatgtctttgtcttaatttgatagttattgcatattcaaaatgcattagaaatgcctaatttaaaaacaaaatgcaaatgaagttgcttttagaaagttaataaaattacctttatgtttttacatctgcaaagatcctctaacttctagtaacatctctattttaagcttagtaaaactaggtttcatctaattattccatatatgtttagtcatttagctacgtagttctcctcctccgactttccgaagtaatcgtcggatttgtagatctccacaggctgatattcctcctcgacgagattggatcgtggcagggagctgagtgtgctggtatcgctggcacttaacttggccttcagcggcttcaggagaagtcccttgaggctgtagtctgtgacatgcagctcctcctcggctatatccacagatctttccacttccgacaaattggcactaactacacccacacattgctccagaccatcgattctggccttcagttgctcgaaactgtctgtgaaacctagtatagagcagacgttgttggccatcatgccattggattccgcacgcacctaaaagtcaataaactattagtgaaaacactaactttaaagaaaacaactaaccgaagccaacaaagtctcaaattcatccaatctggccagcatatcctcgatattcgtgcacagtggatttatctccttctccaggtcggcgctctgcagtatctttgcatagtcccgtgatacattctcaatattcgattgcatatttcaggcgttggtttaattagctgaatatttgtaaatacaagcaacaattgttttcactttcgaccagtgtgaccataattgaggagggtaaaactcctatcagctaaagtgtgaccccaaagcatttgcccgctgtcccgctgctgctcattctggtcatactgttttctattgattttggaaattgttagcttgcagcatttgcttggatttgtagcacaatgagtggatatcgaggcattggcggtgggggcttcccctaccgcaagccagcaagttccggcaacaacatgaacgccgtaccgccgcccccgatgctgaatgcccgtggctattctggttcccgcggaggatttggaggagcaagccgtggcggtgtcaccgggagcactacatcaacgtccaagcacggctactccaccttggactccatcagccagtacaccaatgccaccaatctggttggcaaaaggaagcaccacacggacgatgactatttcgatgatgacgatgagccccgggaaaaggagatagaacaagcctatataccggcaccaggatccccgggagctccgccaacgtcggccaaaaagcaagaggattccgattcggatgaggatcccctcgagcagttcatggcgggcatcaaccagcaggtggagaaggagaagcgtcaacaagcacctaagccgccaactcaggcggtgagaggtgacatcgatgacgaggacgatgaggagagctactatcgctacatgaaggagaatcccaatgctggacttcgcgacgagggatccgatcaggaaatcgaatacgatgaggatggcaatcccatagccccaccgaagaaaaaggacattgatcctctgccgcccatctaccattccgaaatcgagtacgaacccttcgagaagaacttctacacgcagcatgacgacatagccgccctggatgatgagcaagtccgggaattaaggcgcacacttggcgtaaaggt

SEQ ID NO: 33911 - DNA, 510 bp, DROSOPHILA
atgcaatcgaatattgagaatgtatcacgggactatgcaaagatactgcagagcgccgacctggagaaggagataaatccactgtgcacgaatatcgaggatatgctggccagattggatgaatttgagactttgttggcttcggtgcgtgcggaatccaatggcatgatggccaacaacgtctgctctatactaggtttcacagacagtttcgagcaactgaaggccagaatcgatggtctggagcaatgtgtgggtgtagttagtgccaatttgtcggaagtggaaagatctgtggatatagccgaggaggagctgcatgtcacagactacagcctcaagggacttctcctgaagccgctgaaggccaagttaagtgccagcgataccagcacactcagctccctgccacgatccaatctcgtcgaggaggaatatcagcctgtggagatctacaaatccgacgattacttcggaaagtcggaggaggagaactacgtagctaaatga

SEQ ID NO: 33912 - protein, 169 aa, DROSOPHILA
MQSNIENVSRDYAKILQSADLEKEINPLCTNIEDMLARLDEFETLLASVRAESNGMMANNVCSILGFTDSFEQLKARIDGLEQCVGVVSANLSEVERSVDIAEEELHVTDYSLKGLLLKPLKAKLSASDTSTLSSLPRSNLVEEEYQPVEIYKSDDYFGKSEEENYVAK

SEQ ID NO: 33913 - DNA, 3010 bp, DROSOPHILA
aaatatgtttaatcattgtttttataattcttccccaaatgccgaaaaattgcgcaattcccacaatggaaaatgcccaaatggatggctatccatgggtgggtgagaaatattcacttcctctttttgataaatcaatacagaaaatacagaaaatcaaacctatcatatcggctatgcctgccaaagcaacaaattgctcacttctttcgggtgtgtatataaagttccttctttgtattcattgtgtaaatgttcgaggaaaccgaaaagagacccagtctcagtctgtcctttatccttttcttcgacactccatttttcccgcgctctatatccagcgaaggaaaaaaaaaaataaaaataagaaaagaaaagctgaaaatgttttgcccactctacggctggccctaatcaagtaacccgaacacgttctttgttagatttatatggaaaatatatttttatacatgcaacccaatgaatcccgacccgaaaagcaaccaaatcaccccgcccttccagtttcacccacccgctgtgtggaaactggctccttgggggtggctagacttttccggctagtcaaaagtgatattttacatattttccgacagtttttcctttattttcccacttccatgtcctttcttggctgctccttttttttccttagccgagctttgcttgcattttattacttaacgcttaagtgtgcttcttaggaaggaaaaaggcacgcagaatggtgggtatttctttcttttttttttttgcgcagacttttctgttctaaattgaaaagttgtaaaaggatttcttgggttgctccttttttccgtgctctagagtttggcaaattagatacttctcttttttttgggaaatgatcaaacagaaaagttttatttaacaaatatggtggtgtggggcataacagagaaatggatgtgagatgtggtgggtggaatgaagacaataaaatcacgggttatcacaattaccagctgccaccgccctgggaagcccaacctccgctggatgagccacctgcggaccaaccgccgttggaagctccgccggaggaccagccaccactggaaggggcaccgtaggaaccactgggaggaccgtacgaggaactgggaggaccgtacgaggaactgggtgcagcgtaggatgaaccaccagacgaccaaccaccggagtctccagctccagaattcgattccgagatgattttgatgatcttcacagcttcagcaccacctccacctccagaggaccagccaccgctggaagcaccacccgatgaccaaccgccaccagatgcaccaccatatcctccagacgaacctccatagccgccaccaccgtggccgccagacgaagcctgctgcgagatgatcttgatgattttgatttcctggccgccgccaccgccgccatgtccgccaccaccgccagccgtccagccgctgccgccgcctcctccggattgccagcctccagagccaccagctggagcagtttcgtggatcactttgatgactttgacaggcggggaaccgccaccaccgccatggtgatctgagccaccgccaccgccgccgccgtagctgtagccaccatctccgccgccgccgtgggaggatccaccaccaccgtagccaccaccaccaccacctcctcctccaatgaatcctgcttgagccaccgcggccagagccagcaaagagatgaatactttcatgttgacctgatggagatgagctaatgcgtcgaactgatgtctctaccaggtcgcgtttacacttttatagagcgcaccaccgcgattcgaggcaatacggccttgtccggaagcaccacgcaagtggtgcagtgcacttcgaacacccccgggcgagttaaaagcattaacacaggctcgagtggctgaggcgaaagcatcggtggtttgatgtcgatgacgaaagactctcccctagccaccgttgaaggcaacatttgctgatcgaatcaatttggaaatggctttaaaaaaacacgcttccttgggcagcaacatattattaaattatattagaccaatttatacgttgctttaccaaattgtcgaatcgagagaggcaaggtattcatttaaacatacatatgcgaataaagtttgagtataacttttcatttcctcaaataaatgtcattttggattagccagatattttaatataaatgttttactggcaaaaatataagtaagtgccttcgaattagtttatatttgcaaactacataccgagtagagtatcttatcagcgactattattcaaatttgttatactttctcgtgatttgttagcattatgtaatcaaaaacacagtcaaaaagaaaaacaaataagcgagcaggcagcgaacattatttttggcgctttgagcgcacttgaatgaagtttttccccccgatcgcaaccacagctgccccactgccacactcgtcccccccttccgacgatcgaaacgcagccgtgattaatgagtgcggagttcaaaacgcaggtgatggagcccaggtgagaggaccagacgacagccaggcgagtttcgtgcgctttcaactgtccctgacatcgatctgcgggctaccactttgcggtgttacgcatgcgattcagatgggtcaactctgccaagtgcacagaaagaaacaatacaaacttgtagtaaaatgtgggaaatttatcaattatggacatttgcaagaatgtaaagattgcatacttatgcaactatatacactcaggaacctttgtgatttccttatttagtagagaccttttattttgttaagtacacaggaatagaaatatatgtattgttgagttttcttcaagtgcatcgtctcctgtttcacttcttgatttcgaactccatcccagacgaccccgccgttcattcatccgttccagcacctttgcaacgatccatctccattcatcgatcatct

SEQ ID NO: 33914 - DNA, 885 bp, DROSOPHILA
atgttgccttcaacggtggctaggggagagtctttcgtcatcgacatcaaaccaccgatgctttcgcctcagccactcgagcctgtgttaatgcttttaactcgcccgggggtgttcgaagtgcactgcaccacttgcgtggtgcttccggacaaggccgtattgcctcgaatcgcggtggtcaacatgaaagtattcatctctttgctggctctggccgcggtggctcaagcaggattcattggaggaggaggtggtggtggtggtggctacggtggtggtggatcctcccacggcggcggcggagatggtggctacagctacggcggcggcgtcatcaaagtgatccacgaaactgctccagctggtggctctggaggctggcaatccggaggaggcggcggcagcggctggacggctggcggtggtggcggacatggcggcggtggcggcggccaggaaatcaaaatcatcaagatcatctcgcagcaggcttcgtctggcggccacggtggtggcggctatggaggttcgtctggaggatatggtggtgcatctggtggcggttggtcatcgggtggtgcttccagcggtggctggtcctctggaggtggaggtggtgctgaagctgtgaagatcatcaaaatcatctcggaatcgaattctggagctggagactccggtggttggtcgtctggtggttcatcctacgctgcacccagttcctcgtacggtcctcccagttcctcgtacggtcctcccagtggttcctacggtgccccttccagtggtggctggtcctccggcggagcttccaacggcggttggtccgcaggtggctcatccagcggaggttgggcttcccagggcggtggcagctggtaa

SEQ ID NO: 33915 - protein, 294 aa, DROSOPHILA
MLPSTVARGESFVIDIKPPMLSPQPLEPVLMLLTRPGVFEVHCTTCVVLPDKAVLPRIAVVNMKVFISLLALAAVAQAGFIGGGGGGGGGYGGGGSSHGGGGDGGYSYGGGVIKVIHETAPAGGSGGWQSGGGGGSGWTAGGGGGHGGGGGGQEIKIIKIISQQASSGGHGGGGYGGSSGGYGGASGGGWSSGGASSGGWSSGGGGGAEAVKIIKIISESNSGAGDSGGWSSGGSSYAAPSSSYGPPSSSYGPPSGSYGAPSSGGWSSGGASNGGWSAGGSSSGGWASQGGGSW

SEQ ID NO: 33916 - DNA, 2192 bp, DROSOPHILA
cgagcatggttggttgggcaatgcgccgaggtaagtaataaacttattggccccatgcctgtccattgattgtccgtttgtaatacacaatatgccaggatgtgccacatggggcggcaaatatcagggatggcccagcgtattggctactcatttatggaataatctagttaaagtgctttcacttcgacttattgcattgcattatattattagaaactagtttgtaagttagcgaaaattagtttaatctcattccttgaaaaaaatagtttctttgttgaattaaactaaactgtatttttgacttatcagttcttaaacgttagaagttcaggattcttataataagtaatgaataattacaaacacttatattaagattaatatattcttttaaggtttcaaactttttagcagtgtttttcaatagattgcgaaataaccaacataatttacatttccatcgaaggcacacatttagttttgaaattttcgtaacccttagatttcgcagagctttctactccgaaatttacttttggcttaagccaattgtgcttgatatgaacccattaaacccgaaacctaacttaccattccattaaaactttgctcaatttgaccatctctagcagtcggattggcgtaagggaattactgaaagtgggaggcatacgagccattctgtttgagccgcccactcaaatgtggccatatcatgacgagctggcagtgccagcggacgtttcatcgttaaatgtggaactgttaaacagataatgaccaaccacaccacaccggtggatggcccacaaaggcccagcaccacccattctgagcaccaagctcaaaccccaaaccccccaacccactgaactgaccgaccgcagaacagcaaggactttcgtggggcgtagctcagtgggtggctggtgtggcatgtggacgtgagctgaccaggaggcttttgttatgctccccggctttcataactgtatcaatggcgttgacgatgacgatgatgctcctgctcctgctgctgctccgtctctgctcctgctgctgctccagctgctgctcttcctgccaacgacgataaagcaatgatgttgatgatgatgatgatgatgatgctgatgatgctgatgatgctgatgatgctggtgctggtgttgttattattcaccatttgttgttgtcctgcggaaaccagacaactgtcgtgctgaaattctgatgcattgaaatataattattgggaaatgtgcgattgtcgttggatttccgtttacgtgctcgccatttcggtttggtgctgtccgattatgcatgcatacggatgctgggagtatgggaacaagtgtaggacatgattgtttgtccttgtagatagacgagcacagcagggtccgcaataatgggttgcggaatattggaatttcgattaatgcatgtaaatgggggcttactagtaacaataattgggcatttctgctctcagccaaaactatattaaagaataatacacttctctagcacgactttatatagacgcaatattaacatagtgagtgcaagtaaacccacataatttaaaaatatatatatataaatttctgatatgtaacttgtttgatggcaaaaatgcggtcttcgctgttttgcttacatatttgtatcgatttgggccaaaggacttgatgcacacccacctgacattacgcttatcacacacacacacacacacacacgcacaccccgccaacccacaatcataatttatgcaagcgcaatgacataacagttgccggattatagccatgcattctgcacttgtacgctgatgtatagttgcgaacttccgtatgcacattcaattaccatattaaccgaaacgactaattaactaaagttgtgtatgactcgaaagcctgaattgaagcctcaaataaatgtcttttaaaggggattttaagtcagaaaatgttaacttgcggtgcggattacgctttcatttataagctgcatttatgttcacttttaacattgctcgtttgaacttattgatttcaccactcaactttggcggtaaaatcaattggtgttcaacaatgtattttatggtttgagtctgcgataaaagtcaccaccgcctttgaactgcgcaaaaatcgtttgtgtaaattatt

SEQ ID NO: 33917 - DNA, 192 bp, DROSOPHILA
atggtgaataataacaacaccagcaccagcatcatcagcatcatcagcatcatcagcatcatcatcatcatcatcatcaacatcattgctttatcgtcgttggcaggaagagcagcagctggagcagcagcaggagcagagacggagcagcagcaggagcaggagcatcatcgtcatcgtcaacgccattga

SEQ ID NO: 33918 - protein, 63 aa, DROSOPHILA
MVNNNNTSTSIISIISIISIIIIIIINIIALSSLAGRAAAGAAAGAETEQQQEQEHHRHRQRH

SEQ ID NO: 33919 - DNA, 2713 bp, DROSOPHILA
gaggtcacttgcttatacttggtattcagatactttaggagattatattcctacgtccttttggagggtgataattatgatacgactactaaaggtgaatagcttaagcacagatttatacgatatactatacataaatttcagatagaaaaacagaagattacagagataatgagactcaaacccaatctccaagttcaaaatacaggacttctggaagatcttctaaaggataaaatgccagtttggacaaaaacagcaaaaagcttgattaataatgatcatttatgttcgtttcattatgttcaatgtccacacacggttcaaaatccctttggagttactaaaataaattaaaaatggttttcttcatgtgttatttggatttctatttacgggaaatcaattcccgaccccccataagcaatgataataattgacttatacagttttccatctattttccgatgcctgcgaggacgataggtggtcacgttgccatcgagggaccaggaaaaaggacaattcaatctccaggacctgctgacaaaacaaatgccataaatgaggaacgaagttcgccagcaaaaagcagttcacattggtttagaatgttttgggaatacacttggcagctatttttagagctcagtatttgaatgaagagattataaatgcatgtaatttagatgtataaattaaaacggaaattacaaaaaaattcatgaaactaaatataattcgcaggaacattgaacttggcatatattgaaaacttctgtagtgtattgtacttttggccactgagtctccctacattcccacgcttgaataccactgtgctgtgtccatgaatgttggcaatcaaacggctttgattaacaggccgccaagacccgagtaacccccttctccaatcgccaagtacgtgcttatcatcattatagctttgatttagtagacaacattgccagtgatgtgatgaatcttagcctgggcgatggggtcaaattctgatggatatttagtgccctgtgcctattgcatcgccttgctggacttcatatccgccctgctattcgcaattatctcaggagtggtatttgccaggcatgtaagacaattaggccacagtcctttcagggaaattgtggctcaattttggtatttgcagggtcattggaccgccttggttgcactgatcttcaccattttctggatggttataatcatagttttgatggcgggtatctataggcgaaaactgggactggtacgattctggttggtgttcacctgcttgggaatacttctagatggatttatactgctctacggcctgaccttggccatatctgtgaactgggaaggtgtcaaaatcacagtgctgcccttcgtaggactgggtaggtctaaataataattagcgtatttaatttactgaatatataattgaatttccttttagccgtggaaatgacttttgtctatatcatatacctactttatctggatatgattgattacagtgcaacagaaacgcctcccgatgagaagtatagagaaaggagtggctgtgatgtgaaatacgctgaggaagaggaaaagccactggatcgcaaggatctgaaacggatggaaaaacaagccaaggagcgtatgaaaaaagataaagccgttctcaaaaaacttcagaaacaaatgcgaaagtgaaggtattaagtgtttaaagtattgatttttatatttttaaaataaacatgaaattgaatgcattgatttgaacttttctttttgtctgagacaagctctttaacttttatcacacgcaggatgcggaccactcacacctacacaagccactcacacacacacacacaagaacgccaatgttaaacacaaaatccttttaaaataatttgctcagcagtgagtaaagaaaaaatctagagatacaaatgcagctaaacgaattcgaagagttgcatgccctgtagataaataatatatttttaatatttttacaaacttgtcttttaatattttagctataaaataaatatatataacccttcattttacgttgttgagctgctgtctgaaggtctgaaaaaacccatcttcattggttgtgacggagagtttttaactatttttcccctgctattttggttttgaataggtcttttggtttcgccataattaaaatgatgcctttggtgactgtgttctctttcataatccatacaagcttcctgttgtgctatttttgtggctatagccttatgacaggcttggcaaaaggccaaagtcacgtagaaccgttgaacgatgtatagaaaaatgcactccacaactgatagaaaaatataaagttaattttaaggtgatacttctaatattgcactcactcaatcccaccatgagtaatagtccatttttgaccagacccatttggaaggagctctcgttgaaaacggcatacaacaccaggcacatctcgaccatgattcccacgcaggagaagataatccaggcacgaacacaactaggatggcgctgtaattaagcgaaggataccattacactgtcaccgtgagccacctttttaaatacgaatataccccatgaatgccaaccagcagcatcacaatcattgttatccaaaagaggccaaaaatagcggcaaaaattgttagccaacttagctgga

SEQ ID NO: 33920 - DNA, 591 bp, DROSOPHILA
atggggtcaaattctgatggatatttagtgccctgtgcctattgcatcgccttgctggacttcatatccgccctgctattcgcaattatctcaggagtggtatttgccaggcatggtcattggaccgccttggttgcactgatcttcaccattttctggatggttataatcatagttttgatggcgggtatctataggcgaaaactgggactggtacgattctggttggtgttcacctgcttgggaatacttctagatggatttatactgctctacggcctgaccttggccatatctgtgaactgggaaggtgtcaaaatcacagtgctgcccttcgtaggactggccgtggaaatgacttttgtctatatcatatacctactttatctggatatgattgattacagtgcaacagaaacgcctcccgatgagaagtatagagaaaggagtggctgtgatgtgaaatacgctgaggaagaggaaaagccactggatcgcaaggatctgaaacggatggaaaaacaagccaaggagcgtatgaaaaaagataaagccgttctcaaaaaacttcagaaacaaatgcgaaagtga

SEQ ID NO: 33921 - protein, 196 aa, DROSOPHILA
MGSNSDGYLVPCAYCIALLDFISALLFAIISGVVFARHGHWTALVALIFTIFWMVIIIVLMAGIYRRKLGLVRFWLVFTCLGILLDGFILLYGLTLAISVNWEGVKITVLPFVGLAVEMTFVYIIYLLYLDMIDYSATETPPDEKYRERSGCDVKYAEEEEKPLDRKDLKRMEKQAKERMKKDKAVLKKLQKQMRK

SEQ ID NO: 33922 - DNA, 2253 bp, DROSOPHILA
aagttttccagatctcagctgctcgtattgaaatcaaattcaagctgttttagtcctaattcggcatctaattccatttgtccgggctttggaacaaagtgcgtggattgtcaacttgtcacttgcaacgcgatgccaaagtgaaaagcaaaatatttcttctttattaaacattgctggaagtccgtttattttcaaacttttttattttttatatacgtatatttctctgtttttttttttgcgggtttctttggtctccaagcgctcacattggtcgtcctcgaaggagcgactggctgctcaaatttattgtttgcaaattgaaattcttgtcgacacgcacgagcaaatccattgggaatgcacagcatagcgcagaatttcagcatctcagctctgctcagctcgtcagcgtcatagtcatagtcagaatttcggattgggacggcagaatggtgggggcgtggcactggtacgggatttgatggcttttgtgtgcccgggcagcagctcatcatggctctttagtatttattaagactgcgatgtgccatgaaacatatttcgataaaacaaacaaaaattttagagcgccgttgacaaacggagaatgggtcttgggtgcagaatagatggatggaaaaatcggaaaaacatctagttattttccacagcatggagtgctcctcaaactcatgtctagaatttatagtcatgtcgataagccagtatcgaaaagacaccttttaaacaatcattgaaatcagtgaaatatatatagtttgtttcaaacaaaagtgagtagttctcctctctttcgaggtgagtttttctctccattgtgaacagagtgctatatataaaacatttttccgactaagtggatcagtcaacttgaaaaatgcgaacggtgcccatcttgttgctaatttgctgcctaggctggttacacaaaggtatcttataaaaataactttctaataagattaactgaataatgttcttcgtaggccaagctgacgaaaggaagattggcgctgtgggtccgcctatgaaacagaggagtcttcgacatgtaagctcctttgctaatccagggcaaccgggtagacctggcagcggaagaccaggacgacctggtcagggaatgcctggccgacctgggcgtccaggaggatcaggtggagctggaggagccggaggaagtggaggtgatggaggagcaggtggggctggcgcacgaccagtaagaggagggtattggaggaaaggtatttcattgggtcaaaggcgaccagagccaaggtcaaaatattatttgtattgaatcaaattttaaagtgtatagaaactgttgcttaaaaatgtgtaacatattataaataaattaaagaatatttaaaaaggattaatattagattaaataaataaattctacagctatttaaattaaataaaacaaatttttaaacgattaaaatatttacaaggaatttaaattttgctaaagtagaccgattttgcgaactacaaaaactacgaacgcattttaaagtaatacttaataattcgatttgcaaatggggaaatttattacaccaaatatttaaaaactaattattttaacaaattggcattgcttttaccataaaaaaaaaacatttgttttttgagatttaatttaccttgtacacaccgttaatgcaaaaacattctgtgattacttgctagccataaatatttattctttattgtgtttctccctactaattagttttctttgctagaatgccccggccacattccatctgacataaaaagcagcgagcaattttaattaaattatataagaattcccatgcccagtcgcttgactcacctgacggcatatcaattcctgtgctcaactattcagtattcaatacatttcatttactgagcgccgagtgaagaaaaaaaaccgcatcataatggaaaagtctacgcaggaaattgattgatttccgctacgtacaggtaaggaaaagcggaaaaaatattaccaattgtagtgtagttcatagggaaagggcgggattatactttatcaggcgggagaaaggtgagcaattagttggctgaggggtcggtaaaggtgacattgtatcaccaacacacactccgccgaatattttcccacaccaaacaccaacactaaacgcacgtgtgtgtgtgttacccgctgtttgtgtaggtgtgtgcgggtcctgc

SEQ ID NO: 33923 - DNA, 195 bp, DROSOPHILA
atgttcttcgtaggccaagctgacgaaaggaagattggcgctggcaaccgggtagacctggcagcggaagaccaggacgacctggtcagggaatgcctggccgacctgggcgtccaggaggatcaggtggagctggaggagccggaggaagtggaggtgatggaggagcaggtggggctggcgcacgaccagtaa

SEQ ID NO: 33924 - protein, 64 aa, DROSOPHILA
MFFVGQADERKIGAGNRVDLAAEDQDDLVRECLADLGVQEDQVELEEPEEVEVMEEQVGLAHDQ

SEQ ID NO: 33925 - DNA, 2780 bp, DROSOPHILA
atttcccatggttcgcttccgtttggcgaaactttcattcaaatcgattgtggagcactatatgtatagctgaaagctgggatctaggacaatcgggtaaataatggtggaggtagggaatggcgaagtcatcgccatcgtcggtttctagtctctgatgtctagtgtgtctgcaactttgtgctcccgacgataatggtaatgataatggcgatgatgatgatgatgatgttaaacgctgcaaactgcacgttcattgtgtgctcaaagtgtcagccgccgggcgctcacagattttcccgtgtaaaaagttgcatatatgtatacaccgatatatatatatgtatgtatgtacatactatatagcccaaacgtgcttcccaactaactgccacttccgtttctcgaagaggaggagcattgtttctgcgcctttgttgccaccagttttcagtgcgccccaaagtatgctgtacaatttattgactttgcttgtaacttgcttcgttttaatgtcgcgtttattgcgaaaaatcttggggcatcgagaaggcacttgtatagagtacaataaacttggctttagtgctcctttatgtaagttaaccactgatattcaaagttcaacgcatgccacagaatacaaagaacatgcttcaaaaaatgggtatttcccttttagtgaagttttttaaattaattaaaatcttctgaaaataacttttattgttgtgtatctcttacggaactaactaagcatagttttgttacatacaattattattattcttgccttttaaagggataaaccaatatttactgtgttggcatgttgactctacagcagctgcaatctgtatctttatcggatgcaattgatctgttccgagtacagacagaaatagttttcttggcacgctttcaacgaaaattgctaatggctcttgaggggatttattcaatatgttttttgatgcaaagtcaaatgcagagtattcccctacttttcaacaaaatcctcgttggtgttgtaaactggctgcaggcgtcttggatatttacgcaaatattcggcaaaatgttgggcatatttggcctggtaatcacgacgcctccagggctgagcgggttcatagaaattctccttattattgtacgtatttagatagttatttgtggccaatgagcgactgccgccaatttggaccacttgctcctcatcgcgacccgaatcgctggtctccaattccggattcctttgtggatatggctgaagttgaggtggaatttgagattgaggatagcgcagaggtgttgatggcgtagtctcctgttgttgatagtaaaagtagccgggcacattgttatagttgtgattgggagcatgtgttgggtcttcccttctccaatttggatatgcttgtctatacgcaggttccgcaacataataaccattactttttggatactgctgctgttcctgggcactgtactgattatcattcactatgataggcggacccgaccatatcgattgtacatctggattggcatagttggattgagcgtagttggatgtggtaattgcataagcactgccataaggtgatgcatactgagctctcccacaaactgcatcgatcatcaggggcataagtgcacatagcttggaataatcattaatagattaatcatctcgggtgtccgaatggaaatctagtgaaacactcacccagctcgacgagctgctcttcacgatccgtcctgtttgcggcttcatttctgactgttcagaacgatttatgctaataacgtatttatatgaggtttcacaacagtctctctggaaagccatatagtatatatagtatagtaatgtatagtagtgcatgatgttcgtttgcagcagcgcctctgtcaaggtgattggatgagcaaaccccactttacctgactcaaaaatttagcaggcggcatttctgtaatgtttgtattttttctcacgcacgtttttttgcagccctgacagcttaagtgcggcatcgttgttttgggcctggcccgtagtggaaaaccatttggaagcattggcaacacgggcggcaggcaaattgcggtgtcacgtaccgcgtaattagtaattagattttcaagtcaactgtaattagaggttaacaagagcgagtgttgaaagcaaccgatagttgcataccttatgatcttgttgataaagctgcttgctagaagaaaaacttacaagtccgtttccctacatatgtatcttatctaaaaatatgactgaacttcaaaattagaaacaattcgagcttgctttattatagtaaagggtatcaacgttttcttactaacattttgtataaaaaatacaaattgaagacttatgtttgaaatttagctggcgttactttaaaatccaattcacttctacaaatttggttgcatgtaatagataaagaatgccccatcacgtggcactggaagctttctcaggaactcgccaccatcgtatgaatcgctaaataattgggttagattggcgttgggttccatctgcttggaaatgggcattccgtggcacgtactatcgcgcgttaagaactagaaaaaagaatacaaaataattagatttcagtgaaaagaaaaaattgtctaaatatgactatagcttaatatttcaagaacgacttgctttaaacgcaccatcatctcccttatggttgtcaaattttgtggtggcggaggatgattgaatggctcct

SEQ ID NO: 33926 - DNA, 714 bp, DROSOPHILA
atgaagccgcaaacaggacggatcgtgaagagcagctcgtcgagctggctatgtgcacttatgcccctgatgatcgatgcagtttgtgggagagctcagtatgcatcaccttatggcagtgcttatgcaattaccacatccaactacgctcaatccaactatgccaatccagatgtacaatcgatatggtcgggtccgcctatcatagtgaatgataatcagtacagtgcccaggaacagcagcagtatccaaaaagtaatggttattatgttgcggaacctgcgtatagacaagcatatccaaattggagaagggaagacccaacacatgctcccaatcacaactataacaatgtgcccggctacttttactatcaacaacaggagactacgccatcaacacctctgcgctatcctcaatctcaaattccacctcaacttcagccatatccacaaaggaatccggaattggagaccagcgattcgggtcgcgatgaggagcaagtggtccaaattggcggcagtcgctcattggccacaaataactatctaaatacgtacaataataaggagaatttctatgaacccgctcagccctggaggcgtcgtgattaccaggccaaatatgcccaacattttgccgaatatttgcgtaaatatccaagacgcctgcagccagtttacaacaccaacgaggattttgttgaaaagtag

SEQ ID NO: 33927 - protein, 237 aa, DROSOPHILA
MKPQTGRIVKSSSSSWLCALMPLMIDAVCGRAQYASPYGSAYAITTSNYAQSNYANPDVQSIWSGPPIIVNDNQYSAQEQQQYPKSNGYYVAEPAYRQAYPNWRREDPTHAPNHNYNNVPGYFYYQQQETTPSTPLRYPQSQIPPQLQPYPQRNPELETSDSGRDEEQVVQIGGSRSLATNNYLNTYNNKENFYEPAQPWRRRDYQAKYAQHFAEYLRKYPRRLQPVYNTNEDFVEK

SEQ ID NO: 33928 - DNA, 2720 bp, DROSOPHILA
taataaccattactttttggatactgctgctgttcctgggcactgtactgattatcattcactatgataggcggacccgaccatatcgattgtacatctggattggcatagttggattgagcgtagttggatgtggtaattgcataagcactgccataaggtgatgcatactgagctctcccacaaactgcatcgatcatcaggggcataagtgcacatagcttggaataatcattaatagattaatcatctcgggtgtccgaatggaaatctagtgaaacactcacccagctcgacgagctgctcttcacgatccgtcctgtttgcggcttcatttctgactgttcagaacgatttatgctaataacgtatttatatgaggtttcacaacagtctctctggaaagccatatagtatatatagtatagtaatgtatagtagtgcatgatgttcgtttgcagcagcgcctctgtcaaggtgattggatgagcaaaccccactttacctgactcaaaaatttagcaggcggcatttctgtaatgtttgtattttttctcacgcacgtttttttgcagccctgacagcttaagtgcggcatcgttgttttgggcctggcccgtagtggaaaaccatttggaagcattggcaacacgggcggcaggcaaattgcggtgtcacgtaccgcgtaattagtaattagattttcaagtcaactgtaattagaggttaacaagagcgagtgttgaaagcaaccgatagttgcataccttatgatcttgttgataaagctgcttgctagaagaaaaacttacaagtccgtttccctacatatgtatcttatctaaaaatatgactgaacttcaaaattagaaacaattcgagcttgctttattatagtaaagggtatcaacgttttcttactaacattttgtataaaaaatacaaattgaagacttatgtttgaaatttagctggcgttactttaaaatccaattcacttctacaaatttggttgcatgtaatagataaagaatgccccatcacgtggcactggaagctttctcaggaactcgccaccatcgtatgaatcgctaaataattgggttagattggcgttgggttccatctgcttggaaatgggcattccgtggcacgtactatcgcgcgttaagaactagaaaaaagaatacaaaataattagatttcagtgaaaagaaaaaattgtctaaatatgactatagcttaatatttcaagaacgacttgctttaaacgcaccatcatctcccttatggttgtcaaattttgtggtggcggaggatgattgaatggctccttattgaatatgttatcgccacagcacttgagcagatgggatgttattatgttcctagatctggcctcgtctgcattttgtggtggttggcgcagcttgtccatccacatggtggccatcgttttggagcgaaagtccagctggcaaatgctttgctccaacttctgaatatcctgctcgaattcctcgtcgaatttggtgatttctggatttacccttttggaggaagtggatggctccttcctcagatgttcacgctgcaattccttttcacgctgacgttccttctccagttccttgcgccactcctgctgatgctgctttttctctcgttccttttccctcgcgagttcctttcgccgctccagttcccgcttgcgttccatttcctcctccctcctgcgctccttgcgatcctccttgcgctcgggactcggattcttttcgggcttctgcgattcggaatcctccacgacgaaggtcttctgtctgtttctgcgagcggtgcgaatcaacatcccaaaagttgattagaaaactaactaaataattttcaatttaccctttcatgtctcgtttgtaaatatttttgaatatgttcctaaatcccgtactgttttgcttgctcattttgacggatgtttcgaaatgatgccagataatatttcattgctaggcatattgcatacctaaaatcatgttcaaagtgataaacttattaagttgtattgtatatttctatttttcagatgaaaacccccgccatacagaatgattttagctactacagacgcatcgtcagccgacagcgtgtggattccacggagaatatgctggtcagcacggaactggccaaccggatgtccctgttctacgcccacgccacgcccatgctcaaggtgctgagcgaggcgacctcaaagtttgtcaatgacaatgccgatgatgtccagaacacgacggaaacgctgggcaccatggccaaggtgtgcctgaggatgctggaaaatccgtgagtttaaatgaatcactatcaatgataataagtattctaatcgatggacaatattgcttttagaaaactcctgcaacagatcgagcgtgaggacacgaaaatgctggtgctgcgcgtaatggtcggcctggtgatcctctacgaccatgtgcatccggagggagccttcgtgcgtggcgcccatgtggatgtgaaggggtgcgtccgactgctgcaggcgcaaccggccatcaaggcggagccgctgctgaatgccctgcgatacacgacgaagcatttgaatggggagaacacgccgaagaatatacagcgtttgttggccgcataatattggaggggatcggtgggcgcggccggtgtgggcggagagt

SEQ ID NO: 33929 - DNA, 618 bp, DROSOPHILA
atggaacgcaagcgggaactggagcggcgaaaggaactcgcgagggaaaaggaacgagagaaaaagcagcatcagcaggagtggcgcaaggaactggagaaggaacgtcagcgtgaaaaggaattgcagcgtgaacatctgaggaaggagccatccacttcctccaaaagggtaaatccagaaatcaccaaattcgacgaggaattcgagcaggatattcagaagttggagcaaagcatttgccagctggactttcgctccaaaacgatggccaccatgtggatggacaagctgcgccaaccaccacaaaatgcagacgaggccagatctaggaacataataacatcccatctgctcaagtgctgtggcgataacatattcaataaggagccattcaatcatcctccgccaccacaaaatttgacaaccataagggagatgatgttcttaacgcgcgatagtacgtgccacggaatgcccatttccaagcagatggaacccaacgccaatctaacccaattatttagcgattcatacgatggtggcgagttcctgagaaagcttccagtgccacgtgatggggcattctttatctattacatgcaaccaaatttgtag

SEQ ID NO: 33930 - protein, 205 aa, DROSOPHILA
MERKRELERRKELAREKEREKKQHQQEWRKELEKERQREKELQREHLRKEPSTSSKRVNPEITKFDEEFEQDIQKLEQSICQLDFRSKTMATMWMDKLRQPPQNADEARSRNIITSHLLKCCGDNIFNKEPFNHPPPPQNLTTIREMMFLTRDSTCHGMPISKQMEPNANLTQLFSDSYDGGEFLRKLPVPRDGAFFIYYMQPNL

SEQ ID NO: 33931 - DNA, 7800 bp, DROSOPHILA
tgagtgtgagtggttttagctgccaaaatatataaaattattaggaacaaccaagcaatgcattaaaattaaattcgttgacaatacggtacaatacagaaatgagtattctttgggtaatcaaattatagatatatgaatctaaagtacatacgaataaatataaatttttgtttgtgctttaacagttcgcaaataatatacaatttgatttgttattgtggctgcattgttactttcccttactacatactacaatgctaatgttttagaataatttgtaaatcataaggactaacttagttcaacgaagttttgaaaatcaacaacccaagggttttttatatatcaatttttttgatgatgtttcagcatgaaaagtacctaaaacattgctctctttcctggtttgctttgatatacaaatacaatgccctatgtataataactatatatcatgtcggtaatatatatatatgtatacatatataaattctgatctgccgcacaaagtttcagcttttgttctggtaaaaatctacgcatgaagcacatttttcttttcattctctgcaaaactattttgcaatttgaatttatgttttaatatttttttttttgttcttttctttttttgtttgctttacttatataaactccatagaactgcgtttagcggcgtatattttcctttttggtttagcttttttttgcttttactggacgacattgatttgtttatgttctttttgtttctttgttgcttagctttgattttcaactctccaaggacattgagcgtctgttgttggtgttgtcgtggctgctgttgggtgttgagtatcctgcatctatcggtttagttgtaacttctacttactgcacgtagggaggagtatttacgtctaagttacttatttgctttgctttgttcatatattgagcattttcatcgagagtagttcaagtgcgttatttggctgactggcgtagattgttcttaatatggcgtgaaacgattgaatccaccgcggtacatggtagcctaatgaaaaaaatggtaggaaacgtgaaggttgtgcggggatttagtaaacaataatcatatcatatttaatatattcgatgaaaattatactctttatttgtatttaaattgataaggagaaacttaccccgtatccaggaactggtccaatgccatgtcctagataaggatctgcatattcgcgcgcatatctataaatatttttgtgatcgtatgtttagcttattaataatactcaatggcggcatttgaaattgttaatgttgttaaatggtgtttgatgattccagttggctttatgttatgatttaataaaaattatttaatttacacaatgtcttgcaaaagtgttcaatcgactgtcggatctcttcaggtttcggagttaggtttctacactttacccaattacacacaattattgttaaaaagtttcaaaaagaagaggtaaaatcaaataattagtcaaattttaaatcgaaacattaatattcaaaacaactataaagtaaagaggcttaaaaattaaaaataataaatattagtttaaagacataaaaataaactaaaaaggtaatctttgagatacataaattgtgcttaagttctaacagataataaacttataatggtagtataaaataataaatagataaataaaatatgaaattaaaagtttgttgataaagaaataaataaggaaggaaataaaatagggaaaaaaataataaaattgtttttagacaaattaataaatacgaagttagatcaaatacaatacacactatttttgagagtttgaagtcaaataaagaacccttttttgacaatagattttgaattctaaaatagttgttagaccaactgaaggttaaaattttatcaaattattatgggctctattctatgataataccaactggtagcatgttgtagctgttagtgatgatgacatcggatttgagttgagtgggatggatttttgagtgtatataacttacccagccacggtggcgtagccggcgagtgccggctgggcggctgctgcagcagcggcgccataggcggcccgggcggctaccgccgtgtaggtggtggccgccgtggcgtacgcctgctgctgggcctgagacagcggagtctttagcagcggagcagtggcctggaataatggtaagcaaatggggcgttaaactggggcaacacaagggcggcgactcgaggaacagacgcagttacggttcggggttttaatattatttttcttttttgattttttgaagagggcgacaacggcaaacgacaagactagcgaaggagtcggtgagagcaagtgtggtgagaagaaattaggaacccaaaccaaaccggggtaggcaaaagtatacacacacatataaatatattgtaaccaaaaccgaaaaagaaaatgggtgcaaacagtggagtagtgtgattaaaaatattctatatacacttaaatatctaagtcaggtggttttaaccttttcattttgtttacttgtaaccgagctacgtagaagaacccaagatgccaggctataaaaccgaaaagcgaggcacgaattcagcaaataacttaactcgtattgtattacttgctagggttaacttaagacttaaggcatatagtagacatacagtttagggggtgcatacaaaaaggcattgagcagaacgcaaaattgtgacaacaatcaaaacgtaaagtctggatatttaggtgcatgggtatggaactagaactagatatgattatttttaccaaaacattctgtggaaccggaatgcggttgatcgtatgtgggttactgtttagcgtagtcacagtgcggcgctgtaatttatggtttttgtttttcaatcagtattttgattttttttttttttcaatagtgttgtggaagtagttgttgttgttgagttgagtgtgttgtagtaacagtcgtgaaagataaccaaagaagaatttgtagtagttacaaaatgtatatagcatttaataatagttattttatcaaaatagtttgtagtattagtattcagcaaaagcaaaaatgtgaatgaaatcaacaaaactagcagaagtacttcaaaatgatgtagattaaagtagttaaagagagcgtatgcttcataaagccacctgtggtcactaattgaatccttggatttaaacgaaaaccaaacaaaggatgcacttaatacggtagagagcttatacacaagtgttcagttattcagacattgagttgaataagcttagccaagcttaagtcaaaaagaataatgtgatttacgaccagttaccaagttcgatctcaacttaaaggtgttacacagcaagaaattaggacgcgtcgttagttcaggatggatgtgaataatgcataaggaaactcaaaggaagcgacttaaaaacaatttatacgtatgagttaagtagataataacgtttgttccaaaaaccaagtcaaatgtttcaaaactcaaacggtgtctttcacaagctaccatcaaaatatacaaattataactgaattgttcttaatttttttggtggttgtggttaggatattagtttgaaaaagttttattacatttaatatggcggctggctgagcggctggaacttcagtgaccggtttggctgcctgtaagatttatataatattttcatatattttcgtggcaagttatggggatttatgtatttagctctagactactctttttataataccttaaagacgtacgtacattaaaccataagctagttgaacattccatttcactgaacgaaactcacctggaagcgtagatttggatcagcggaagcagcggctgctaagaagggatcatagtatacactgcatttgggacaagatgataagagaagatcatatattaataaagagtttgtgataggatcatttctgggtaggtgagtcaagccagaggcatccaatcaaaaggaatatatacgctatatccattttaattggcttacctctgcttcactgtactggcacttaaaagcaaaattcaaaaattttctttttggttcatttttttaacgcacttgtgtgggcattgatttgggcacaatggaaaaccagacgggataaagtttatttgttttcgaaaaaaaaagaaatacaaaaaagtttgattcaaatatttctcgctggccaataaaacttcatccacatccggttttagttgtttttgtttattttttttttattaaatgttgttgttgtttttcttggtaccggatgctgttgtgggtaaatggctggaacttaaggggcaactgaaaaacaaaagttggcacctaattgttatagacaccccacctacctagctaaatagcctgtgctaaactgacctgatctgacctgattccccacttgatgacgaactgattttggaggaaatgtttgagacagaggaaacgaaacaaaagggaaattaaaaggtttagatatattgtcgtttataaagagcacttgcactagcaaagatagccaaccaaccaaccacatacattagggtcattccatttcccaaacactacgaaaatttgtcttgcttgcttgctttaaatttgcatttaatctttagacagaacagacactcatgcacctagctaattagttttgtagtttttttttttttaatatttttaattggttctttggtttggcatgtcttgatgtgtgttgataagtatacagttcttaatggagcattcattcgtacgctatggtgtaaggtttgatatatggctgggcgggtgagtgtgtgtttgtgtatgtatgtgtgtgtgtgtgtgtgtgtagagagcagccacaaaagaataagttaatcaaaggtctatataaatatatatattatatatataatgtcggggcagaacatgcacgcaaggcgctggtagagagcgacgcagtcgcatttaaacactttcaagtcaaattcaaatcgaaattcatcatacgcctagtggtacacaatatacaaccgagtgtagagtaggtcccttaaccaaagtaacgattaattaacgatgccaaaaacacacttctgtcaatcaaagtatgatcaaagaatatatgcgagtgtgtatttatatatagagtcttagatagtttacgtgaatgatgtttgtgtgttagcgtgcgttcatcggttgctgattttgcaaattttgtattcagtttgcgttcggatcgttatactcttctattgctcgatttatgtatacaaaataagacaaagtctaggtttcattatatgcgatattaaaactttacacacacaagatagctaaaaaacatttgtcaccaacaagatagagacgtatatagtaacacataaaaatagagacggtaggaaaaacgatctttaagctataaacaatttaagctttaggttaaaatcatgacagatgagcgggatgttcctctgcggttacgaatcagacaccacagaaaaaattaaggggttgggaaataattatacaatttatggatattactacgcttatacgccaaaattcatggttaataaataaatatttgtaattttttttataaataatttatacattttaacttcataattgattgctttattaatatcaatatttaactgaacagagtaagaacggtaacatctaaaaaattggcccaataaaaagtttaaagaaagctaaaaattttctttcgcaaattgaaatgaaacagattaaataaaagcattcgtaattgtaaggcgtgcgtataaacgtagtattatttatgaacggagtgatgataattgtaaacttgggtgctctaaaactacattcgcagcggaaccaactaaagtacaaaataacagctacaacggactaactacgacgggatcgcgggtgtgacggagtgaagtccacgacggaggactctacttacggcgcgaatccatgcaaagcggccgcattgttggccgcattggccgacgcagccatggaagcagcagccgcagcagcagcggctgtttgcggcgattgtgtggcacccgtggccgccgatagacgggcggcataggcggcggcggcggcagcagcgttcggattaccgctcggattctggatggcagcggcgagggattgctgcagtgcagcagcattgctagcggccgtgggcacggcgaccgcttgcagttgcgccaattgtggaccaagggcgtgggcatgggcatgggcatgagcggcatgcatgtgcggatgcgaagcggcagctgcggcggctgctacggcggcatgttgctgttgttgctgctgctgctgttgttgttgatgttgctgctgctgctggaccgcctgttgttgctgcacggcctgttgttgctgctgctgctgctgctggtgttgctgctgggcggcggcagccacttgctgctgttgctgctgtacaacagcctgctgctgctgctgctgctgttgggcgactgctgccgtggccacggcggcggcggccagttggcgttgctgttgttgttgggcagcggcggcggaggccgccagcagcgccggatgatgatgcggatgatggggatgatggtagggggtggcgccgaccacgcccacgtgtccgcgctggatggccactccacgcattgcggcggcaacggcggctgcaggaatcaccgaaccgatacggaaattcgtatatttttggggcatttatatatgtttgtttttgtttttttttttttgcaaccatttgacacaacatttttgaccagagtgtttattgtttgtatttatgtgatatattttttttttatttttgtcatttatgtgtgtgttttgtgtgcaaaaagtagaaaaaggaaaagaaaagaacataaaacgcatgcggttagttttctctcttgatatataagtaaatattatatatggtatatagtatatggcaaatctaggcattatgtagtaaacgattttttttttgtttgtatatatattcatagcgctgagatgatattgatatatacatataacaatacataagacatacgtgttgctcatacatatgtatgtaaatgggatttatatcgaaacatacttaaacattataacactgaattaccaagaaatgctacgcattagttgcactttatattgcataattgtatatatacgagtatagagatattatcatcaacaatacgaaaaacattggaccgatctttagtacagagtatatagcatatgtacatacatccatatgtgtacgtatgcggcaagaccttttcgtttcaacaactcattgcattttgctgtgtgtgtgtgaggggttaaaagcgtttaagtaaataaaatacatttaattgttgtttaacccttgcacctttcaaatacatttaaaactagcaagaacatttaccaagtgctataacaagtaggccgattaaaaagcagattgggattaggaggttgggagcttttttttaggtcattggaatttctaaatagagagagggtgatggagaggattgaaaatacatgccgagggttaaatcataaataaataaattaaaattataaaaaaaaaaacgataagaagaaatacggtcaaccctctttcatctaatttattaattaatataatcactcttttatcgttcagatttaaaagaggaattgaagtttttttattgtactacacttaaatcgcatt

SEQ ID NO: 33932 - DNA, 1104 bp, DROSOPHILA
atgccccaaaaatatacgaatttccgtatcggttcggtgattcctgcagccgccgttgccgccgcaatgcgtggagtggccatccagcgcggacacgtgggcgtggtcggcgccaccccctaccatcatccccatcatccgcatcatcatccggcgctgctggcggcctccgccgccgctgcccaacaacaacagcaacgccaactggccgccgccgccgtggccacggcagcagtcgcccaacagcagcagcagcagcagcaggctgttgtacagcagcaacagcagcaagtggctgccgccgcccagcagcaacaccagcagcagcagcagcagcaacaacaggccgtgcagcaacaacaggcggtccagcagcagcagcaacatcaacaacaacagcagcagcagcaacaacagcaacatgccgccgtagcagccgccgcagctgccgcttcgcatccgcacatgcatgccgctcatgcccatgcccatgcccacgcccttggtccacaattggcgcaactgcaagcggtcgccgtgcccacggccgctagcaatgctgctgcactgcagcaatccctcgccgctgccatccagaatccgagcggtaatccgaacgctgctgccgccgccgccgcctatgccgcccgtctatcggcggccacgggtgccacacaatcgccgcaaacagccgctgctgctgcggctgctgcttccatggctgcgtcggccaatgcggccaacaatgcggccgctttgcatggattcgcgcctgtatactatgatcccttcttagcagccgctgcttccgctgatccaaatctacgcttccaggccactgctccgctgctaaagactccgctgtctcaggcccagcagcaggcgtacgccacggcggccaccacctacacggcggtagccgcccgggccgcctatggcgccgctgctgcagcagccgcccagccggcactcgccggctacgccaccgtggctggatatgcgcgcgaatatgcagatccttatctaggacatggcattggaccagttcctggatacggggctaccatgtaccgcggtggattcaatcgtttcacgccatattaa

SEQ ID NO: 33933 - protein, 367 aa, DROSOPHILA
MPQKYTNFRIGSVIPAAAVAAAMRGVAIQRGHVGVVGATPYHHPHHPHHHPALLAASAAAAQQQQQRQLAAAAVATAAVAQQQQQQQQAVVQQQQQQVAAAAQQQHQQQQQQQQQAVQQQQAVQQQQQHQQQQQQQQQQQHAAVAAAAAAASHPHMHAAHAHAHAHALGPQLAQLQAVAVPTAASNAAALQQSLAAAIQNPSGNPNAAAAAAAYAARLSAATGATQSPQTAAAAAAAASMAASANAANNAAALHGFAPVYYDPFLAAAASADPNLRFQATAPLLKTPLSQAQQQAYATAATTYTAVAARAAYGAAAAAAAQPALAGYATVAGYAREYADPYLGHGIGPVPGYGATMYRGGFNRFTPY

SEQ ID NO: 33934 - DNA, 3493 bp, DROSOPHILA
ggaaaactgtgaaaattgaaatgaaaattacccattgtggcatcggcagcatttcaattttcagctgccattttgcacgtgcccggcgaaggcttccttctgaccccacctacctccgccccattatttcctctaatgctctatggctggttgaattttcaccactttacccacccacaatttcccaaccataatcttggcaaatgcctgggagagccttgcattttattcatggcctccatccacgtccgactttattagttattttccgctcaatttgtgctcctgccgaggcaggataacaagaaaaattattttcatttcattcaacacattcattatggtccaaagtagagtagtccttttccattgccacaccttttggggccctttgtttgatagctaggcatgaatgaactcaacggatttgaattcaattggttttttttatcagatttctgaagcttaatgtttaaatgtttaaaacgtaccaataacactttcgagctttcggtaaataactacaaaacttactaaatattatatattataatttaatataaatctacttacactttattcataaaattttgtacatttttattcactcttttggttcagtgtacaatgcaggtgccaaaatgcagacatcttttgttgcaattcatgttgattagtggccggtgaaggtcgactcctgttttcctagcctccctggcttttctcttttgagaaccttttcagctggttgtaagaagtgagaaaagttcacagctaattacatcggttagttaaaagtttaggcacaattatcaacacttttcaaggcgcgacatgatggggcataaaaacttatcagacacgcccaccgtcgcccactataaaagaccaaagcgaaggtttgaccacaaacagtttctattcgaaattttctctgtaaagttcccgaaaaagtaaaaataaaatggaaacagcgaaggataatacagccaggacttttatggaattgatgcgagtgccagtacagttttacagaacgattggagaggatatctacgcccatcgatccacgaatcccctaaaatcgcttctcttcaagatctatctatatgcgggattcataaattttaatctgttggtaatcggtgaactggtgttcttctacaactcaattcaggactttgaaaccattcgattggccatcgcggtggctccatgtatcggattttctctggttgctgattttaaacaagctgccatgattagaggcaagaaaacactaattatgctactcgatgatttggagaacatgcatccgaaaaccctggcaaagcaaatggaatacaaattgccggactttgaaaagaccatgaaacgtgtgatcaatatattcacctttctctgcttggcctatacgactacgttctccttttatccggccatcaaggcatccgtgaaatttaatttcttgggctacgacacctttgatcgaaattttggtttcctcatctggtttcccttcgatgcaacaaggaataatttgatatactggatcatgtactgggacatagcccatggggcctatctagcgggtattgcttttctctgcgccgatcttttgctcgtcgtagtcattacccagatttgtatgcactttaactatatatctatgcgattagaggatcatccatgtaattcgaatgaggacaaagagaatatagagtttcttattggcattatcagataccatgacaagtgccttaagtgagtgaaatatacttcaatatatagtgcatttataatgagttaataatatttccttagactatgcgaacatgtcaacgatctgtatagtttctctttgctgcttaatttccttatggcatccatgcagatttgtttcatagcctttcaggtcaccgaatcaacagtggaagtgattattatttactgcatttttttgatgacctcgatggttcaggtatttatggtgtgctactatggggatactttaattgccgcggtaagattgaaatgaaatatcatgtaattatttatttatttaattcgccaaattttgtagagcttgaaagtgggcgatgccgcttacaaccaaaagtggtttcagtgcagcaaatcctattgcaccatgttgaagttgctaatcatgaggagtcagaaaccagcttcaataagaccgccgacttttccccccatatccttggttacctatatgaaggtttgaggaaatatagttttttttagttttctactattattatcttttccaggtcatcagcatgtcgtatcaattttttgccttacttagaaccacatacagcaataattgaattagtaaagcgcctctctctgcacttctcaaatgatccacttgctgcaaatcgaatcgttaatagggattttcagaatcccttcaacaatctacccaaacacagctcttccctgcaaatcaacgccaatcgctatatctaaggcattcgaacttaatgacgccctcgacacgctttgataatatttaattaaaaatcgcatttaaaattaataagcttaaatggagaccaatagcgcctggccgagcacgaaaatccggcatctgtagaggcacacgagccaaataaaaatggcatttttttcaaaaggaatattacagcaccatccacataaaaaaaaagcgccaagaacggggacgcaaataaaagcagcaaatggggataccatccacccaaaagagaactccccgttctgacctggtaataaaaggaacaacataaaacgcaatcacaatcatcgacaataatctggcagcaacaaccaacaaaaaaatgcttattataaaatttcacagtttttcaatgagcaaaaaaggagcggagcgggtgggtgggtgcagaaaaaattggtcgagagtgaggggttggaggaatggcaatggcttttcaaaatcataatggcagctagtaacaagagttttgtgtgcaaataagtgggcggggatggtatgaaaatttgttttgccatggcggccaaccgatcagagtcggagctggcaaataccacgtcagcaggagattccctccatgtcacaacttttcatgcactggaacaaaataaatgggctttaaggtgatagtctcagaaatgtatgcaaatagtatcatgagctttaataagtttaaataaaagttattttctgcttaaaataataaactggcgacttgaataagatacttttaaattaacttataattttttttcactttataatttatttattattatttttagttattatttttttcagtgcacaactccgatgtgcacgtcacgcgcgaccacttaaaaaaccttggccacccagcctccagtctcccgctcccatcctctgccccttcgtgcccccacccaatccataggccccatccccattgggccaagccctgccccatagttcgttgcattttcccttaacagg

SEQ ID NO: 33935 - DNA, 930 bp, DROSOPHILA
atggaattgatgcgagtgccagtacagttttacagaacgattggagaggatatctacgcccatcgatccacgaatcccctaaaatcgcttctcttcaagatctatctatatgcgggattcataaattttaatctgttggtaatcggtgaactggtgttcttctacaactcaattcaggactttgaaaccattcgattggccatcgcggtggctccatgtatcggattttctctggttgctgattttaaacaagctgccatgattagaggcaagaaaacactaattatgctactcgatgatttggagaacatgcatccgaaaaccctggcaaagcaaatggaatacaaattgccggactttgaaaagaccatgaaacgtgtgatcaatatattcacctttctctgcttggcctatacgactacgttctccttttatccggccatcaaggcatccgtgaaatttaatttcttgggctacgacacctttgatcgaaattttggtttcctcatctggtttcccttcgatgcaacaaggaataatttgatatactggatcatgtactgggacatagcccatggggcctatctagcggcctttcaggtcaccgaatcaacagtggaagtgattattatttactgcatttttttgatgacctcgatggttcaggtatttatggtgtgctactatggggatactttaattgccgcgagcttgaaagtgggcgatgccgcttacaaccaaaagtggtttcagtgcagcaaatcctattgcaccatgttgaagttgctaatcatgaggagtcagaaaccagcttcaataagaccgccgacttttccccccatatccttggttacctatatgaagaatcccttcaacaatctacccaaacacagctcttccctgcaaatcaacgccaatcgctatatctaa

SEQ ID NO: 33936 - protein, 309 aa, DROSOPHILA
MELMRVPVQFYRTIGEDIYAHRSTNPLKSLLFKIYLYAGFINFNLLVIGELVFFYNSIQDFETIRLAIAVAPCIGFSLVADFKQAAMIRGKKTLIMLLDDLENMHPKTLAKQMEYKLPDFEKTMKRVINIFTFLCLAYTTTFSFYPAIKASVKFNFLGYDTFDRNFGFLIWFPFDATRNNLIYWIMYWDIAHGAYLAAFQVTESTVEVIIIYCIFLMTSMVQVFMVCYYGDTLIAASLKVGDAAYNQKWFQCSKSYCTMLKLLIMRSQKPASIRPPTFPPISLVTYMKNPFNNLPKHSSSLQINANRYI

SEQ ID NO: 33937 - DNA, 3367 bp, DROSOPHILA
tcttgaggggcttcctcttggggttggtgtgggtacttttgagtagggaggatggggcggtggagcaccttatccataagcaatgatgaataacggtgcttacgctttggacatttgattaatgatgcgtttaccgacctcccaacacccctcagcaaccatctttttcttcgtcttgcgcccgcgcactcaattttcaacgccatttttcggtggatttcggtgggtttttattttttttttttgtttatttcacgatggcacactatttcggttgcgttttagcggtgcgcggactttttgttctttatgcccggacataactttattttattagcactacgtggcaatctgctggatttgcacggcattaaaagacaatttttacaacttaccagcgatgctttttcatacttttccctcatttggatcgcctgggttttttcctttcctttcgatgcttgctcttttttttttgctgtttttactatttttcatggtctgtggcctggcagacatcattttttgtgggcccataaagtgcgggtctgtttattaaattccgttgcggcaagttcattagacaaagagcaaaaattaatcagcgctctccccatccaaattcactcctctcatttgctcagcagcagtttcagcggattacttttatagtatatatttctatggctaaaaatgggagccaaattgcctagcgatttacgagatttgatcaaagaaatctcatttgttaaagggcttaaatattgcttagccactttgtgactattctcggaaattctaaattagtcaaaataggtaatagttctgataaatgcaaaacccattaaagaactatttgatggtatccataaatgttagttttacaaagcatgtatgaatatattttaatctacacattttttcagttggctcattaagtgtgtattgtattaatatggtttaaaaataagagcgacttttaattaaatattttgttttcttatcccaaatagttcatcaacatcatgctgaaactatatatgcctttcgtcaattgcaaagctgtgttcatcgacaaaggcgccatgtcggctgcagtgagtacaacttcattttgagccttggccagcatcatgataataagtttctcctccttaacgggtagctcataccacaaacaattcgtgtagatcacacttaggaaatcctcattctgaaaggcataaaatgattacagtttcttaaataacaactaaattacttactgaattttctactaaagtacccaagccgcaaaaggtgtagagagttatggcggcatataaaaggtaaagaggagctgcgggccaggctttcataaagatgcaagatatggtacagagaagacctacgcaagttgtggaaagttgaacgaacaagactatggaatagatcttcttggtggtttgaagcattctgcataaacgcaaatatatatgtacaaaatactataaatataagtattaattatttcgtttagctaattacctagtatacagctgatgccagaccaacaggtcgcaaagcatggctctcacttttggaaaatcattccttttcataaccaactcgttaaattccgtaagcttcacacagaatatgtccttgattaacggcacatgggtaacgaaaagaaataggtacatatcccctccgtagttaccaaatccaccgaatgtaattaaaatcacatgagcagccgtgagtattaggtgaccaccatctgttgtgtgatcgaggaatggtattagaaattgcatgaccaataccttttggtgcagaatcagcaagtagaatatgggaaaggtgattacaaggcccaaaagaataatgtagacgagcatgaagccgattaaaagagtccatgtaatgcggattcgcttctccaagcatttagcatattcatctcccttagatccgtattctctgcggaaaaatatgaaaatgttgtaaaataaataattatattgttgaatatgtcaatagaaaattaatttatatattggaattgaacaagttgttgcttttgttaaaaccaaactctgacctatagatatcctcgtaggtattctgaacttctcgcatgtgagaagcattattggcggttaccaaaagtttagtaagtccctgaacggcggagccgaccatggccaatgcctgtaggattatggtgaggtctccattgatgaccactcccacataaattgtatatcctgtacaggcgaagaagaaggcaatggctgccatcacagcgtaggtgagccaccacatccgaaaattgggatctgccacatcgtttccgcaaaatcccacgcaaaagcgaatcattcgaatgactttacaatagcgctctacaggctcaacttttgccattttcaacattgtttgttagctatgcaacttaaaggagaactgttttttaattgtcaaaataatcctgcttttatagagcttccaagctggcaattaatgtcataatattgacgttataattgcggcatttagctaaagaatctattgtaaataattaatattcaagggcggtcgatatctgaataaagtgcaattacactcagcattaaatatattttccattagtgttctcaatggtatatttcttttatgaaaataaaagatataagtctaggaactttatgttcttcattgatttaataagaaatgaatcgcattttgtttttccccatcgtaaattgcctcccagccaaacaactttttgcatgagcacatctgccaccccgaccagaaaacacaatataaggagaaaatctccacgcaattgatttaatataaaattttttaataaaatttgctgcccgggaaaaaagtggactacgagtgaaaaaaaaagaagggaaacgtgagctgttaggggagcttaaaattatatctatttgcggagcgcacaagtcttgacgtgaaaatttcgggacaggaagcagaatgtggggggaaatgcgtaagcgcctaagctttcggccaacaactaataaaggctatcaacaacagttcaaacagcaccagcatcgcaaacaacaacaggcagagcaacagcaacaaggacgacaggacaatgggcacgaaatcaggaaaacaggatgagaatgccagtgtcgacagcgcatacgcactcaagtgaatattttctcattttcttgcatttaagttgggttcgctttgaagttttgacatttcataaagcggcagcgaaacaaatttcgttcttcctcatttcgcttttatttcattttattttttcgtttattctatatatttttttttcgatcgaaaatccgagcaaacaaaagta

SEQ ID NO: 33938 - DNA, 729 bp, DROSOPHILA
atgattcgcttttgcgtgggattttgcggaaacgatgtggcagatcccaattttcggatgtggtggctcacctacgctgtgatggcagccattgccttcttcttcgcctgtacaggatatacaatttatgtgggagtggtcatcaatggagacctcaccataatcctacaggcattggccatggtcggctccgccgttcagggacttactaaacttttggtaaccgccaataatgcttctcacatgcgagaagttcagaatacctacgaggatatctatagagaatacggatctaagggagatgaatatgctaaatgcttggagaagcgaatccgcattacatggactcttttaatcggcttcatgctcgtctacattattcttttgggccttgtaatcacctttcccatattctacttgctgattctgcaccaaaaggtattggtcatgcaatttctaataccattcctcgatcacacaacagatggtggtcacctaatactcacggctgctcataatgaggatttcctaagtgtgatctacacgaattgtttgtggtatgagctacccgttaaggaggagaaacttattatcatgatgctggccaaggctcaaaatgaagttgtactcactgcagccgacatggcgcctttgtcgatgaacacagctttgcaattgacgaaaggcatatatagtttcagcatgatgttgatgaactatttgggataa

SEQ ID NO: 33939 - protein, 242 aa, DROSOPHILA
MIRFCVGFCGNDVADPNFRMWWLTYAVMAAIAFFFACTGYTIYVGVVINGDLTIILQALAMVGSAVQGLTKLLVTANNASHMREVQNTYEDIYREYGSKGDEYAKCLEKRIRITWTLLIGFMLVYIILLGLVITFPIFYLLILHQKVLVMQFLIPFLDHTTDGGHLILTAAHNEDFLSVIYTNCLWYELPVKEEKLIIMMLAKAQNEVVLTAADMAPLSMNTALQLTKGIYSFSMMLMNYLG

SEQ ID NO: 33940 - DNA, 3550 bp, DROSOPHILA
tttttccacagtgcaggcaagtcaacagggagacaacagtcggaaacatttcgcattaataatcttgatttttatttacatttaataaacaaagagctccggaatgagggcggtcgcaagtgtggcgaatgtgtcaccaaatatccacttagatggcccaaacagacagagcggggttattaaatttgctgccagtttattatgtaatacgtgacagcagccgacacccaaatatacacacacatgctgaccgcttggccctagttttttcatgttcttttatttttctaggatggcgtcacttgatccacccaacccaattaaagtcttcgctaaccagttgttagccccttagtttttgcggaaacaaaaagtgttgcctttcagcaatcaaaattaaattggttgccacaacaagagctggctatataataaagttttttttttcgccgcagacacaatgcggaaatattttgcacgcattggacaaaatttagcgcttgcttttagtgggaaagcttgcaggtgttggcaggcccgaaaacgttgattacgttaagcgatttggccacggtcatggggctcatagatttcctttaggccaaatccgcttccgcaatcagtaaactacacacactcgcacacatcctccagttaaccggccgtgctcggtttttggccaacagtaaatttatggccagcccaggctaaagtttactttccaaacttttttcggcttttttcctgctgctactgcagaattagacaggcgggcagccggcaggaaagtggaactgcacagatggatgccatacagttggctgactctgtctgtcttttggactgtgtgtgttattggttagacagttagccgcataaacaaggagcttccatggcaaaaaaaaaagaaaacaggcaaaaagaaaaaaagtaacaggccaaaaggacggacaaaaatttgtatcaaatgtagtgggcaatgtcgagtgaatgtcgctgtatggggagtatcattttccgggtctgtcatgcgttccgcacactaatttcaagttgtatgaaaatttagtctgtgagctgcataaattttgcggtttctgcggcgcccaatggccccaaacgaactacaatcaggggctctttaaagtccttggaaaagcgtattaacggagcttctttccgcaggttgcctggatacgacatcgtgacctgcacatcctcaccgtgggcacctacacctacacgacggatcagcgtttccagacctcctaccatcgggacatcgacgagtggaccctgcagatcaagtgggcccagcagagggacgccggagtctacgagtgccaaatatccacgcagcctgtgcgcagctattccgtcaacctgaacatcgtgggtgagtagatactctgctccagaggagtacatatgtttagattacctagaaggcgattagcgcttatgattaaaagatattacatgtgctcctgtgaaagaaaagtaagataagttgaaaaagtagttcataggcttatgttaaattttatccaattttttttaccaggagtgtacaaagaatcttatagaattttcgtaaattcacccattttccagttcagcttgtcaagtgtaatgtataaatacaagcagatacaaaataattcaggatctctgttttgggaatttcggatatttctctgtattgcttttgcatattcatgcaattttcaagggtgtaaattatgcacacttggcaatcgtcacagcaggatataaaaacggggcacgactctgccggtaaatatgacagaggaatttttcgcaaaattcttttgggcagattgatggactgacaggaaatggcaggagccgcagcacatacacacataaatggatatcgacaggatacctatttatatgggatttaaggtgtagataacagggaaaaccaactgcgcaacgaaaacagacgtgtatttaaaaaaaaaacatatatcctctttaagcctgtgggccacagtacgttcgtatattttggttgaattatttttatagtttttctaaacgaagcccatagctgaataacaaattcgtgattgaaacagcaatttgatggaacgaaactttaattttttttctttaaataaaagcccacaaattaggtttgaattattcagcaggtggactttgcccccgcaattattatggatggtttatttctatttttgattctatgcccgtgctgggtactttggttgattagtttagccacgggcatattataattatttcaacgtttttctatttctattttgatttcatatgttatttttccatttttctttgtttatattttttggttacccatccaccaccaaccaccatccaccgacgttccgatgagcagacctgatagacgccgagaccagcgatataatgcagcagtattataacgatgacgccttctatatagccgagaatcgggtgtaccagtccagtaacgatgagttcgccggcatgtttggacccatccagacagttgcgggttagtcctggtgaaccctcgtgatccagccatccactgttctcgtagcacacttatttttttggccgagtgacaaagtccaaccgcagataggggaaaaattaggtgccagacggagatgagagctctgctcgagggctgccatgcatgcatattattttttaatattttacaacattttttcgtggcagctgaggggcaggatgaggagctgctagatggtcggcaggatgcggggtgtttgtggagtcaagtgcgctgggcgcccggagcaagcacttttctggctcatgacgaacaaattgctttccaacaagcttttacccactaactttgccagcttgttacggttactgttactcctccacctattattttctaccttttcgcaatttcccggtctccttactgtagtgttgccgcaatttgagagccagatgattgccacattcgcaaataaagcaacttgaattgctatgaaaagtagaattaaaattgtttaaaaacagtgatgtatataataacaaacgtactcctaattaaaaattctaataagaaagaaaactaacaacatgtttcttcattattgatgattataaaagtagttattttaatcgcttattcatatagtattaacaaatgttttattatgtgtactttttaatttttttgaagtatttttgttgcacgattaaatactactgtaattttgtcttttttggctagatgctcatcgcttcctataaagaaagccaaaagttcagcactgcctttactccatttatggccaagtggttcgcacatttaattatacccaaagcctttgcaatatttattttgtcggagattcaggttcttagtcattcagggtcagtgttttgcaaaggttgggatattcatcactttgtccattgggacatagggtggcattgaaaatgccttcttcgtataggtttccctcgacaggtggtcctgagctataatagcaaacgagcacaaagtgta

SEQ ID NO: 33941 - DNA, 375 bp, DROSOPHILA
atggggagtatcattttccgggttgcctggatacgacatcgtgacctgcacatcctcaccgtgggcacctacacctacacgacggatcagcgtttccagacctcctaccatcgggacatcgacgagtggaccctgcagatcaagtgggcccagcagagggacgccggagtctacgagtgccaaatatccacgcagcctgtgcgcagctattccgtcaacctgaacatcgtggacctgatagacgccgagaccagcgatataatgcagcagtattataacgatgacgccttctatatagccgagaatcgggtgtaccagtccagtaacgatgagttcgccggcatgtttggacccatccagacagttgcgggttag

SEQ ID NO: 33942 - protein, 124 aa, DROSOPHILA
MGSIIFRVAWIRHRDLHILTVGTYTYTTDQRFQTSYHRDIDEWTLQIKWAQQRDAGVYECQISTQPVRSYSVNLNIVDLIDAETSDIMQQYYNDDAFYIAENRVYQSSNDEFAGMFGPIQTVAG

SEQ ID NO: 33943 - DNA, 4077 bp, DROSOPHILA
gaaatcctcggcgtagttgaaatgcggttctgagaaatcatcggtggccacgcaggagtcatcgggcagatccatttggcagcgtttcaggtgatattcggcaaccaccgacaggtaattgtcccacaccaattcgggcattttctgcgcaggtggcaagtcgacaaacaagttgctggccacctcttggcgatatccgttgtggagacccagcaaatactcacggaaataggccatgttcaccaggccatgaaaacgcaggcagctctcatcgaacatctaaaaggagctgtttgaacagttcttataggatgtggaccttactcaccatattgttgtcacagccaatgtgccgcttgccatgacacgacttaatatcacaaaagtctatggccaaaattgatctgagaaacagaattttacacagaaaaagtgtcaactgcaatcgttgcatttctgtttagaactaaaaactgtatgagaaatatgaaggtgttataagagctataaacaaaaaacctcaattgccaaatggcaaacaaaacgaactaattaaacaaattgttaagcacaaccaaggtacaactaaagaatttattttattggcatttaaataagtgtagcaaaacgttttttccgtgttggtaaatagcttgaaaaaaataatagtgctggattaaatatccttttaatttatatgattatattcctgttctaccatattacattttgtcagaaatttaatagtttaccaaagcctcgattctcatgccacaaacagagagattctcaaacccaatgaaaattgtaagttccacgatagatcccaagtagcataaaattgagttgtaacccaacttgaaatcactttcaactttgtgcagccttgtccttttcaaagtttgcctttctgtccgcctgacgggcggtaatcgattatttaacgtgctgactttgactggcacgccagttttccgctcccagcactctgctccggactatggaaattggcacaaaagccgagctggaccggattggcctggccagaagttggggacgtgggaacatgggtacgtggggcacatgtcactggtcgccggcgatgtgctggaaattgggaaaacaaaccatttcgcaatttcacaactcgtcagagatgggggagatgtgaacggcgctgattaggcgacgtaacacagtgattagcagagctcgggaatttccggatttataaagggaatagcagagggattgcataatggatggtgcatagccagtaaatatctcatcccctcacacattttccatttgcagtgcccacggccaccattctgggaggacccgatctgtatgtggacaagggcagcaccataaatctcacttgcatcatcaagttcagcccggagccaccgacccatatcttctggtatcatcaggataaggtaaatatctcttaaaatcaatttactaaaagtaaccaaaaaaaaaaaaaaaaagcaaacaaaaattaagcggccgcggggccatagcaatttaaggttttcctttttggtgccaaattatcgtgcaataattgagtttgtgcgcagtaaaaagcgcaaaagtggggggcgcgaggaggtaaggataaagggcggggccatgcccagccaattgctgcaggataaacgtttttaacttttatgagctctgggctggcgcctctccaatgcgagtgtgcaagtgtgtgagtgtgagtctgttcgcgtttgcttacgcgtcgtatacgcaatgtatttaattttggcttttatgattatgagaaaacatgcttttgcatttagctcagcactcaaaagagcttttggcttctccaacgaggggaaatcgcatttaatatgacaaacacaccaacgatatattttttctacctttaggtgctcagcgaggaaacttcgggcggccgactgaaattcaagaccatcaagtcggaggagaccaaatccattttgctcatttacgatgcggatctcctgcactctggcaaatactcatgctatccttcgaacacggagatagccagcatacgcgtccatgtccttcagggtgagtttcgtttccactgtttctttcgcccgctatcaggctctctctttaaggccttaattggatgcttgagtttgataatgtgaattatacattcatgcatctgcttgacctcgatttgtatgcattaaacttgcatctcgttctctctttgtttggccaacttttgcgcaatttatgatctagtggccacaacagatattacaccttgaaaaatagagacatccaaggaagtttcttaaagaaccaaaactttaattttctgtcactcaactagacataccattcatctattttattatgacataatctgagatgatctgaaaatgtctttataatattttcttaaacttcagaatattttagatcttacgaatgttttatcatattcttttcttgttgaacatccagttttgtttttaaaataaaatagtttcagaatatattttcttcataatacaatgaaaacttaatgaatttagaatcgctcccgtttcgtgcaaatttaatgctaaatgttgacctctttgtaatgcagacaagctacaaattgttgctcattcagcgcaagttttgtgcctctctctctctccacgaatctgtccattctgctccactaaacattttccattttccattccccattttccatttcccgcacaggcgagcgacccgaggcgatgcaaacgaacgcggcaccggccgctgttgccctggcctgttggtcctgtcactttggccaggccacgcaggcggtcagggtaattagcacaatggtggcggcacttgtattgttggaggcctgctcctcgctgctcctgcagagtggtggcggaggtggatgtcctggaggaggatcgcccgcaggaggaatgcccactcgagtcagggagatacgggaaaaaccgctcacaaattccctgcttgaccccaagataccctcgacgacgtccgcggagcgtgtcaataatggcagcaggaatgcacggtgataaattaatgtcgcccagttggaattccaccgccaatgcagcccccgagtgcagctgaaatgatttatactccaagttacaggagcatcgggagccgaagcaggagcagcagcatctgaggtccttccactcgagctgcatgtaatacctatctgaaaaatcaactaattatgctaatgatggaaggagccgcgacgctgctcctggaactgctcctcctgctcggtggcaagttgtaagtaagcgtgtttctaattaagtgggctggggattagttagttaggcggaaatcggagccatgtacataaacttctcacgtaaattgccagcacactagcgaaactagctaaatggaaagcatttcgaacgaatcatcaaattagagaactatattcaagtggtttgcttgtagagccatggctagaagtttaaataaataataaagtaaatggagggcaggggcgttttggagctagtagagatttaaaaacagtcattaaagtgtctatgacctaaggtatcgcataatttgttctatagctataaggcaaatgaaacataatttgtatatagtgtagcacttgacttctgtttttgaatatcttcggatttctgaagtacccccattagtaacataagtatatacatacctagcgaaagtttactcagatcgttgtaaatactattgggattcgttcttgatttatctgtgtgttgcccttgggttaccctgtatagcctagagtttaagcaatgtacatacttagagatacaaagtagctaactgtttcgacacgaacttcttcgaaggttcctaaacaaatttttttaacaactttacatgtcccatggtctccctcaataatctatgggaactcggagaatgcatgagaaattcctgccaaaaaacccgcttcggtttgaagtgcgactttccgggctggcaatttatttagaagaatttcgaatttctccaagtcatgtgggcagttcctgttcc

SEQ ID NO: 33944 - DNA, 696 bp, DROSOPHILA
atggaaattggcacaaaagccgagctggaccggattggcctggccagaagttggggacgtgggaacatggtgcccacggccaccattctgggaggacccgatctgtatgtggacaagggcagcaccataaatctcacttgcatcatcaagttcagcccggagccaccgacccatatcttctggtatcatcaggataaggtgctcagcgaggaaacttcgggcggccgactgaaattcaagaccatcaagtcggaggagaccaaatccattttgctcatttacgatgcggatctcctgcactctggcaaatactcatgctatccttcgaacacggagatagccagcatacgcgtccatgtccttcagggcgagcgacccgaggcgatgcaaacgaacgcggcaccggccgctgttgccctggcctgttggtcctgtcactttggccaggccacgcaggcggtcagggtaattagcacaatggtggcggcacttgtattgttggaggcctgctcctcgctgctcctgcagagtggtggcggaggtggatgtcctggaggaggatcgcccgcaggaggaatgcccactcgagtcagggagatacgggaaaaaccgctcacaaattccctgcttgaccccaagataccctcgacgacgtccgcggagcgtgtcaataatggcagcaggaatgcacggtga

SEQ ID NO: 33945 - protein, 231 aa, DROSOPHILA
MEIGTKAELDRIGLARSWGRGNMVPTATILGGPDLYVDKGSTINLTCIIKFSPEPPTHIFWYHQDKVLSEETSGGRLKFKTIKSEETKSILLIYDADLLHSGKYSCYPSNTEIASIRVHVLQGERPEAMQTNAAPAAVALACWSCHFGQATQAVRVISTMVAALVLLEACSSLLLQSGGGGGCPGGGSPAGGMPTRVREIREKPLTNSLLDPKIPSTTSAERVNNGSRNAR

SEQ ID NO: 33946 - DNA, 3988 bp, DROSOPHILA
ctaaagtgactggacagatttggttagctattggctgcactcttttgtgccgatcatcatggagctaatggttataatacttatggggaacaccatggtataaacttcacagataagcacggcgagccaaaagacttacttccaaacggcaattaaagcggttcccatacatctttgataagattcgggcctcatatatgtttgctggactttatatagatcaaataaaccctatttagaatgggaactagttcaagtttcaagattgtgaatccgaaattaattcaatttaataaatataataattacgtgctattttatatatgatttatttatcatacagaggatactttttccatttataataaaaaatagtatttaaaggcataaatattatgaaacttgtagaaatttcttaaaacttaatatttttaaacccaagaattaatgtaactcacaattggcgcatctctaacaaatcaactttcgctctttgcgtcaatagtgttcatagttgtctggctcatatacacacacacatgtgattttttgccttcatacaaattcaaatttaattaatttatttatatccagtaatcagagcgataagtaggttggcaaaaggtttcggcccactgttatcttatcgaaagtgctggccaaatcgaggtgctcgctcaataaccgctcgatgctccttcatttatcaagcggcgtctgaacagtcggttaacttgattcgtcgcgttcgcgagttggctgtccgacaagtgtgagttttgctttttagccaaatagcactgtgaccacaaagtgcaaaaataatgacatactcaagaagacaaacaagccagcagcggttccaatgaaaaagtctcgagtaaacaatcaacaaatcaactggacaaataattaaaaaacggaaacgtcgccaaaaattgttaagtccctaggcttttattgcgttacgcgttgttgttgtgattaaagtaaaatgccaatgctgcctacaattgaggaggaggccaagttgtcctggatccggctaatgtggaaataccgccttcagttccagtccatggcctcgggtaaaagtgaagaaaaccctagagtatccagttctttaaccttcattttcaatcaccaacagcgtcgattgttttcgtgggctgtggaatgcgtttggcctggtcaattttcgatactcctgctggcaaattcttaaacaaccataatacccacaatctgatgatgagctggtttattggagctgccgtaggcgccctattggcagccctatttgttcagcgtgtcaccaaaaatgtggcatatgtaagtagttttataacttcctataaatcacaacctacactgtccgctgccaatcaacatctccacccagttttgcccttttctatgccaccaataattgattctgcgaccattagcacacttaaccattaggggcttatcaatccaataaactgataacgcgatcaaccgcgttcaacctgcattggtcattaagtggcgatagtcactgggcggtgagcgagggctgatcgatcggttgttgggatttccgaagtgctaaatcaggttacacaaaagaataattattcgcaattaatgcgctacaaaaattggagtggtagaaaaatatttgttttgctgattatatggatgttatatataataaatcgcttttaagattcattagataatttttttttttttcaatatctaagtgttatctttttataaaattagtttttattagttttctgtttaatatcgttttgtatttgacagacctccagtggcttcctgatgattatagctggcattctgaatgtagttcttccccagcattttctggccgcctgctacagtagcgtcagtgttggtgcagcctatgggctaacccagattcaggcactggtcactggatccgaggtggcacacaaatcgattcgaggaatgctcctcagctgtgagaagatattcctgtggctgggggtatgcatgcaggtgttctacactcgcgtgtggcacaatttgaggccactggatacgcaaggatacgagatgcacattgatcagttgcatggaatggtgttggccggcctggggctgggagctgttatcctggcactagctcatcgcctggagtcaccattacttctgctgcatcaggaacgagatatggctgtgggtgagaccctgaaagctctacacggacaatccaccaccgagttggtaagattacgggaagactgcaggcaactgcacagcgctcgagattgggagcgttttgttgaggagccggaagaatcggtggccgattggagagtctgggcccgacgtatcctgccctttttcaaggtcctgctactcagatgctttgctaccctcgccgtgtccttgagctataatcgagcatttgtggtcgtcagttggcatggcctcgaatgcgatatgaactgcatgtactggctggcattcgctggccttataggcagtgtcctgggagccttcgtagtggattggcagggacgcagaaaagtgtgttccttatcacttttcctggcaggcgttgtcatcgtgatggtgggtggagtgttcgatcacttagaatctgttaagagatccttctatgacattaatttactggtcattgcccttctaatgctgctattcgaagtgatagtagctgggggcgtggctgtgcccgccctagtctacacagccgaggcctttagcatagcccacaaggcaagatgcttagctggcatcctaatcgtagagcaattgctccagttgggtctgcttttggccacctttgagcactacatcactgtttctgtgttcttttttacgatcggtgtttttagttttattgtcggcttgaccgtatttatgtttatgccagaaaccaggcaactgacactctacgagtgcctgttgaagttcaagaaagttccttaaagcgccgccgtatctctaagtgctaagtatctcttatctgtacctatctgttatctatttttaaatattatatattctattcattcgagtgattgctcgtgtgcatatcattatctttcatatactttcccttgacgttctggtaacctcatagaataagtgaacatttcaacaaactgtgtttgtatctaaatattatattgtagtatcaaaaaatttggcatttatactaagcaaaaatgaagttaatatccgataattgtgagtagtcttagtcttattaaatcctataaataatatttatttgaggcaaaagatactttgcagctaacgaatttatgtacatttctataaggttttccggcatttaaaataaacttaccatgtctggaaagaaaacctgagccttgtctctaatttattggttagtagtattattgtctataacattattaatactcatagtaataatattataattataatcaacataatttttgggttaaatgtgacgatatcagccaagcattagcgtttttgacattctacaatggatttttggtatggttcgttgccaagctaaagctttcaactgttgtaaactgtgcccaccagctttttgccataactctggaaaaactgttaccattatttgctttccaaagcttttcctgtaggccaggccaagaaaaagcattcgcattcgctgttctatgtaaacaaagcgtttttacgatttccctagccggcaaatgaaagctctttggctcattcataaaggttaacacaaccccgtctcatccttccacgcatcctggcacttttctgaatttaatgctgattttagagcggaaaaaggacgaaagacggcggagagcgaaatcgagttgattaatatggcgtgtgatgaatatgcatcggctaccaaaaagccgaaagggaaatgcgaaccagctccccagctggccatctaatgatgtggaaaattcgcttggctctt

SEQ ID NO: 33947 - DNA, 1446 bp, DROSOPHILA
atgctgcctacaattgaggaggaggccaagttgtcctggatccggctaatgtggaaataccgccttcagttccagtccatggcctcggcgtcgattgttttcgtgggctgtggaatgcgtttggcctggtcaattttcgatactcctgctggcaaattcttaaacaaccataatacccacaatctgatgatgagctggtttattggagctgccgtaggcgccctattggcagccctatttgttcagcgtgtcaccaaaaatgtggcatatacctccagtggcttcctgatgattatagctggcattctgaatgtagttcttccccagcattttctggccgcctgctacagtagcgtcagtgttggtgcagcctatgggctaacccagattcaggcactggtcactggatccgaggtggcacacaaatcgattcgaggaatgctcctcagctgtgagaagatattcctgtggctgggggtatgcatgcaggtgttctacactcgcgtgtggcacaatttgaggccactggatacgcaaggatacgagatgcacattgatcagttgcatggaatggtgttggccggcctggggctgggagctgttatcctggcactagctcatcgcctggagtcaccattacttctgctgcatcaggaacgagatatggctgtgggtgagaccctgaaagctctacacggacaatccaccaccgagttggtaagattacgggaagactgcaggcaactgcacagcgctcgagattgggagcgttttgttgaggagccggaagaatcggtggccgattggagagtctgggcccgacgtatcctgccctttttcaaggtcctgctactcagatgctttgctaccctcgccgtgtccttgagctataatcgagcatttgtggtcgtcagttggcatggcctcgaatgcgatatgaactgcatgtactggctggcattcgctggccttataggcagtgtcctgggagccttcgtagtggattggcagggacgcagaaaagtgtgttccttatcacttttcctggcaggcgttgtcatcgtgatggtgggtggagtgttcgatcacttagaatctgttaagagatccttctatgacattaatttactggtcattgcccttctaatgctgctattcgaagtgatagtagctgggggcgtggctgtgcccgccctagtctacacagccgaggcctttagcatagcccacaaggcaagatgcttagctggcatcctaatcgtagagcaattgctccagttgggtctgcttttggccacctttgagcactacatcactgtttctgtgttcttttttacgatcggtgtttttagttttattgtcggcttgaccgtatttatgtttatgccagaaaccaggcaactgacactctacgagtgcctgttgaagttcaagaaagttccttaa

SEQ ID NO: 33948 - protein, 481 aa, DROSOPHILA
MLPTIEEEAKLSWIRLMWKYRLQFQSMASASIVFVGCGMRLAWSIFDTPAGKFLNNHNTHNLMMSWFIGAAVGALLAALFVQRVTKNVAYTSSGFLMIIAGILNVVLPQHFLAACYSSVSVGAAYGLTQIQALVTGSEVAHKSIRGMLLSCEKIFLWLGVCMQVFYTRVWHNLRPLDTQGYEMHIDQLHGMVLAGLGLGAVILALAHRLESPLLLLHQERDMAVGETLKALHGQSTTELVRLREDCRQLHSARDWERFVEEPEESVADWRVWARRILPFFKVLLLRCFATLAVSLSYNRAFVVVSWHGLECDMNCMYWLAFAGLIGSVLGAFVVDWQGRRKVCSLSLFLAGVVIVMVGGVFDHLESVKRSFYDINLLVIALLMLLFEVIVAGGVAVPALVYTAEAFSIAHKARCLAGILIVEQLLQLGLLLATFEHYITVSVFFFTIGVFSFIVGLTVFMFMPETRQLTLYECLLKFKKVP

SEQ ID NO: 33949 - DNA, 2306 bp, DROSOPHILA
taacttttgctgacacccgggggcgtatgagcaacgaagtttgctctggggcattgaagttttctgatttggaagtcagcttttctaagttgggaatgacatatgtcattgttaagcgcaacgaaatattgctgatgagggcaattagaatggtcggaaaataagtaaaatgtagtatttatatttatgtttgtagagaaatctttggttgtactttatctgtatttacaactaaattaagttaaatgtacttaatcagttctgttgttgacgtccgaaataatagcccaaggcgattatcaagttgataatatcaactacattttgtacaatgaaaactaaccaagacattatgtaataaaatgtttacttctaaaacgattaaataaacttaattttctcgagtagctgagatgaacgaacttcaagtggtcaattttgagggactgtaaaataacaataagctttaattacctcctcgtgatgataccaaaagatgtaggccggcggttcggggctgaactttacagtgcaagtgagatttatggtgctgcctttatccacgtgaaggtcaggacctcccaggatggtggccgttggcactgggtgaggcaccgagaaagatagagaaaggcaagcaaaagtaagtgcatggagaaaaaaaaatatatatagggatgaaaggtggccgctgcgcgttggctggcactgtagaataataaagtacgagataaaatggaattattgtcgtataaaaaccaggtcctcgaagtcccttcgacgtgggactttgcctttccttggccgtgcgtgttgctcactcgtttgctgtgtgtaatttatttgttcagcaacttcgtttttctctgcaattcggcggggtgtgctcatttcattcccattttttcttgtttttacgctgtttttttctgtattttgtcatcagccgttcagcgagtgctctttgttatttgtgacgacgacaaatggtggattttttatgaagcccgtgtgcccgaaaccaaatcggcaccggaatcccgatcccgtttccaatccaaaggacacctcttcaactgctcaactcacccacgacattcaggcgaacgaaatagctgcgcactggctgcgtcgatatctggcactcatacatgccggcgtcccgtttctgggcccactttatctgcagtgtccagtcctccgtgtcctggtgatgggtcgcctggaatcgctggtcgctggtgtaggtgtacgagccgaccgtcagtatgtggatgtctcgatgccggatccaggacacctgtaaaataccagagaaacaatcgtaaatatttgcaatctctcgctaaatcaaaaggattgctcctggtggtgcgggggttcaaaatacggttaatccacctaatggagtacagacattgctgaacaatgttgcgaaatttatgactcgcggttgtgcaggcaaaagtaaataactttctttatagacaaatatgaagagtacaacattcattaggttttaattcaaacatttgcagcatctctatttattccagcagtttttctccttgaaggccttttgaagaatcacttttaagcaattcaacttacattcaattagccgagctgcacccaaaacgatatcattattttaaaacccgtaaaatcgcgtcatttgtctgctccttgagcaagcgtctggcccattaaaaatgcagcaattgaaaacgaattgccgacgcagtgccatcaaaatcgaataaaacacccagctagaagaagcttaaggatccaaattcgtcccgaaaggatgggcgatgaaaaagttttgcatctttttcggctgggcgtacgtgacgtatgagcgacgtgtgacgagcggctgcttgaatttccggcgggtttttgaatggcatatagagggaaatccacgaatctcggcggattctctagagaaaccactgcggctgccattgctctggtcgtgctcgagctgttttggctttgcttaattatcacaaactttttaagtagtttgcggtgcacagagataactttgtaagctggcagggcggcggcttatataaacttattaagtcaaatgtaaatgcaaaattatcgcacttgacagccgagtacccacatgcaccgtcacacgtaaatgtgtatggtgctttctcgcagtgaaaagatggcatgcgtgcgtttaattatacgcaatgttgttgcatactttcgagggccgccttcaacaattccgttttcggtttaaggatggcatgcagttatcctgtcgttttctgttt

SEQ ID NO: 33950 - DNA, 306 bp, DROSOPHILA
atgaagcccgtgtgcccgaaaccaaatcggcaccggaatcccgatcccgtttccaatccaaaggacacctcttcaactgctcaactcacccacgacattcaggcgaacgaaatagctgcgcactggctgcgtcgatatctggcactcatacatgccggcgtcccgtttctgggcccactttatctgcagtgtccagtcctccgtgtcctggtgatgggtcgcctggaatcgctggtcgctggtgtaggtgtacgagccgaccgtcagtatgtggatgtctcgatgccggatccaggacacctgtaa

SEQ ID NO: 33951 - protein, 101 aa, DROSOPHILA
MKPVCPKPNRHRNPDPVSNPKDTSSTAQLTHDIQANEIAAHWLRRYLALIHAGVPFLGPLYLQCPVLRVLVMGRLESLVAGVGVRADRQYVDVSMPDPGHL

SEQ ID NO: 33952 - DNA, 2464 bp, DROSOPHILA
catccgcatccgcactcgcatccgcatctccatttcactgctggctgccagcgggatccacttcctggtggcgcatttgtgtcaagtgctcgcgagcgtgttgaaagtttgttggtttttggcatcgcattttccctttggcagcctggcgaaaatgagaattgggcgggcatctatatggaaatttctctttttccacaggataataaagcatcgcctggggcatagagacgtgtgtctctcattcattaatcgcccgcctcatctgccaactgcctaattattcataaacctatctggagggcatattaaaaatgttgaccctttgccgtcaccttttgacaattatatacatttcattaaacacattttccaaaggctgtcagctggccaaattaaatgaaatgaaaaaacgtttagaatgcacatgaatacaaatatctgcgcaattttttgtgccgcctgaatgtgacagcaggaaacactgaagatcaagctccagcagcagcaggttgcccccggccgacctttgtcttgtgaccccgcaccattgtggaggagtggagcaattaaagcagataaacaaagaaagcaattgcgaaacaacaacagaacaaaaatcggggaggtaaaaaatgaaattgctaaattttcgaagagacaaaaaagcaaacttgaaaccatcttaaaagccgccttaccgcaaaacgcaaacagaatgcggggcgtgctgtgaggttaaggaactaattaaaaatttcaccgtcatgctaggggaattacattttggtctacgcgtcgtcgaccagtttttaggcaatcggccaagaaatcaacgcaagaggcggtcgcataaaaaaaataaaaattattccgcgcatggagacaaaacacaagttggcccaaaactttaatggccacgaagactcgttgtcgtcacgcacgacaacaaacttttcgacacgagttcgctgttagccccgaaagacccacatcggaatcagtcagattcaggtgcacacttaaagaaataattaaggatcgcaaagattgttccaatttggcttttcattttgaaaacaaaattgatttcgcaaaaaaataaagtttataaattttaaaaagtttacttcttaatattaacaatgtgttttgatcttttatcaaaacctcgaaatatgattgcacacttttcgaccagtgcatctttaagtcgaaactcaccgttttgttggccaaattgcgcacacggcagctgagataggcggacttgcccatgagggcggtgacattgcgcggcgtcgagggatcgaagtagggctccatccacttgggatgcgtgtaggcggcggtgggcgcggtgggcaggaggagggccgcctggccgggtgtgggcgtggttgtcagcaggtcatccagcgaattgtagccctctatgggtccctgaacaccgccgtttgtcatgtctgaaaatggttggcaaaaaaacggcaaagtgagaagtgaatttcggtgtgaaaaagtcaaaagctgcaaatagacacaaatgctaaagctaaaccccaacccccatggtacgcgtatgcaaatgtgaaccttttatctatgtgcggttcaccacgaaaatattaaaaaaaaaacccaaagtgcatctgttggcaagaaatttgcgcagcatgccagtcgcacacaaaatgacatttacattcattcagtcactcggattcgccccaaaaaaccccaacacgctgagtaacacactcttttcggatgcactcgtcatggggtcagaggtcgcattcgagtaccgccctaactttgctcattaaacgcgctctgtagctcaactctgtggtctaaaggtgagctcaagtggcctagagccatagtattaggccgtgaccatttactcgcaatttgaatgatgaccaagagtcctggtcaaatgtatttttaaagccaaacagttgcagggaaatgaattgcaatgcacagtgacaagaaggtactttataaatgactaaacaaaagcataaagaatatttcatatcacgtttgatttaaaattatattacacctcgtataactaaagttctaagtatcgaaagagctgtcccaaagtacgcaactcttaaatgtatctaaactgattatgaatgatttttatcatcataagtattagatatgaaaaaatcacattttgtggctgtcatgttttccaaaatgtaagtcactgtacgagtctacaactggggctcattgctcctgctcttcgcaactagatgtggaaaatggtgaagggactgggagaaagtagtgtgaagaaagggggtttgtggtaggggggcaaccttcgagcgagtgaagtgtttgcggttggcaagtacaagtgcacacacacacacatgttgccagcggaattgtgtcactgctcacacacgcacacacactaacacagatggca

SEQ ID NO: 33953 - DNA, 261 bp, DROSOPHILA
atgacaaacggcggtgttcagggacccatagagggctacaattcgctggatgacctgctgacaaccacgcccacacccggccaggcggccctcctcctgcccaccgcgcccaccgccgcctacacgcatcccaagtggatggagccctacttcgatccctcgacgccgcgcaatgtcaccgccctcatgggcaagtccgcctatctcagctgccgtgtgcgcaatttggccaacaaaacgtgtgcacctgaatctgactga

SEQ ID NO: 33954 - protein, 86 aa, DROSOPHILA
MTNGGVQGPIEGYNSLDDLLTTTPTPGQAALLLPTAPTAAYTHPKWMEPYFDPSTPRNVTALMGKSAYLSCRVRNLANKTCAPESD

SEQ ID NO: 33955 - DNA, 5655 bp, DROSOPHILA
taaaaatattttatcattttaagtagtaagatataatttttgctcaggctttaagattacccaagcctttatctggtgttttcaaaaattaaattactttcgactgcatttcggaagtcatgaatgcggcctggaccttgtttgttcgtaattattaaatggcaatatgcagcagcaggagacaggtggcaaagtgaaagttagcaagtgggtcgttgggcaggttttaagatggctctgaccccagtggcagcgaattttcagtggaacagtgggtcgaggtgaactaaacatggctgagctgcctcgattaggtctgccggcgattatggccatcataataaatcatcattatggcgaaagttcattaggcagcagcagcagtgcagccagtgtttccgtgaccgataatagccggctccgggcggtgcttttgattttcatgttcatcattataaaattatcatggccaggataatacaattaaatggccggcacaatggcccgatggtcgcagctgattagtaagtgggcaggacaaacgactcctgtcacgttcgatgaatatcaaactgaaatcacgtcgaaatttccaattacacatgcccacaggcggccactcaaccgacgaaccaaatgggcaaggagtcccgtccttacaaacttggccaaatctatacatatttaaggatacccaaagttcctaaagtaccttcattccgtttacttttcactagtttgtgcattaattatttgcgtacgattgtaaatgtgactaatctattatagatgaactagaaatattatttcaaagtaattctgttttagcacagaaaaggaaatattaaaatgaaagcttgaactattcaactttttgtctgcattttctagatggtttgttttaaaattctcagtgaactctttaattagaaagctgacactttcctccccaaattcaccaggactaaatatacatgtttatatttaggactcgaaggattcactcaccgccagaatttttgcgggccatgtcctcggcactggacgtcttgcgttgatcaatacgcaagttgggaatattgaagggtggcgcattcatgttgtccgtggagaactgatgacgtagggtgcggtggcgttccggcgaggccatcgacaggttgtccagcttcaacttgttcctctgctgccgatcgatggcctctagcatttgctgcagcacctgttggcccaagaacatcattagttggttagttcacatcttcaggtgaaataactacccttggtgtacttacctccagcaggtagcaatattgctcgaaattaagtgaaggattcaccgtgtgcggaatgagcaggggcagcacattggtggccatcgtctccacggtcagtccgtaggttttgtccacaaacagtttatggtagatgcctgagaaattttattaccaaaagcttattactcggcattatattactggcattactacggctttcaattgtgatagtacatcaaattatatagtatataagagcttaaggattatagtccaggattatgcagctcaaaaataaaatatacatatcccaaaagcagctaagtacctagatttaaatcttataaattgaaatacttaatactgcaataaaatttaagtgattttataaatattaagaaaacattgccaagctattaactcacatcgccttttaattcaaaaatagtatttaaagctcaagctcaatttattacttaagaagcagctctaggtcatttttaatcaatcttaattaattggaaaatctcagttttcccccaaagtcacacacaaagtcattgcaatgaaattatttgtcgcactaaattagtaagtaattaaatccggtagtttatgaaataaagccaagcatctgttaacaattaggctccccctttttccatacaactaaatcaaattgtcagcttgtggaaaattcgatccaaagtaaacctctgtgggcaatttgtatttatccatgctagcatgcagataaactcgtgtaaatctatattgttcgctgtgggccaaggagaaaattgtgtttcatgcactttaattagttttcgatactggaataaaaaaaaatcaaaacaacaaaacccaaagtgtgtgcagcttctggtggcattgttgttcaacttacgcacagtacgcatgataatatcgggatcgggaatgcgaatgttcgccagcagcggcagaacctcatccatgacctgccacagagatatgagaagaagatatatgagatgatatatgggattctagagtacccacctgtgcccgctccatgcggtccatgacccgttcgatgcacatcagcacgttctgcacaatcttcggatcggttatgttcttctcgaacacctgcttcaccttgggcagcaccatgcggcgaatggagagctcatcgatgctatcaaacacattggccacggctaccacggcggcgctctaggatcggaatgttaaattaaataattttttttatagaatttaagagtcagaaatataccctaaaattataaaatatgaaagcatttaaattatgcttttttttagtacctaaacgaaaagcataatatttttcccctagaagtgctgacttttctgtgtgtgcccaacatttttttccccatttattgaattttaatttcgtttcaccccgcgacgaacgtttgcggaaagaaaatgcaaattcacttgctcgggcacttttgtgctctgagtcagcttctgagtcgcagttaattaagaaattgctgccgtaattacacaatcagctccgtcaaacccatttccattttccagtcccgaagtgatttgcatagccgagtggagcagcactcacctgcacttgtatcgtggatccgtcgaaggagtagaacaacatgggcattatatctgtggtgacatcctccggtttcgtcttctcgataatcaaatgcaaattctcaagtattgtaacgctggcctgaatggatttcggtgtattgtagatgactctgggatatatcacagatttgattagtgtgaaaattactaaggataagagtgcgtgtgaaaggttactttttttctttcttctgtatggaccgggtgtcaataagcgtcttgcaagtggccacaaagtttgtcgccaactttcggcaaagtagtgaactctttggtgcgggcttttgtgtgctctactaatttatgcatggttcaccaccaaaggtgagcacttcgggcgcccaacctccctgccacgcccccttggctaggaggaccctgggaaagtttcgcagtcaagctctataaattacaatacgaactgtcgcctgtcgcagtgggcgcaataaaacgtcatgaaaattgaataacataaaaaagaagtgtcgcgaaagtttttcaattgttcaaacacaaaagttctcatcgctagacaagaacagaagggattccagatgaaaaatgacacgattgagaaacttttttagccggactgtctttagtaatatccataatattgaatagaaaatattgaatattgaatatatatatccaagaaagtgtatagtttaattggtaactttctaaatgactgattattattttcatatttttattcatttcgctttgaactgcagattatgctaacatattacttatgcttgttttattttaatacaacctttgccattgaatttgtttaaataaacacaaaactataaatacctacgcgtatatttaaattaatttctgtttgtgtctattcactgcagcctttaattccctgtttgcaataaatgaattataaataaagtcccgtctgaccagtatatttattttgcagagcctcttccggtgcgataaatactcaaagctggctttttatttgtggcccgacagtggggcattcaataccattgttctcgttcaccaataggctataaataagactacttacttcatggtggccgacataagggtgtcgtattccgtaagcgtggcttcctggacaaatagcatgaccggctgcagaactgcggcaaggacctcgttattgttgatctcggacttgagcatgggccagatgttctgccaccagagtttctatagacataaaccaaaaattggaggagaaatgcgtgaaagtcattaaccagtctatgtcatttcaattgccaatgctaaagcatcattaaacggcatcagacaatggcaatggacagcaaaaaaaaataagaatggaaaaactgacagactccttccgtttctaactcaacagaaaacaaaggacagtcgcaacatttttgcaaccgacataaaacggctcgtaattcacaaattgtttggccgtaaagcgctcaacttgacgccattaatgattaatgtgctgccagtttgttgggccaaaaatgttcgtccaacgtggctgcatccgtttccggtggacaaaattgctcaaggaactaaggcacttacacgtggtatcatcggcatggcctcgatcaaggtggtcttgtagaattgggacttctgctgcgtgtccttcatgttgaccacgtccaggaatttcaaagcgtttatgggcgtatcgctgaggaacaaaaaagaatacgacaacattaatttcaatggcaacaaattaaatttccttatgtccatacttttttattatgaaaatatataaatacgaaaatgttgtgtaattgctttaagtgcttaattgtggcccggattagttggtaaatggcatcaattaaacattaagctgcaagcaacaccgagtggaaacaccacaggaaaacccgcaaaaaatatgccaaaggcaatatttatctctgcgccactgaaattaaaatattaagtacccacaaaacgacggactgccgccaccaacattctaaaatgaaattctaaatacttttcattgttatgtaaatcaaattgctgaaatttaattggcaaaaagtgtttactttcgacccgcatcggtaagcattttgaatgccgccgggtttatcaggcagcaaacagatgaatgccgtaaaatttcaacaaatcgcaaataaatgcgagctatgcgacgctgtttatagtttcgctcggttaaacaatgaaatcaagtcacattgcgtatacgcagcgtggaccagttgatttcgctacccttgtcgactcaatcggggcaatcgaccaagtggaaaaaccccattttaaatcacctacttgagcttaaatggaggaaagttagcttgccactgattgccaagacactcgagccatttgcatacgctgctaaaaacgcagaaaatgttgacaacatttaaattaacttcaaagtgctgccaccaacctgactgactaactgactggatgactaacaacgacaaaggaggcggcacgcggctaaggatgagatgtcgagatggctgagattctaatgccggtggtgcttttccggtggagcaggcaaaactgatggagcaccatgctgttgcttcactgctccacgctgacagcgcgtttagatgcgtagatggtagcagggggtatatgggttcacagacagtaattaagacaagtaattaataaacaaaatgtactttgtcaaaaccactaagta

SEQ ID NO: 33956 - DNA, 1053 bp, DROSOPHILA
atgttgtcgtattcttttttgttcctcagcgatacgcccataaacgctttgaaattcctggacgtggtcaacatgaaggacacgcagcagaagtcccaattctacaagaccaccttgatcgaggccatgccgatgataccacgtaaactctggtggcagaacatctggcccatgctcaagtccgagatcaacaataacgaggtccttgccgcagttctgcagccggtcatgctatttgtccaggaagccacgcttacggaatacgacacccttatgtcggccaccatgaaagtcatctacaatacaccgaaatccattcaggccagcgttacaatacttgagaatttgcatttgattatcgagaagacgaaaccggaggatgtcaccacagatataatgcccatgttgttctactccttcgacggatccacgatacaagtgcagagcgccgccgtggtagccgtggccaatgtgtttgatagcatcgatgagctctccattcgccgcatggtgctgcccaaggtgaagcaggtgttcgagaagaacataaccgatccgaagattgtgcagaacgtgctgatgtgcatcgaacgggtcatggaccgcatggagcgggcacaggtcatggatgaggttctgccgctgctggcgaacattcgcattcccgatcccgatattatcatgcgtactgtgcgcatctaccataaactgtttgtggacaaaacctacggactgaccgtggagacgatggccaccaatgtgctgcccctgctcattccgcacacggtgaatccttcacttaatttcgagcaatattgctacctgctggaggtgctgcagcaaatgctagaggccatcgatcggcagcagaggaacaagttgaagctggacaacctgtcgatggcctcgccggaacgccaccgcaccctacgtcatcagttctccacggacaacatgaatgcgccacccttcaatattcccaacttgcgtattgatcaacgcaagacgtccagtgccgaggacatggcccgcaaaaattctggcggtgagtga

SEQ ID NO: 33957 - protein, 350 aa, DROSOPHILA
MLSYSFLFLSDTPINALKFLDVVNMKDTQQKSQFYKTTLIEAMPMIPRKLWWQNIWPMLKSEINNNEVLAAVLQPVMLFVQEATLTEYDTLMSATMKVIYNTPKSIQASVTILENLHLIIEKTKPEDVTTDIMPMLFYSFDGSTIQVQSAAVVAVANVFDSIDELSIRRMVLPKVKQVFEKNITDPKIVQNVLMCIERVMDRMERAQVMDEVLPLLANIRIPDPDIIMRTVRIYHKLFVDKTYGLTVETMATNVLPLLIPHTVNPSLNFEQYCYLLEVLQQMLEAIDRQQRNKLKLDNLSMASPERHRTLRHQFSTDNMNAPPFNIPNLRIDQRKTSSAEDMARKNSGGE

SEQ ID NO: 33958 - DNA, 7333 bp, DROSOPHILA
cacttcagtcgccacctctccattgccattgccatcgccattgccatcgtctttggctttgtttgtctaaacgcggcacgtcgccattccccctttttcagatctcaatgggaggcagggcaacgcaacagctgctgtcgtcataaatcccagagtcagtcagcttgggttggaggagcagtgccactccagctcgactaccacagcacaatcagctgaaaagcagcgacgtcttacactcagagaaaaaatcgccacactaacgcaataaataagatatattatgatagaagacaatagagttatggctttgaaaataatatataacatcatcctaacatcctaacatcataatattaaattaatttacgcgaattcttcagcttttgaaaataatccataataagtgtgaagtgctgatatttctgcctgtgttgtgacatttaataaacggttgtggggtcacagagcacatttaatttaccttgattatgttttcgctcttgtattattatttaccaaaaggatctcgaatctagcagttcaactttttatttacaattttacaaacaatttttcccagtgcccagctaccattcgctttgcattgtgtatgtctttcaggtctgattaccgctctcatttggcaaacagatgtaattaaagtgtgcgtgtgttggtggaggaaaggcggtaggacgcaggatgaatggttgactgggatgaaaaaaaaaaaaaatgaaaccttcaattgaatttcagctacgggtacaaattggcttagagattgcgtgtcgctggggtttagtaagtgtgtgtgtgtgtgtgtgtggatgtgtgctcccaacaggtgtcaatttcatttcaaacataaacagaaagcgaaagggaaacaacttaggcaaaagcaactttcaacgcaactgggcaaattggcacacagtttgtagcgcttcctgttgctttgccatcttagctggaacttatttaatttggccactcacatgaagtacttgatgagctgcagcagttgggcggtgggcctggcggttgcatcccgactggccatgcgcgaagtggcctcctgcagggcaattggcagtctgggcatcaacttgtggaccagatcatccagctgaaacgcgggtggggggaaatggtgccaaaaactcttcataagcataaacgaaacaaactttgccacaacattggaaaccacttggggactttcgaaagctacatccaaatgcccaggacaggacgaaaagttttaatgactagcgcccgcgggataactgctgctgctgctgcttctactgaatcctgttactcttgctgctgctccgtcacctgtccgcacaagtggcaaaataattagagtttcaagtggactttttgattacatttgcatttgacaaagctgcgaatctaattacagcgcgcaaacaagcccatccaagcgttttgcgttcggctcaaaaacttttcatccatccaattggcacttgtcgctgcccccttgaaagttaccaagctgttcccccaagtccatcgcatcccgggcattcagaaattagaaattgtttacccaccgtttccatttgcttggcatagttggaggtggagttaccggcctgaatcagtggccttccgttattgaagaccgcacagatcaccattcccagcgagaacatgtcgctgagcaagctgcacttggacgttgactgagtttcgggagctagtcgggatgaatttaggaaaaaaatagggattcaagttagtaacaaattatttggtaattattagtttagaatgtagttatgaacattatctagactaacagtttcatagccaatttcaaacaaataaaacttgagtatacatcgatattgtttgacccgaattccctgctgacattaactggcttcttcagaattaaaaggccaaaggatatgggcaatctgtatctactcacccataaagtcaagattcggctgggccatcttggacacccgattgctccatggcggacacggaatggagctgttcaaatcgttctcattcattctctctgcaatccgaatatgtgaatatgaatacaaattgctgacctggccaatccatttcaattttggactactaagccaagactgcactcacccacatattccatgccggccagtttccagataccgcgcttggttattagtatagaagatggacacacattgcgatgaattacgtgaccggaatagtgcagatacgccagtgcctcggtcagctggaaaatgggaaatagaagaatgaacggtagcaaatcgcctgggtcacgccatctggcccgagcaacagcaaggtgccactcacctggagaaagccgtacttcagctccatgtccaagaaattgtattccttggcatgggccggtcgctggggcaaggtgttcgccgccgcctgcgcctgggacgcagctgctccacccgccgccggcgccacattggtcgcctcatacgttttcgactcctgcacgataagaaatttgcgtttcagggtttttttttaaataatttaaaaataaataatgcacaggtgcttattgttatcttttgtaatgtattctttatatacatacattactgtactgaattgactcattattattttaggcaagtagattaattataaacattattaacttctaatcttaaaacaacagaatacataaaatacataattcccttgccttggcaataatagctagcatatttaaacatataagtttataaataaagtcataattgactaaacttgttaatcgccttttcagatttatgtgtaccttgcggacaggtaatataaatttagggccaaatcctggaatgagctggtcggatgtccctaaatttttttcaccctcagcttggatggcaaactactttcagctcaggacctttaaattcccattcaaaggcattgcattcgttgataagccattcaaatctctcgtgtttctgttgctttgcacgaccctggctttttgtttttttcaatggattttcccttaccaatttttcgattgttttgtctgtgcatgtgagtgctttgagctttacctttttgcaattttcaatgtaatttaactcgaatcgactttcatggaaactaaaaactattcaagaggttctgttctttcggttattgttgagctgtttatgtgggtataaggaaggtctgttgttgtttcgacatggttctaagcaggagaggtacagtgcgtttcaatactgtaaagggttaaagggatatataaacaaaagaaaatagtaaaacattttttttctcttccaacattcagaatatccagctacaaaccagtttagtaagtttaacgcttaactttttgcttataccaaaattaatttgagttgagcaactaatataatccaataacgtggcttaaaccacctttaagttgtggcacgcaccgtgtgtgtgtgggtgagtgtgtgtgtgcgggagtatgcgtatcaatttccgagctgtgcagaccagctgaagctctttattgactcaatcttggcagcgtaaactttcccacatgcacacatccacatccacaatcacaccactcacacacagactggcagtgtgtgtaattcgatttagttgtgtgcgtgagctggcgtttgtgtttctgtcatgcatacccatcagttgccaagttttgcactagccactagccaagagccacgccccctgcttgccatggcccgcccactgtgccattgtactcaaagtcaaactatgcacttggctggcctgcaaaaactttaacaaaacacaggagcgagcaaaatctactgcagcagcagcaacaccaaaaaaaagtgccacaatcaacccaacagtctaaacattgtttcgctctacatgggaaattctagatgaacacccagtggccgtggacttgcacggcaaaaaaaatctatgttacttatttcactccgtgtaaatatgccaaaaaaataaataatacgttatttcgatcaaactagcagaaatattacaacataatatcatattaatgttaccataattttacatatttacttcaagtcactgcatttttctaagtgtcagttaatcaactaaaatatttgtaaaaaaaataaattattgacaatcgtaatactgaaaaagtaataatttacatttaaagtgtgtcaactagtgtaaatgtgcttgtgcaaacaaaatttttttctatcaaacagtaagtttaattcgatgtcctattcatttcggtgcgaccagtaaaaagcgtaagcgggcagaaaaaaaggccgtaaccaatggaggactgaaaggcaaccaggcgacagcacaaattgcatgtccatgtcgctgtcagcaactcaaactgccaactggctacggacaacggacaacggacagcgggcaacggacaactaaaactgtggccaaaactcacgtgaaaggccaggacattcgagaggctggcgaagatgggctccgaggcgaaggccagcgtatccgcactttcctcgaccgtgtgatagatttgtagtatctgcggagcgaaagaacaaaacgtagagattggttggttggtggtgggggggggggggtggtcttagtggaaaagtaattatcgattgggggtcgccgaaggacacactcacccgcggatggcggaagcgctccagtgtcttcaccgaactctttagcagctccgttatggtctccttgcgacgcggcttgtgcagcttctccgcaattttcttctcgaatataaacaccgaacattcctgcgaaacggggatgcaattacgttaagaaaagagttgaaaggatatggcgtgtggtgttatccttgcaatgcaacgtcctgaaacttgaatcaaaaagtattggaaagtagcgagtacttttatttttctaattcgaaaaatttggcctattcgaatcaacttgcaaaattgagcattattttgttacttcataaattcaaatcatttcataaaactttaattacgttttaagatgatttgttagcaaacatttaagggcaacttcaaaggaaactagttaaagcattcctaaacgaagatttattgatttttgaaaattcccttttcaccttaaaggtaaaccaatccacatcccaattggtccaaaaatgccactggctagaaacactcaccttgttgtcgctcttgcggtacgcatcatggatgcgccacaccaattctgggccggcacaggccaccggcttgccgatttcaaagtactgcgtaatgggattgccatcggcgactgcttgagtggctgtggaggcggccacattggtgctcttgaatttggcaaacattgtgccggcgggcataccatcgattagctttgagaagacattcgagaagctaccctgtcgcttgggtcctggctggatgggagcggtgccgccaatggtgggcgccgatccacttccgcccgttggttccccgagggtggagcccgaaactgcactagcaccacctgtcgttgcacttaatcccgcaccagctgcaccagctccacctgttagctgtgatgatgatccgatgagtggtccacccgatgctgcactgatggacagtcgtccgcgattagtggtcgctatacccacgccggttgctgtgccaccggctgctattgcacctgctgtgccgcccccacccacaccctggccattaaagttggagtgccggctggaaatcaatgattgcggcggatcatagacactgaaaccattccgaataactggagatggtggtccggccaagccaccgccaacggacactttgcgctgcggcaaattgatgtcgagcaccgtgctggcgctacgttgtcgtaccgctgccacgcctcctgcacctgccacgcccacagcagtcgaacccgccacgcctcctccaccgacgtactgctgctggccactcctggccggtgaacccgttgccaccactgccgctgccaccgtacccgctcccgatcctgatcccacaccggcagataacgctcctggtccgcccggcggcgttattcccacagcgctgccactgcgaccgcgttgcacctcctcgacactatccaaacgtgagaaaattctggccgccgttgttgccgtctttgatgtctaatatgggccaggagtgctctcctccagatgtgctgctcttattagctcttcctggaaagaaaaggaaaaagccgagttaaaaaaaaacactgagaaaccgctagagtggctaatttcacgttgacatcgctcatacgccccgttgcccaggcgaccatttatccaggtacttttcagcactggcaattaatgcgcttattgcctcggcctggcttttgtgctcaatttatacactcattaacccccaaaggcagaggagagtttaaatttgctgccaactcaaggtggctgtattctattcacaattccatcgaatctactcgtaatttatttgtgacttaagtttaactgaagtgaaatatttcagccaaacttaaccaaagcatctctaattagtaaggataattattggtatatttatagacacatttcaatggcgaaaaaagtgtttttgtgggcttagatagtagactggcaatcattgaaactaaatatttatatttactaaataactttaaagagattcaaatttttgccataacatctataagctgtgtgcttgcgaaaatatttattttaattaaacgattatagctcaatgttatttttcattctattctatgcctaaaaccattctagttgcattttgcacgtacacaaatcgaagcaaacttcattgattataaaaaacttaatattatgaacatttatgtcttcaactatcaattgctaaatattctctgatggacagaacaaagtcaacataataaagtcaacagattttgcaattcgattgtatttactacaccacaagctgaccataattcgattgattgagataaaaagtgcatgttggattaacatccatttgacatatttataaaaatgagtaaatacttaattggggatatgtttattttgttaaaagtataaacatctttatcgattttatattttttttttccaaatttcttgcataattttattgtagtcagagcattccaactttggctatagtcctaaaagttctgcacaatttaagtttccactgtggtggcattcttttggctgcttcccacaaaactacacaattaaaaagttaaatgagtttggtcctggccatttattcattct

SEQ ID NO: 33959 - DNA, 1866 bp, DROSOPHILA
atgagcgatgtcaacacatcaaagacggcaacaacggcggccagaattttctcacgtttggatagtgtcgaggaggtgcaacgcggtcgcagtggcagcgctgtgggaataacgccgccgggcggaccaggagcgttatctgccggtgtgggatcaggatcgggagcgggtacggtggcagcggcagtggtggcaacgggttcaccggccaggagtggccagcagcagtacgtcggtggaggaggcgtggcgggttcgactgctgtgggcgtggcaggtgcaggaggcgtggcagcggtacgacaacgtagcgccagcacggtgctcgacatcaatttgccgcagcgcaaagtgtccgttggcggtggcttggccggaccaccatctccagttattcggaatggtttcagtgtctatgatccgccgcaatcattgatttccagccggcactccaactttaatggccagggtgtgggtgggggcggcacagcaggtgcaatagcagccggtggcacagcaaccggcgtgggtatagcgaccactaatcgcggacgactgtccatcagtgcagcatcgggtggaccactcatcggatcatcatcacagctaacaggtggagctggtgcagctggtgcgggattaagtgcaacgacaggtggtgctagtgcagtttcgggctccaccctcggggaaccaacgggcggaagtggatcggcgcccaccattggcggcaccgctcccatccagccaggacccaagcgacagggtagcttctcgaatgtcttctcaaagctaatcgatggtatgcccgccggcacaatgtttgccaaattcaagagcaccaatgtggccgcctccacagccactcaagcagtcgccgatggcaatcccattacgcagtactttgaaatcggcaagccggtggcctgtgccggcccagaattggtgtggcgcatccatgatgcgtaccgcaagagcgacaacaaggaatgttcggtgtttatattcgagaagaaaattgcggagaagctgcacaagccgcgtcgcaaggagaccataacggagctgctaaagagttcggtgaagacactggagcgcttccgccatccgcggatactacaaatctatcacacggtcgaggaaagtgcggatacgctggccttcgcctcggagcccatcttcgccagcctctcgaatgtcctggcctttcacgagtcgaaaacgtatgaggcgaccaatgtggcgccggcggcgggtggagcagctgcgtcccaggcgcaggcggcggcgaacaccttgccccagcgaccggcccatgccaaggaatacaatttcttggacatggagctgaagtacggctttctccagctgaccgaggcactggcgtatctgcactattccggtcacgtaattcatcgcaatgtgtgtccatcttctatactaataaccaagcgcggtatctggaaactggccggcatggaatatgtggagagaatgaatgagaacgatttgaacagctccattccgtgtccgccatggagcaatcgggtgtccaagatggcccagccgaatcttgactttatggctcccgaaactcagtcaacgtccaagtgcagcttgctcagcgacatgttctcgctgggaatggtgatctgtgcggtcttcaataacggaaggccactgattcaggccggtaactccacctccaactatgccaagcaaatggaaacgctggatgatctggtccacaagttgatgcccagactgccaattgccctgcaggaggccacttcgcgcatggccagtcgggatgcaaccgccaggcccaccgcccaactgctgcagctcatcaagtacttcatgtga

SEQ ID NO: 33960 - protein, 621 aa, DROSOPHILA
MSDVNTSKTATTAARIFSRLDSVEEVQRGRSGSAVGITPPGGPGALSAGVGSGSGAGTVAAAVVATGSPARSGQQQYVGGGGVAGSTAVGVAGAGGVAAVRQRSASTVLDINLPQRKVSVGGGLAGPPSPVIRNGFSVYDPPQSLISSRHSNFNGQGVGGGGTAGAIAAGGTATGVGIATTNRGRLSISAASGGPLIGSSSQLTGGAGAAGAGLSATTGGASAVSGSTLGEPTGGSGSAPTIGGTAPIQPGPKRQGSFSNVFSKLIDGMPAGTMFAKFKSTNVAASTATQAVADGNPITQYFEIGKPVACAGPELVWRIHDAYRKSDNKECSVFIFEKKIAEKLHKPRRKETITELLKSSVKTLERFRHPRILQIYHTVEESADTLAFASEPIFASLSNVLAFHESKTYEATNVAPAAGGAAASQAQAAANTLPQRPAHAKEYNFLDMELKYGFLQLTEALAYLHYSGHVIHRNVCPSSILITKRGIWKLAGMEYVERMNENDLNSSIPCPPWSNRVSKMAQPNLDFMAPETQSTSKCSLLSDMFSLGMVICAVFNNGRPLIQAGNSTSNYAKQMETLDDLVHKLMPRLPIALQEATSRMASRDATARPTAQLLQLIKYFM

SEQ ID NO: 33961 - DNA, 2679 bp, DROSOPHILA
attaaatttaaaactaaacacaagcagccaatttgcagacggaacatatgaacatttctccagcagttcagctacatacaaaaattcttcgtttcgagcaaaactaatagcaaacctagctaaatttacgaaagaaggtctccccgttgaagagcataattaggatattaaggccgtaactaactaaacactatactaaaagcgaatatttcaagggtcgccgtgcagctaccattcaagtgctaaaagtaaaaaaggaaaaccccgatctgtgttggcagtcattagttattagaccagcgaccgatcaatccacagtgcatctcatttttagaatcgtcaggatccattttaaagattgtacagtttcgttgtttaagtgtccgatttgttatccgttcgtgcctgtcctgcaagatatttcggtattcatacattacgtattcgttgatacgcttttgagttttgtgttgcctaaaatttaaccaatgcactttttctcagttctcgccaaagcggaggaaagcgttttgttgcctggcgttagaaacaatttgaagggtatgctaatagtgctaatgaaggtacatacacatacgcgcatatacaataccataaatacataattataatgcaaataaacaaagcaacatttcttgaacaacagagaacaagcaaacgctcatgcagatataaagaaaattaatttagacagcaactgctaaactgcgaaattgcatatatatatatgattaaaaggaacggtttacttttgaaatatatatatatatatacaacaacatttatatttagtacattataaattagcatacatacactgtaaataaaaagaaataaaaccacaagcaccaccaactttttggcgacaaaatgacaaggctatgaaagtagaatagagtgccttgaacttgacatcggacatcggctgggattttcgatttcgattacatttttaaagtttttaagttccttggccaagatgtcatcattggctccttgctttactgtgggctctattgtgcgctgcaagacttgttttggcgacaacatttcgggcgaggtaaaactaaatattatttattatttttatgattatgtaatgctttcaatttcccaggttgtggccttcgatctgggcgtgaaaatgctgataatgaagtgtccatcaagcaatggcggtggcgacgaacagaccacttgcaatgtgaccattgtgaacctatccctgtgcatggacattgaaatagtaaaggaagcaattccgccggctgaagttcaacagccagaaccgattgatttgcccatggtagaagcactctctatatagatatttaaaagaaaccccattcaaccatttgcaattgcagatccgagaacgataccgatacgcaaccgaacatcgtacgctctcctgccggagctatcatcccaatgcctcgccctttggtcaagctctgttcagactgttagtcaagcgattcggtgatcccgctatcatctggcagaacaaaggcgaccaagtggcgatcaatatactccgtcaggtggtcatcgatgcgccgtatgccacggagaatatccgatacctcgattggaatcccaagctggcgatatgcgtccaagaggtcgttcaaaacttttgcagtaaacaattctagaacgatggcccgtgcccatggcaacagttgtctagatagcatccgattctctgtacgttttgtttatcaacaaaacaattcaaaatacacatacatatagccatgacacccacacagaatactgctctttatctgccaggggaaaccattctcgtttgtacaaattcgatttaatacactacaccacaacacccaacacacataatacacgatggccgatgatgaagataaaccaaagaagcacacgctggacagcctgttcttggtgtattccaacttccaggtatgatgaatgacccggttaattgaagagtaattttcatctaaatgatgccaggtcatacccaccgacatcgagaacgagtactttgacagcatactcctctcgcagttggacgcctggctagagcaggccaagctcatgcccaatcccataactcgaactcagaccggtttaatatacatgcgatacaagtgagtaactacatcaaatctacatatcattcttaatcaaatacatgtttcaggaaatggcgtttggagtacgaagactttctcgaggtcctaaataacttggcatccgataacaatctggctatagatgaaatgaagcaaataatgatcgatgctggcgtcccgaatggtgctgatgtagttatagtcgtcaagtagattgaatcatcactgcattttatttatatgcatacaaaaagtcggacaacaaattattaatagtaacaattgcatacaagagtaactttgattaattcacaaaaattatagtaaaatataaaagcatccaacaaaaagagcctctaaacccgattggttaatttcagttagttaaacacttattttgacatagagggtgcctaattaaggtatgttttgagattactgatctgaaaactaaatacaaaatatatgcgtattacattttttgatgtgattcaataaattgactgatattctgaaattctgcttaagcttataaatattc

SEQ ID NO: 33962 - DNA, 561 bp, DROSOPHILA
atgtcatcattggctccttgctttactgtgggctctattgtgcgctgcaagacttgttttggcgacaacatttcgggcgaggttgtggccttcgatctgggcgtgaaaatgctgataatgaagtgtccatcaagcaatggcggtggcgacgaacagaccacttgcaatgtgaccattgtgaacctatccctgtgcatggacattgaaatagtaaaggaagcaattccgccggctgaagttcaacagccagaaccgattgatttgcccatgatccgagaacgataccgatacgcaaccgaacatcgtacgctctcctgccggagctatcatcccaatgcctcgccctttggtcaagctctgttcagactgttagtcaagcgattcggtgatcccgctatcatctggcagaacaaaggcgaccaagtggcgatcaatatactccgtcaggtggtcatcgatgcgccgtatgccacggagaatatccgatacctcgattggaatcccaagctggcgatatgcgtccaagaggtcgttcaaaacttttgcagtaaacaattctag

SEQ ID NO: 33963 - protein, 186 aa, DROSOPHILA
MSSLAPCFTVGSIVRCKTCFGDNISGEVVAFDLGVKMLIMKCPSSNGGGDEQTTCNVTIVNLSLCMDIEIVKEAIPPAEVQQPEPIDLPMIRERYRYATEHRTLSCRSYHPNASPFGQALFRLLVKRFGDPAIIWQNKGDQVAINILRQVVIDAPYATENIRYLDWNPKLAICVQEVVQNFCSKQF

SEQ ID NO: 33964 - DNA, 4044 bp, DROSOPHILA
tgccctacgataccaagctgcgctgcgatattgtcgatctgtactacgcactgtacggaactaagcgtccgaattgcttgcaggccggcgagaaccaaagcttctacaaggatttgatgaaggacaataatagcagtgtaggcagcgtaaccggcagcttcaagaagaccagtgattcaaagtcacatttgccaacaccaacgaatactttggacaatgagccacaggagcggcaaaagccggcaatggttaccatcaagcgaacggccacagaagcatttgaggtgggcgatgagattatcaagctggaacgcagcgaggagatcaccgtgctagatgaaccagttaacgtgcaggcctatgacagtgagaccaaagtgaatgccctgcaggcagatgaagaagcacgtgatacccatcaggctgccaagcgccttaagaacgaaatgtacgccgaggatgataactcatccacaatgctcgacgtgggcgactccaccagatatgagagtagccacgaggagggcaaattgaagtccggcgatggtgggctcaagaagaaaaagaagaaggagaagaagaagcataagcacaaacacaagcataggcacagcaaggacaaggacaaggacaaggacaaggagcgaaaggataaggacaagcgtgacccgcatatatcacgcctgcaggcgcgcgagacagccactccggacactctcagctcggaggacagtagcaacagcaatagcctgccgcccatgaaccttaactaagtgagggttcttgcaggtggggaaactgcaatgtttgggggatagatgacagaataaaggtataataccttagacattacatttcttaaaggggttaacattatttgttagttttattcatatgtttatttgtcggtttataatttaacattaaggaagtgtgctgaaacatttttacaatacttacaaactagacaaggacattttaactaaaacaggacatgggtttactgcaccttcgccttcgcagactccgcctccggagctgccgccttgggctcgctgcccgccacggcggtatcctgctcatcacgcggtctcctcttctgcaacgcatggacatgggccagggcatggggatgggattgaccctcgatgggttgcaaatacgtgatactaccgccgccgatgcctgtggccgtttgctgatgcagctctccggcggaaggagtggacaggatcttgaccgacggctccgagggagcggccagcgatctgtgttgctgatgtgcagccaattgccgcgtggccaggcgcatgatgtgagcgtagtctacaggcgggtgattgcggtactccggatgatccttaacgtactgctcatacggaacgggaactggcacgggcactgccttcactggatatcccgcgtccacaagagcttggaattcggcctgggtcagtggcttgccattgggaggcggcagattcaattgcttcacttcatccagagtccgtagcttctgaataggagctgtagtgggtgtgggccgggatggtgtggcaattccagttccctgggacacatagatactggactgcgatggagacggtgagggatattcagcgtgcagcggcagagcagtgggtgtcacggctagatttctctgggaatgctttagcggatccggcggactgggatagaagttggatggcggcggtggagatggcgatccctgacgttcataatcggcatagagcaatgccttagcgggtgaagccagcttgtagtgcttggatcggtggtactgcttgggaatgggactcggcttgggtgccccggtgggcgtagcctcctggtagtaatactgcgagggttgcggctgattggcctgctgtgtgggatagacgacgggtcccagtcgcttgggttccggcgtgggataaattggcgtcggttgctgatagttgctgaacttgaagagcgatggaacgaacggttggttattggcatccagcagggagttgggcgtactggccaggtatgccttgggttgcctcagcgcgggatgcgaggtgggtggtggtgggtgctgcggagcgggctgccttgtcgccacctgctcattgctgctgtcaacgtaggccaacgattgtcctggcttattggctgccagcaatttctcaatctcactttccagagaagatttcgccagtggatggttgggcagggtcttgtagcttatctgtggctggtagtaggcaatctggggtggcagtccatggatgagttgctgcccgggatgcggtatcggtttgtggagctgcacccgctgcggttgttgctgttgttgctcatcatcctcttggatttgctgcgcctgtggcaagggcagatatttgggaccaccgcggggatgcgaataagttggtgtcaccagctcctgctcggccacaaaacgctcgcgatagccgcctaatcctagcgagggatccgcctgctgcaacactttgtgagtggcagccgtgctgtggatgggcagttgcttgtggtgctgttgctgctgctgctgttggtgttgctgctgctgctgctgctgctgttgatgctgctgctgctgacgaagttgctcatgataggctctagcctgcagctcctcctccaggatcttaagaaactgctcttcgggaatcacttggtagggcttttggaaagtaggattgattagtataagagctttatagcgtcgcatttagatgacccacctgctgatgttgctgctgctgctgctggggattcaccgatcgatgctgtggagcaggcagcggcaatggcagttgatagggaccctggtactgacgtggacgtggttgctggagctggagctgttgctgcggctgcggctgaatggacaccgcgtatcgctgttccgcctcctgttcctgctcctgctcctcctcggccaccggagtggatgacttcttgggcgcactggccgcacccttgccttgacctgcggccagcagggccttgggctgatgatggcgcattatatcttgcagatacacgtagtgctgcacctttcgagatacggatacagatagatggcaagggaaaaagtgagtgggggcgcataattatggtgggtgtgtgaactgccggcggccaatgtcagcagccgtttaaagtggagccgcatgaccaacaccatcaccatcatgacttaaacataaaaaaccgagcgaaaaaaccgcagcggcaacaactggttgcaggtgcttcagcagagcagcaaacgctgtgagaatggcgtggcatctaaaaaaatgagtttatataacacttgtggcaaactttggcaacgccaacgccaaacacaacaaccacaaagaagcggactcttcgatgttgcaacagcaacaacaaacacaacactgtgcaacaaggttgtgtgtgggggtttcccataaaaaacttatacaaatatgccataaatatttagatttataataaaaagttgaaaataaaacgaatcaattcctttgctcttctttaaattaaaaacgaattattgattgaatttaagctatcttattcgtcatgtatgtaaattatacactcttgaatttggtcctttttttttagcagttttaagcagcttactataaaattccataaaaatacagaaagctcctaaattcttctggaaacctgttgcacagtgtgccatcgactactatacacattattatggcaaataaagccgccggcgagtcaaggcgccatgaagcgacacaaagctgacagaccaaaagtggggtgattataacattatgtcaactttcttcccacgacaagcgccattgtttttccacggtctccgatgtcttgcactattacaagacccactgaagacaaggcgaggcggggcggggggggggggggaattggagaagccattgccaagcgaatccgttggatgggtggaaactcaagttggatggcaggaggtggaaattattgtgttgacgcgtaataagacaaataata

SEQ ID NO: 33965 - DNA, 1983 bp, DROSOPHILA
atgcgccatcatcagcccaaggccctgctggccgcaggtcaaggcaagggtgcggccagtgcgcccaagaagtcatccactccggtggccgaggaggagcaggagcaggaacaggaggcggaacagcgatacgcggtgtccattcagccgcagccgcagcaacagctccagctccagcaaccacgtccacgtcagtaccagggtccctatcaactgccattgccgctgcctgctccacagcatcgatcggtgaatccccagcagcagcagcagcaacatcagcagccctaccaagtgattcccgaagagcagtttcttaagatcctggaggaggagctgcaggctagagcctatcatgagcaacttcgtcagcagcagcagcatcaacagcagcagcagcagcagcagcaacaccaacagcagcagcagcaacagcaccacaagcaactgcccatccacagcacggctgccactcacaaagtgttgcagcaggcggatccctcgctaggattaggcggctatcgcgagcgttttgtggccgagcaggagctggtgacaccaacttattcgcatccccgcggtggtcccaaatatctgcccttgccacaggcgcagcaaatccaagaggatgatgagcaacaacagcaacaaccgcagcgggtgcagctccacaaaccgataccgcatcccgggcagcaactcatccatggactgccaccccagattgcctactaccagccacagataagctacaagaccctgcccaaccatccactggcgaaatcttctctggaaagtgagattgagaaattgctggcagccaataagccaggacaatcgttggcctacgttgacagcagcaatgagcaggtggcgacaaggcagcccgctccgcagcacccaccaccacccacctcgcatcccgcgctgaggcaacccaaggcatacctggccagtacgcccaactccctgctggatgccaataaccaaccgttcgttccatcgctcttcaagttcagcaactatcagcaaccgacgccaatttatcccacgccggaacccaagcgactgggacccgtcgtctatcccacacagcaggccaatcagccgcaaccctcgcagtattactaccaggaggctacgcccaccggggcacccaagccgagtcccattcccaagcagtaccaccgatccaagcactacaagctggcttcacccgctaaggcattgctctatgccgattatgaacgtcagggatcgccatctccaccgccgccatccaacttctatcccagtccgccggatccgctaaagcattcccagagaaatctagccgtgacacccactgctctgccgctgcacgctgaatatccctcaccgtctccatcgcagtccagtatctatgtgtcccagggaactggaattgccacaccatcccggcccacacccactacagctcctattcagaagctacggactctggatgaagtgaagcaattgaatctgccgcctcccaatggcaagccactgacccaggccgaattccaagctcttgtggacgcgggatatccagtgaaggcagtgcccgtgccagttcccgttccgtatgagcagtacgttaaggatcatccggagtaccgcaatcacccgcctgtagactacgctcacatcatgcgcctggccacgcggcaattggctgcacatcagcaacacagatcgctggccgctccctcggagccgtcggtcaagatcctgtccactccttccgccggagagctgcatcagcaaacggccacaggcatcggcggcggtagtatcacgtatttgcaacccatcgagggtcaatcccatccccatgccctggcccatgtccatgcgttgcagaagaggagaccgcgtgatgagcaggataccgccgtggcgggcagcgagcccaaggcggcagctccggaggcggagtctgcgaaggcgaaggtgcagtaa

SEQ ID NO: 33966 - protein, 660 aa, DROSOPHILA
MRHHQPKALLAAGQGKGAASAPKKSSTPVAEEEQEQEQEAEQRYAVSIQPQPQQQLQLQQPRPRQYQGPYQLPLPLPAPQHRSVNPQQQQQQHQQPYQVIPEEQFLKILEEELQARAYHEQLRQQQQHQQQQQQQQQHQQQQQQQHHKQLPIHSTAATHKVLQQADPSLGLGGYRERFVAEQELVTPTYSHPRGGPKYLPLPQAQQIQEDDEQQQQQPQRVQLHKPIPHPGQQLIHGLPPQIAYYQPQISYKTLPNHPLAKSSLESEIEKLLAANKPGQSLAYVDSSNEQVATRQPAPQHPPPPTSHPALRQPKAYLASTPNSLLDANNQPFVPSLFKFSNYQQPTPIYPTPEPKRLGPVVYPTQQANQPQPSQYYYQEATPTGAPKPSPIPKQYHRSKHYKLASPAKALLYADYERQGSPSPPPPSNFYPSPPDPLKHSQRNLAVTPTALPLHAEYPSPSPSQSSIYVSQGTGIATPSRPTPTTAPIQKLRTLDEVKQLNLPPPNGKPLTQAEFQALVDAGYPVKAVPVPVPVPYEQYVKDHPEYRNHPPVDYAHIMRLATRQLAAHQQHRSLAAPSEPSVKILSTPSAGELHQQTATGIGGGSITYLQPIEGQSHPHALAHVHALQKRRPRDEQDTAVAGSEPKAAAPEAESAKAKVQ

SEQ ID NO: 33967 - DNA, 3234 bp, DROSOPHILA
aaattatacactcttgaatttggtcctttttttttagcagttttaagcagcttactataaaattccataaaaatacagaaagctcctaaattcttctggaaacctgttgcacagtgtgccatcgactactatacacattattatggcaaataaagccgccggcgagtcaaggcgccatgaagcgacacaaagctgacagaccaaaagtggggtgattataacattatgtcaactttcttcccacgacaagcgccattgtttttccacggtctccgatgtcttgcactattacaagacccactgaagacaaggcgaggcggggcggggggggggggggaattggagaagccattgccaagcgaatccgttggatgggtggaaactcaagttggatggcaggaggtggaaattattgtgttgacgcgtaataagacaaataataattttgcaattatgcatttgttgctgtcgccgtcgccgtcatgtcgtgacttagttttgccaactgcatttataataaaaaaatatcattattattatgattattacaacttttgccggcacttttaatttctatacgttttgcaaccaaaacattgtctttggctaattgcaatcgcctttgtctaccatcaattgcaaattcgttccgaatataagccgagatattggtcaaggtttcttggcctcggcgaaagggaaaaatttgacaaaatccgtctgggattgggccatttggctttctgccttttatgttggtcgttttgggcgccgagatgtttacatccggcattttgcaaagaatcgtgtgcctgccgccgatgctaagtcacgatcgcccaggtcgtccgatgtccaatgtccgacctctgatggccggggggccaagtcaaaacgccagacaagagccgcgatgtcgatggaacgccccccgattggcacaaaacaaacaattcctcatggcaatggtaatccgtcagttggccagtcgatcagtagatcacccactccctctattgaacacccagggattacggctggcagttttatgggtcaacttggaaaacaagtcctgcagttgctgcagatagctaatacataagtagtataacctataacttatcctagacaatcaaaaactatgcaatgcagaaaggagaaaaccttggatgcataaagtggacaaattcccaaactcacctcctgactctgctcgagaagttgggcggcatggggtcgagaattggccgccgcaaagttcctcaactgcggctcctggtgcgattcgtgctgctgatgctggtgcggtgcaatggggcgaatgatgaactgattcggcttggagccgtagatggtttcctgaccatcctcgggatcatcgttggcgcttgacgatgccgccgagctgcggtggttggggtacagagacgtctccttggagctcacttgtcgcttgtctttggtcgcctccgattccagtggcgtggaggcggagctcttgctgtcttccgctggcttggcttggctgctcttggcctccgcatccacggcctgggcgcagacgaggcctgtgtgggaggacaggtgtaggtgtcactttagagtttgtatatgtgagaaacagcacttattttgatgcaccaaaaggttacagttgttaaaattaaattattttatgccactgaatggaagtactgttaaaaaaagttatttatgtcccttaaatgttttatggtgcagcatttaatataattattttttaattctataattattgaacgttttgtatttaatttgttttatttcttagcttgtaatagttttgggtttggttttcaagttactaactgcttaactcaatatatccttgaaataatatcacaaatactaaattaaagtaatttattaggattaaagaatttgaatgctaattcttgatgttatttggatctctgaaatagcaaactagtataaatattccaaattttaatttattttataattttaagaagtgtcctgttcatgttttcactctgtgttttaatcctaattagttgagaaagaatgtcgtagtttcactgatattaggggaaaaataaatacaaaatattttctaacataaaaaaaaatgtaaagcaattactctggtaatttcttagggaacgcaaacccttaaacactttcggtgtctactcacccagcaagagtgtcaggagcaagatttggattctcattgtgtggcgtcactgaaccagcagactagtaattgaatatctgaatctgtgcctggccgttcgctactttcacagtcacttggcttatatatattttattatttcccacttggtttcgttgtcgttgtcgttttccttgtcagacgtttgggactacgatggtcgcatctgctgcatctgcatcgagcattgccggctgcaacaaactgaaccaaaagaagcacacaacacgatgcgattattactggcagttatgcaactgaagattcgacacaatctgaaaccgaattcgcaagctacgaactgtgaattgcgaaaccgaaactgaatcaaagtcttagtggcaattcgtatcccgtaatccttggattgtttttggcgcgaaattcgtaacgctacaaattggatatgaaagatgaactgattgctttaccgtcgtctgctttcctgtctttggtttttaatttatttttttactggtttttttttagttatttagccaggagcaaaagctccgtttcggggatcggatttagtagatcgcgcgcgctgctgcacgttcagccaacgaatctttggcgttgtgcggccaacacttgtatttataaatccggtggccaaaacagacgagtctcggccgacagccgagcttcgatccccgagttccgagctccagctaaagccacaatggctatatccaaagacgacctttgcggctcgtcgtgccagccaggcaccaacacaaagagaaaggtctgtctgcgatcgcctctttggctcgattctgcaaatgtgccgcctctacagagggaaaaaggtattcattaagtgctaataacaagaggtcctaacatcactttaatatccctctttcgatataacatttagatatgacatttatttttaataacttcaagattttatttcatctaatactttatagttggacatcattaagaaatacgattgtaaagcttatcggttatgaaaattcggtgaa

SEQ ID NO: 33968 - DNA, 486 bp, DROSOPHILA
atgagaatccaaatcttgctcctgacactcttgctgggcctcgtctgcgcccaggccgtggatgcggaggccaagagcagccaagccaagccagcggaagacagcaagagctccgcctccacgccactggaatcggaggcgaccaaagacaagcgacaagtgagctccaaggagacgtctctgtaccccaaccaccgcagctcggcggcatcgtcaagcgccaacgatgatcccgaggatggtcaggaaaccatctacggctccaagccgaatcagttcatcattcgccccattgcaccgcaccagcatcagcagcacgaatcgcaccaggagccgcagttgaggaactttgcggcggccaattctcgaccccatgccgcccaacttctcgagcagagtcaggagcaactgcaggacttgttttccaagttgacccataaaactgccagccgtaatccctgggtgttcaatagagggagtgggtga

SEQ ID NO: 33969 - protein, 161 aa, DROSOPHILA
MRIQILLLTLLLGLVCAQAVDAEAKSSQAKPAEDSKSSASTPLESEATKDKRQVSSKETSLYPNHRSSAASSSANDDPEDGQETIYGSKPNQFIIRPIAPHQHQQHESHQEPQLRNFAAANSRPHAAQLLEQSQEQLQDLFSKLTHKTASRNPWVFNRGSG

SEQ ID NO: 33970 - DNA, 3693 bp, DROSOPHILA
ccaatcagtagcgggattttccgaagataacactctattcaaccgaagggttttgaaatgataataattccgttcttacaggtaaaaatctatactaatacctgtttttttgcggacggaaaaaaggctcagttggcttatcattggcaaaagggacttggggaaaccataaagtatcgaaggtactgagccaagataatgagataacagaaggcgactttattgttttccactcaaaagcaattgaataagttggcactcgtttttaattgaatgggaatgaaataagctctaaaagtgttgttaaaacgtaatggcttttgtgttaatttaaagaatttaagtagttttgaaagtatcattattctttaggtaatttttattacattccaaatttaataaatgactaattcgaaaaagtgtttatttaatcaatgaatatatttcaagtaagtttacttttagtagcttgccaaatgtgagtttaaatatgtatgcatagaactatatagttaaactgctaaactttacagttaaactttctgaacccaccaaaatggatgaacatcctcgtctgccgaagggaactcgatgcacgtcattttgtttttcaacaatccagatccgtgcgctactccttgggcgagaaagtaaacaaacgccagctgatatgcgtcagaccccccgggctcatcatcatctcaccatttcagacatcccatgccagcccgaatcctcacgagaaactagaccagaccagggcgaactacatatgtggatgatgctaactgacactacggctgactcatgctgacagtgctcagacgctggatacagcccgcagacatccaactcgtatcctatccgattctgccccatatatataaccctcagtcgatggctgggaggcaaacagttgaggccgtgccacttggcagacacatactacacactccccgggggattcacgcatccatacttaaacaccacttcatcactcatgggcatcgagatgaggtgtcaggacaggaggatcctgctacctagcctactcctactaatccttatgatcggcggtgtccaggccaccatgaagttgtgcggccgcaaactgcccgaaactctctccaagctctgtgtgtatggcttcaacgcaatgaccaagagaactttgggtaggtgggatttttcttgatataaggaatactaaagtgccatatctctttactttcacctaacacctgtagaccccgtgaacttcaatcagatcgatggcttcgaagaccgttccctgctggaaagactgttgagtgatagttcggttcagatgctcaagactcgacgtcttcgggatggagtcttcgacgagtgttgcctgaagtcgtgcaccatggatgaggtgctgagatattgtgctgccaagccgagaacgtaaacctcgtaaacctattaacccaatgacgacaactgcgatgattgaaatggaatgaaaggacccgattggggaaagcactcacgtaatcatagttgttaagtcgttatcgaagcctactcaattccaactttggatttatgatatatatgcacatgtaagagggatgtatgcgcataatttatgatctgaaatcagagacaggcacgcgaaatgaatcggaacacgggatgttatgcatggtagatatgtatgattgtgcggggccagaatacatcgcctgggtataaattattaaataaattatgtattcaaactgctgcagattggccaacttgattggtaatgaaacgggtattacattgatttttcattgtcgttcattgcagttaattatttattgaacagcggccggatttctgtttgcaactatgttgaaaaggaagctgtgattttttaacaaactctgttcattgtaaagtttaaaatcattccaatttaatgccctcaaaacctacgctgaaatggtcagttttaaaacgatatttattaatattttagttaatttactaagattatccgttttgcacttttaatgccttgcatttggtaatgcgtgattgttatttaaggtctgcatgaatttagttgattccgtttattttagctttcaaaatgtaataatcttctaatttacaactacacagaacgattaaattatgagtattgctataaaatcggccaaccgcgactagaaatactcgacttttaaggtcaacataaaagtaagtcaatgttttgattataagatttgatcaattacttctttacggatgatataatcatcgataaacgaagtacgaaaaaagctatgaactaaaatttggaaatttcccacatgcgactaacttttgaattgcaattggattgcctactgtattaagacagaaacaagttttggaaatgaatgaatggtttaaattgtttcaagtttttttaagattttttttgttttcaataaatttagttttaatagaaaaaaagatatattcattttagatttctgaatacttgtgttatatcgctttttattcaagtgtaataatcaacatatatatcatataatgataataataaatgtaacgtcccaaattaataataatataaagtagcatttgcgattgtttgccaaagcttaaagcagaatatatatttaatccatttcgatcattcgtaaagagtaacatgcaacaagctgtaaaaaacatcgattgtagtatatatgcacatggttggtttggaaccagatccagagataatcgcgtcgaccaggtcagttggggtcaatgattttcgcattaggaggcctaatttctgaccacggagcagtactcccgcagagccttcatatcacaggactttttgcagcacctctccacgattccttgccgttggcgagttcgcctccggacttcagccagggaattgagtacacccccaagatagctcccaggaaagagggcacttcgcagcggttccgatatcgagttatcctcctcctcgaactcctggacaaactgcaggggattgagggcgtccagatcgctgtcggcaccggctaataaaaatcgtggatacaatgtagatctagcaaagccagcttgaggatctgcatccttgtaagaacttacgcatggcgcgcttgtgtggaatcacgggattatactcctcgcacaccatactcagcacctcgttgagcttttcactgcagagcgttccttgggccaacttcactgtggagctggccagcaaaatcacggccaccatcgagatgaaggacaaaggcttgctcatggttatgggtttactgcttaggttgctttacgatcaaatggattaagttgggtcgagccgggtcgaaagctaactgatgatgtttggcccaaagtaactggcttatatactgcctcgtaagaaacttaaactgggtctgggtcggggtcggtctctcggggtcggggtctggatccacacacatgttatcctcaaaagtcaggttgtcaaattgtgttaggatgcgatgagtgcattccggagttggctcttctctctaacgcctggctaaactcattcaatgtcaaagctgacttatgcaaatggctattggaaaattgtgggtggtttttgggtggctgtgtttgggagaagaagggctttgtgggcgttttgctgtcagccaattaaacaatttatgtataaac

SEQ ID NO: 33971 - DNA, 381 bp, DROSOPHILA
atgggcatcgagatgaggtgtcaggacaggaggatcctgctacctagcctactcctactaatccttatgatcggcggtgtccaggccaccatgaagttgtgcggccgcaaactgcccgaaactctctccaagctctgtgtgtatggcttcaacgcaatgaccaagagaactttggaccccgtgaacttcaatcagatcgatggcttcgaagaccgttccctgctggaaagactgttgagtgatagttcggttcagatgctcaagactcgacgtcttcgggatggagtcttcgacgagtgttgcctgaagtcgtgcaccatggatgaggtgctgagatattgtgctgccaagccgagaacagtaacatgcaacaagctgtaa

SEQ ID NO: 33972 - protein, 126 aa, DROSOPHILA
MGIEMRCQDRRILLPSLLLLILMIGGVQATMKLCGRKLPETLSKLCVYGFNAMTKRTLDPVNFNQIDGFEDRSLLERLLSDSSVQMLKTRRLRDGVFDECCLKSCTMDEVLRYCAAKPRTVTCNKL

SEQ ID NO: 33973 - DNA, 10951 bp, DROSOPHILA
gaccattgccattgcagcggtgagcatggctgcgatgagcagcgactggagccgaaggccatgtactgctgcaccgttgtgctggctaaacatcttggatatgcagtgaatgctctgggctgcaactggtatttataccactaaatcggaagcgctagctaatgcagttcaatggcctcttctgcagtctagcattgcagtggcatagcaagccccacgggcgtacaaactgcaaatcctttgatcacccatgtttcaggtaccgtttttcccctaaaaatgcaaactctatttctagctctactccccaatttggatggaaaagcgatgcactgttgttttggtagttggggtattgtattgtatttcttagcaaatatcagttgtatcattacctatatctatctataccaatagtttggaatgtatttgtaagacatttttaagatattcagaagagttagccttatgggacttgctctaaagtgtgaattgatgcacacagctttatcgagcatagttttcagtgtaatcaccgccaaaaaatccgcccacttcaaagcataacccgttcgcccaacctgttacattgccgctaagaggctctgactgctgtcgattgcgattacgattacgaccagatatctgtggggcatggggataaggggtatgtgggccgatggctgacagtgtggcagcctcattagcatgtcgtggccaggaggaaagtatgcttcgatgaagctcctccggcggcagtgtgcgaaatcgcttcgatcaccatcatcgccatcgccatggccactcgattgtcgagttgcacgcacggcgatgccaacagttggttgccagcgctgcactcgaaacactcgcttcttcccaccgaccgcaaagtgccggaaaagctagaaaaaaagcaaaaaaaaaagtggaagaaaattcgcgatagaaaacggaaaaatcgaaacgaacaaaaaaagtcggaataaatcaaggaaacatggtgctcgacattaagatgtgccgatttgataatgtgccctggggctttcgcctggtgggcggggcggactacgattatccgctgacggtggttaaggttaggcccgattcgaaaaaagaacgaaatctatatgctgcaacccccacccccccacgcatcacctcagcccattcacctggcggatgttcatagaccagtggaaaatattgctcactatgcagctgatgaatcacattggattaattcgatacgatacgttcgaatcagttttatttgttcgattgcaatattacgtaacgccgcgatgcgtgtgtgtccattcggatttgctgcattggcaaattagttaattaaagtaattcctctcgcttttgtttatctaatcgacagggccatacatttcccgctaatgagccgcataatggcagcggcaataaacttattcaaattttaattgtgtttcgctggcagttggtcctttgtttgtgcataaattgcatttggcaattcgcattttgtaacattgtgttgacaattcgcaaccagcaacaataacaaaaatacaatacatacaatactatagcatcgtcgtaaatccgaaacaaatgcgatttttaattggcaaactgctaagcgcataaaacaaatgaccgaaatgcgaggggcgctaaaaaatcccatcccttcgatacgaataaatcaatttaagccgcagagtcaaggaagggaggtcataaattgtttttgactttttggttattttttttttaccgttttacataaacaaattatgctatgggttattttaaattccgatcaatttataaaatgtttgtgctttgggatatgcataccatgaaaaaatggaagtttattgtaaatgaattattaacttcacaagctggctgatagagaaaaaactgaaaaatgtccggaatgttcttcattccaatgaactccctaaattaacttagctaatttattccttatactaatactccgcttttaagaattccttactacatgttagagactcaaaaagcacatccttcgactcgagtccatattactttatggaatgtgccaacacaccttcacatattggctctgcaaacactaaacaatccttggtaatcttttgaaaaacctctgtttacactaccactcttcgtcatgctgctcgccacatacagtctggtacatagatgtatggcccagctaagcccaaagcctttgttctataaatattcgcaacctccgacgatgtcgagtgctttttgctctgcgaattcaccgctggaaattgactctaccataagtgaaatgcaagagacccctgggactgaaaggaaagaccctcaacttggttgggtgaaatggtggagtctccaaccctccacctgctccttgtgccaaccacttttttttttttgcagtatttgcattactaagtcctcttggcagtcggtgtcgtgactttctggttatgaaccctgctttctcataacggaaacgaaaacaatcgcgtttatttgcccacgaaagtgttacaaaactgcctgaattatgcaatagaattctttgaacagagtgctaagatatttcgcattttgaaggcgaaacataattcatccataactattagtttgatgaattctcacttcgtatgctggcaattttgaaggccgaagtggcaaaaccattttaaatgaattcctacaatttatatgctcaatttgcgccaatttgtctgtactttattacccacaaaagccataaagcttatattgtatttagttgttattgttctcgcaacattttcactttgatttatagttgcgaaaataaatgttggcaaatgcaaatttttgaaacgatattctcttacacggtcatttggtaccatttccggaatatacatttaccaattttccaaaaaaagagccataaattgtattatccaattaaaacgattagtccagtgggtttttatttctaaaaatttaattttgtaattagagaaaactattgtgaactttggatgacctagaaagtttcattagttgtacattattttttacccccgctttaaaattgcagaacttctgtaaaaaaaagcttttacaagctatttaaatattagtggtagagttgtttgaacatttatctttttggaatcagcaatatttggttctctatccttacaaattaatcttctctttaagtgaactcataactttgtatatatgtacgtatgtagaatcatccttcaactcaaacatttccatccggcgaaacaatgcaatatttgagtggttagacatgggtaattccacttgactcgcttaactgaagtgtcgttaatgagctgccacttctactcgagcacccctcgttctgagcccccagcccccacagatcctctgtagcccccccatctccttgggcattgtcttcggttctgttgggtttgtgcgtgattgtatgattgtctgttcgggggtctgggtctgctggtctttgttttgttgacatttggcgcgcgttttatttttatgcacttagcacgcgacgtcgccgttgtcggctaatagaaatttccccattatcgcatcgcatcccattgtattgtatctcggctatctcgactatctcggcctcgcactcattctatcgccacattcccatatccgcatctgaatcgggcgatatctaggcattcccatctagatctaaacatgtccatatgcttcaacgttaggtgaccgagggcagcattgctgacgaggctggactgcgggtcgaggatatcatcgtgcgcatcaatgacacggctgccacgccccttacccacgacgaggcccaccgcctcattatgggcagtggaagcgtcttctattttggcgtctaccggtgagctttcccatccttctattccataccattccgtttcgttctcttactgctcgtggtcgtggtcctcgtccttgtccggttcctttactactactctttgtatcccatccaccgaggaccatttatcacagctgagcgggctaacaacccaagaacgtttcctcatgcccctgctcaaggtaatctacttgttcaagaaattcacaaaccacaaacgacctcgagagaaatggaaaaaatatgacaaattttcgtgatttaagaataaagttctggaaaaataaagcgctttcttaaaaagttgtctgggtaaaatgacatttggttaatatatcataatagttaattttattataattataaactaagaaaagttaaattcaaaaacccacctagccccattagttttgaaaattaccctaccattttagaagcaatttatattatttgaattaagtttgtatttcaactttttcgggttatgaataattattcttagagtgtccccgaaaccagggctccatctcaggtattccacgttacggaattaattctaatgttcataaattctgctcactttttggtcacttggatccatgtgcagggagaacgaggaggacgcttacgagtgcctaaagaagtttcccacgagcgagggttcgttgaccaagtcaccaatgccgaccatttcaccgtcgccgactccatcgctgtcccagctgacggaaaccacaaatgcccgtactccggaaccggagccattcgttccgctaccccgggaactcgctgctgcgactatggcggctcctgctgtggaagtggacgtggatgtcctggcggaatgtcgccaacccatgtcggaagtgcattcggaagagaaacgaggggatgtgaatgggcatgatgcaccaggccaggcagatgaaggaggccttcccgtcgagaatctctacttgcccgatttacccgatcgtccgtgctcggcgctgtccgaaaggcaggaaattaagctggtggaggaggaaattgcagccgtgctgtccggcgagtcggaggtgctcaaggagcacaatgtccttgggtgcgtactattcaatttaaacccatttctcccgccagttccctccttgactacttccccatttgttggcatgctatgcgggcgagttcttttaaccacttccatatgatagcgtcaatttctataggatcttcccaaagccgggcgtctgcatgtccagcgacgtactgcgctccctcaacgaggaggtgaccaagaccaagctggagaaggacaaggagaaccgtcaatggtccactttcctgcagcgtcccaatcgccccgttcccaagagcaagcaatccctggaggcggaacgacgggcggccaatgcctacaaggtgacgattgttaagtcggcgccacgggaaaagtcgccaatggtgagtgagtgaatgcactcagaggaaagctgcacgaaatttgagaatattaacccaagaagcttgtgcacaaaacaaaactttaagattaagatgcaaaagtgatgagatgtgttaatttttaagaaaaagttccttaatcttaaatcgtagattcttgggttaaattttctctcagtgcattatttgctgaccaagatcaaaagttaatttgtgtttacgtgtgacagccggaagctaagccggcgccaaaagaagcaacgccacccaaggaagtggagaagaaggaagaggaaccagtgccggaggaggtggtggagcccgaaccggagcccgaaaaggatgaggaaccactgcccacggacagtgaggtgccgaatttggagcaacttcccgagaccgaattgccggacgagcagccggagaagagtgatgcccccaaggaggtttgcgagccggaagtggttatccaaacagaaccgggctcacccgatggcaacgaagcttccgatggtccagcaggagcaaccccaccggcggaacccattactccagtgccagttaaaagcgaggaggaattggccctggagcgccagttggcagatgtgcagcgacaactggccgccctctcgtcactgccctccaccattcagtccaccctggatgcagtgaccaagcagctggccgacttgctgcccaccattaagctgcagcagcaggagaagcagttgccgcaaatcgatgaaaattcaggcaacgaggagcaggttgaggaaggggtgaccactgccaccaacaccatcaacaccgcaggcgaaacagaggatgcaggtgcaaaaaactatgcccaggtcgacagtaattaaatttttctaatgccgcacttttgcgtatatcctttgcaccaaattcctccccttgctacccactttaccgcatgtcctgcaggcaaggacatatccatatctggaagtgacaacccaccggtggggccatgtgagagtaatgaggatagatgcgatgccaatgaccgggaagtggcggaaatatcgcgctccactgacgacaatcgcctggccaaggacaagaaaaaggatctggatcaggagcagaagcagcagcagcagcagcagcaggaacctctgtccgaggagcagaacttcaagaagcagaaggtaagtacgaggcacacaactggccttgggagccatggccacggtgaaataaaatccctggcaaggcagttaatgtaattaggctgtcatgagttgggtctagctggttttaatgtccttggatgtccgggtccgtccgtttttcctacccgcaacttggtctcgtgctaaactatttagagcaacaggattaggccgactgctttatgggaaatgtttcattgtctccgtgatggggcggaaaataaatattctaccagcttctctgtagtgggattattcgcctcggagatgatttgctaaaggattagctataccttgattacatattaatacttgctgatggaatttatattgacaaagtttgggaaaggctgaaaagcgtaagctaatgaaatgctaattcagttatattattacttgttgatggaatttatattgcgaaagtttatgaagcttacgaacaacaaaatgttgttatattattataaatattaaaatattcattgtaatttagaaaagtaaacttaaatggcttagaataatttatgaaattttttcttaaattcctttgtttattccaagatgaacccaagactaaggcatcaacaagctagaatatttatgatttagagagtgcgccagctcagaatgttttcccccattagtcagctgtctttgaggtctaactattccaaaatattctcaactttctgatttatttctattgcgatagcagcttaagttcgtataaagcagtcctctcagcctgataaaaacgagaaggaccttctgcaaggcatcaaactattcggttgagttccgaagtcagtttttatcccggaatgctttgagccatattatccagctgcgggcagctggaccttctccatggagagcttgcttctgtggctctggatcccccatacccgtgtccgtgtccacaaatcaaattaactaaaatgccatttggtttttgtctttttctacttgcagcataatgtgcgcttccaaacgtagttagttagctttaatcgagtttaaattttgataaattgccaacagcaagttatttgtagcgttgtgcccaagatggttctctctctctagtttgaaaaataaagccctttgcagcggcaggggaaaaatgcagaaaccaaaagacaattagtaggcaccaagtggaaagcccttcaacaatgtttcgtctctttttccccgcatctaccatggttctcaatttttgtttttcccccttccttcggaaaacaccgtgggtgtgtgcacttttccgcccgtctgtttggttttgctagagacacgatgtcattgaggagctcgaggagcatttggtgcgcaaaaacaatccccggcggtcgaagcgggcctttgggccattggtcccatcctcggagcgtccgttggtccttcccggcggacggcgctggtaccgtcccaaggatgcctacaacgatgagttcattgccgagaccctgagcgcccaggcggagctcatcacgggcagcactctcgggtgggtagccccactcccaatcctcaagcctccatcctccatcctactcagtatgtatataccaccctacttattgcggctagttggccatgtttgaccatgtttgccatggtcagactctgcctctgttgtcgcctcacatctcatctcatctcatatcatcgctttgtccgcagagcaaacactcgcaccgagaaaaactacaccaaaaaaatgtccatcttccgcatgggattttcttttagtttttcccatctgaaatattcacgtccttgcaaatttaaggaatagaaatcttgtcattctctgtggtcaaggtaaactatgacattttactgctgtttttagttcaatacaatttttctatagcttctgcctgccttgtgcaagtaatgcagctaacaattttcgaaattggaagcaaaatttaattgaaatttaatggaatatttcagtattacacaataatgtctcatgtgaaattccaatatataaatataaacaaaattgaacttttagaggaattcaacatgtaattatctgccgaagcacgaaaaattcttgctctaaagttttttaaataccttgtgaaactgactggatggacatactttttggtgatgatttttcacagtgccccccgcatacacctcaccaccacacccataacgctagctcatccgaggcattcatttacttcacttcttcacttttccatggcatggccactcgctccaactctttacatcgtccattgcaccataaatttgcgcattagcagctgtccatatgagagtccgttgctgggctacgattccaggtagtgtttcatttgaatcagccgtgatgaagaagtgcgccggatgccatgtactggaaaccatatgtatggtacattcgtagcacctagcactcctcctcattatgattatcgttggcattatcgttagcattacgagacccattgtgcccgttggcattttcaacccgactttcatcctgattcgcattcgcattcgcaaccccatctgtccaaccggctgtgtgtcttgtcacaaggcctgcagttgatttgactttccttctgcgttccggttgagttctttatgcatgccgcctttgctcttgctcttgctcttggttatcttttctccttgctctctgccttttgattttcattgtagattgcattttggaatcgtttgttcaatggcgagcatataacacgccagcgcttcaggtaagttttttccctcccaatccgtagctccatccccattccaatccagagtcccgaatccccatccgaatcgctaccaatcccacggattccacgaactcttcccgtttccctcacttctcgactctttaatgaggctaacaacttctcttttgcttttgctgtgctgtgctgtgtgtatttgcccgcccttgtcttgtacttaaccaatgggggaaaaacggactgctccggatccaccagggagctgcagggtctcggcctgaccatgcaaaagtaagttgtcacattggacgttttcttatgttctccggttcattgcatgcatatgtacgctgctttttcgtcccgggagcactgcattccataccatatcgaatccaacaccccaccccccaccttgcaacccccctgtgcagttgcaccactcttgcaattccaatttaacagcgactccttggccattcgcagggtcaacttcatgaagtaccagaagccggagcgcaaaatcgatctgaatcgcagcgaggtgtacaagtatctcaatccgcatctggacagggcgcccgtgcgtggcatcgaggtgcgtgctcctctggtggccgccgagtccgacattcgccagtcactgcaatcgtaggaatgatgcagcaccaccacctcgaatgctcaacaacagtgccactccccgaatctcaagtcaatcccataggtacacagagcaaaaatgatatgccattcacatttttaatgggattgaatgaaaaactgctaagattttgcagagaggcgtttgggcagctttcagttttgataaatggttaaaaaattattcaaatggtcatctgaccaaattcctaaatgaaagagaatgttgtttgccttttttgaatattttttacaatattgacaagagtttgaacacgtttttaagtatcgttagtatcatttcattgtgtatatcttgctcacttgcttaagccaagatatttttgccacaaattaacagccaatcaatcatcccttcggaaaacttataaatatttaatgagataagtgcaagtgcgctttaaatatgtcaactgctaaattcgaactgaaatacattatatcttgaggtcgataaacaaacgcttctctgctaactttcaaaatgctcagttaacaacatatcctagaatagagaaatacattgtctgttaaaatacatataaaaccatatattaagaaagcttcagcttcgttttggtgaggttattgtgcccctgattgaagattggaatgattgcaatattgcaagttgtttctttgatttgatgtgcccaatgaactccaaggatgcgaatgtttaggtttctgctcgaaattggcttgcttcagtgcattcgattatcgcttaagaagctcaacgagcgtaaccatcaatatgccaacagaagtccagttcgctggcattgtcgagcggggggtctcctaatgcgatattacataatttgtgtgcaacaaggcgtatgtgtaatgtgtcgtgcatttctgtggcatatcctcaggcgcttggctgttgcaattttctttagcacaaatacacgattcgcgatgtgtgagtgtgtgtgtgtgtgtttgtgtgtatgagtgagtgt

SEQ ID NO: 33974 - DNA, 2205 bp, DROSOPHILA
atggtgctcgacattaagatgtgccgatttgataatgtgccctggggctttcgcctggtgggcggggcggactacgattatccgctgacggtggttaaggtgaccgagggcagcattgctgacgaggctggactgcgggtcgaggatatcatcgtgcgcatcaatgacacggctgccacgccccttacccacgacgaggcccaccgcctcattatgggcagtggaagcgtcttctattttggcgtctaccgggagaacgaggaggacgcttacgagtgcctaaagaagtttcccacgagcgagggttcgttgaccaagtcaccaatgccgaccatttcaccgtcgccgactccatcgctgtcccagctgacggaaaccacaaatgcccgtactccggaaccggagccattcgttccgctaccccgggaactcgctgctgcgactatggcggctcctgctgtggaagtggacgtggatgtcctggcggaatgtcgccaacccatgtcggaagtgcattcggaagagaaacgaggggatgtgaatgggcatgatgcaccaggccaggcagatgaaggaggccttcccgtcgagaatctctacttgcccgatttacccgatcgtccgtgctcggcgctgtccgaaaggcaggaaattaagctggtggaggaggaaattgcagccgtgctgtccggcgagtcggaggtgctcaaggagcacaatgtccttgggatcttcccaaagccgggcgtctgcatgtccagcgacgtactgcgctccctcaacgaggaggtgaccaagaccaagctggagaaggacaaggagaaccgtcaatggtccactttcctgcagcgtcccaatcgccccgttcccaagagcaagcaatccctggaggcggaacgacgggcggccaatgcctacaaggtgacgattgttaagtcggcgccacgggaaaagtcgccaatgccggaagctaagccggcgccaaaagaagcaacgccacccaaggaagtggagaagaaggaagaggaaccagtgccggaggaggtggtggagcccgaaccggagcccgaaaaggatgaggaaccactgcccacggacagtgaggtgccgaatttggagcaacttcccgagaccgaattgccggacgagcagccggagaagagtgatgcccccaaggaggtttgcgagccggaagtggttatccaaacagaaccgggctcacccgatggcaacgaagcttccgatggtccagcaggagcaaccccaccggcggaacccattactccagtgccagttaaaagcgaggaggaattggccctggagcgccagttggcagatgtgcagcgacaactggccgccctctcgtcactgccctccaccattcagtccaccctggatgcagtgaccaagcagctggccgacttgctgcccaccattaagctgcagcagcaggagaagcagttgccgcaaatcgatgaaaattcaggcaacgaggagcaggttgaggaaggggtgaccactgccaccaacaccatcaacaccgcaggcgaaacagaggatgcaggtgcaaaaaactatgcccaggtcgacagcaaggacatatccatatctggaagtgacaacccaccggtggggccatgtgagagtaatgaggatagatgcgatgccaatgaccgggaagtggcggaaatatcgcgctccactgacgacaatcgcctggccaaggacaagaaaaaggatctggatcaggagcagaagcagcagcagcagcagcagcaggaacctctgtccgaggagcagaacttcaagaagcagaagagacacgatgtcattgaggagctcgaggagcatttggtgcgcaaaaacaatccccggcggtcgaagcgggcctttgggccattggtcccatcctcggagcgtccgttggtccttcccggcggacggcgctggtaccgtcccaaggatgcctacaacgatgagttcattgccgagaccctgagcgcccaggcggagctcatcacgggcagcactctcggggtcaacttcatgaagtaccagaagccggagcgcaaaatcgatctgaatcgcagcgaggtgtacaagtatctcaatccgcatctggacagggcgcccgtgcgtggcatcgaggtgcgtgctcctctggtggccgccgagtccgacattcgccagtcactgcaatcgtag

SEQ ID NO: 33975 - protein, 734 aa, DROSOPHILA
MVLDIKMCRFDNVPWGFRLVGGADYDYPLTVVKVTEGSIADEAGLRVEDIIVRINDTAATPLTHDEAHRLIMGSGSVFYFGVYRENEEDAYECLKKFPTSEGSLTKSPMPTISPSPTPSLSQLTETTNARTPEPEPFVPLPRELAAATMAAPAVEVDVDVLAECRQPMSEVHSEEKRGDVNGHDAPGQADEGGLPVENLYLPDLPDRPCSALSERQEIKLVEEEIAAVLSGESEVLKEHNVLGIFPKPGVCMSSDVLRSLNEEVTKTKLEKDKENRQWSTFLQRPNRPVPKSKQSLEAERRAANAYKVTIVKSAPREKSPMPEAKPAPKEATPPKEVEKKEEEPVPEEVVEPEPEPEKDEEPLPTDSEVPNLEQLPETELPDEQPEKSDAPKEVCEPEVVIQTEPGSPDGNEASDGPAGATPPAEPITPVPVKSEEELALERQLADVQRQLAALSSLPSTIQSTLDAVTKQLADLLPTIKLQQQEKQLPQIDENSGNEEQVEEGVTTATNTINTAGETEDAGAKNYAQVDSKDISISGSDNPPVGPCESNEDRCDANDREVAEISRSTDDNRLAKDKKKDLDQEQKQQQQQQQEPLSEEQNFKKQKRHDVIEELEEHLVRKNNPRRSKRAFGPLVPSSERPLVLPGGRRWYRPKDAYNDEFIAETLSAQAELITGSTLGVNFMKYQKPERKIDLNRSEVYKYLNPHLDRAPVRGIEVRAPLVAAESDIRQSLQS

SEQ ID NO: 33976 - DNA, 2228 bp, DROSOPHILA
gattcaaaatattcaaattgcgctgtgccagttccctgggggccaattactcatggatcttcagttagccacgtgaactcggctaattaagttagtgcagacgaaagtctcacagattccgtgggatgctggtattagtttttattgtcgtaatggatccaccaaacaaactaatatatcgttataattgctggtattaaagacagtatagctattaaccttcacacatactcatacaagcgtgaataatcgaatgagctaacgaattttgaatgatttttccttttgtttggctttttgttaccgttttcaacagtttgtttaaattatgccgtgaaatttttgaaactgcgcatgtgtaagagctgcccacccccccccctttccccttcccctgcactttttgggcgtctgcaacacgcaacagttgactttcaccagctgaaaggcagccgcgtctgtggatttatttccagcattcatgtcgtgcaggttacctcgccacctgacccctccatacccaatcccccattccctgtccaccccagcaatccagaccatcttaatggcccattgacaactgtggagccgagcattactcctttggccaggccctaatcaatggcatttcactttcattgcgaccgcgttaattgaaactggctaaataattgcaaaactcacccccaagactccagttacacttgacaattaaattgttaacaaagcatttaaacaaataaatgttaacaattctatataaaatatgacaataatatgaatgaatatgaattaaaactaagccgcaagttatattaaacatatagtatttgacttattaaacaatataccgattttgccaagtgtattgcggtctggtctacaaaagtctccacacagctgttggtggtctgcgcatgtcgcgattgtgtcattcccgcagagcaacaacatggggcactagaatcccatatatatattcgatttgtcagcttggacgatgtcggaggcggattccgccagcaagtgctcgcccagtggagtgcgaagggttcgaacggatctgaagacgtcggagaaccgattcctgggcagccagcagcgaaccagctcacccatgaccatcaagcagcgacacatccactaccactatgccacctttatggccagcagtgcgccgcaggcccgcgaaacatatcacaggcactcttttggatactacctataaataattactatgttatgggatttacactgctcaattaattaataatgaaaatgtttttttttcttttcagcgcccaactgcctgcgcgtgccaccagattgctgaaccgctcacgtctgcaggaccaacaactcaccggcaacgattcggataacagcttgaggtcctcccacagcggcggagcttcggcggcggccaggaagcgaagcacgaccaactcaaggacctcgtcgggttccacggccagcctgcctcgtcagcgtcatctgcagcagcagcatctgggatcgggtggcggagcaggagcgggtggtggaggtggaggtggtggagccactgcgtccggtacatccacccagaggtgcgggggagagctgcacagctcgtcggacgatctaatgttgtatgacaagtccttccgcaatgcgatgatccaggatgtgctgcagttcaagaagcagctgctccgactgcggcgaatactccaggaggtaagttggggccatgaattaagtacgattaaactcctaaaaaaaaatgtggagaaacaaaaaaacttcacttaacacgataacagaaaatctttatgtctcaaaacaaccttcaaatgttaatttaaacaaaagcttatgagttctttttcaaaatttatacataagatctaataaaaatctgttcaatgagccttaataattttagtaaactccaattgttcctgaattgatgtacaataaatatagataacatctttaatttcaatctttcctaaatttacgtagatatattgtagataacatcctaaagttgtaatctttagatacacatatcatctttaagttattatgtctaaattactttggttaggtacattcatagttttttctttaaattgcacttttcttttccgcacatttccatggcacacccatcataatcatccacactcaccattcacttgcaccaccaagccccaaaaggagccagattttgatttgaagct

SEQ ID NO: 33977 - DNA, 228 bp, DROSOPHILA
atgtcggaggcggattccgccagcaagtgctcgcccagtggagtgcgaagggttcgaacggatctgaagacgtcggagaaccgattcctgggcagccagcagcgaaccagctcacccatgaccatcaagcagcgacacatccactaccactatgccacctttatggccagcagtgcgccgcaggcccgcgaaacatatcacaggcactcttttggatactacctataa

SEQ ID NO: 33978 - protein, 75 aa, DROSOPHILA
MSEADSASKCSPSGVRRVRTDLKTSENRFLGSQQRTSSPMTIKQRHIHYHYATFMASSAPQARETYHRHSFGYYL

SEQ ID NO: 33979 - DNA, 6588 bp, DROSOPHILA
tttccttttgtttggctttttgttaccgttttcaacagtttgtttaaattatgccgtgaaatttttgaaactgcgcatgtgtaagagctgcccacccccccccctttccccttcccctgcactttttgggcgtctgcaacacgcaacagttgactttcaccagctgaaaggcagccgcgtctgtggatttatttccagcattcatgtcgtgcaggttacctcgccacctgacccctccatacccaatcccccattccctgtccaccccagcaatccagaccatcttaatggcccattgacaactgtggagccgagcattactcctttggccaggccctaatcaatggcatttcactttcattgcgaccgcgttaattgaaactggctaaataattgcaaaactcacccccaagactccagttacacttgacaattaaattgttaacaaagcatttaaacaaataaatgttaacaattctatataaaatatgacaataatatgaatgaatatgaattaaaactaagccgcaagttatattaaacatatagtatttgacttattaaacaatataccgattttgccaagtgtattgcggtctggtctacaaaagtctccacacagctgttggtggtctgcgcatgtcgcgattgtgtcattcccgcagagcaacaacatggggcactagaatcccatatatatattcgatttgtcagcttggacgatgtcggaggcggattccgccagcaagtgctcgcccagtggagtgcgaagggttcgaacggatctgaagacgtcggagaaccgattcctgggcagccagcagcgaaccagctcacccatgaccatcaagcagcgacacatccactaccactatgccacctttatggccagcagtgcgccgcaggcccgcgaaacatatcacaggcactcttttggatactacctataaataattactatgttatgggatttacactgctcaattaattaataatgaaaatgtttttttttcttttcagcgcccaactgcctgcgcgtgccaccagattgctgaaccgctcacgtctgcaggaccaacaactcaccggcaacgattcggataacagcttgaggtcctcccacagcggcggagcttcggcggcggccaggaagcgaagcacgaccaactcaaggacctcgtcgggttccacggccagcctgcctcgtcagcgtcatctgcagcagcagcatctgggatcgggtggcggagcaggagcgggtggtggaggtggaggtggtggagccactgcgtccggtacatccacccagaggtgcgggggagagctgcacagctcgtcggacgatctaatgttgtatgacaagtccttccgcaatgcgatgatccaggatgtgctgcagttcaagaagcagctgctccgactgcggcgaatactccaggaggtaagttggggccatgaattaagtacgattaaactcctaaaaaaaaatgtggagaaacaaaaaaacttcacttaacacgataacagaaaatctttatgtctcaaaacaaccttcaaatgttaatttaaacaaaagcttatgagttctttttcaaaatttatacataagatctaataaaaatctgttcaatgagccttaataattttagtaaactccaattgttcctgaattgatgtacaataaatatagataacatctttaatttcaatctttcctaaatttacgtagatatattgtagataacatcctaaagttgtaatctttagatacacatatcatctttaagttattatgtctaaattactttggttaggtacattcatagttttttctttaaattgcacttttcttttccgcacatttccatggcacacccatcataatcatccacactcaccattcacttgcaccaccaagccccaaaaggagccagattttgatttgaagctggtacgtcgctgactccatttagttgtgcccaaggcaatttttgcgtgggatgtttagtgatgagtggggaaagtaacctactggttttcattgcctcttcacagacggaaacgctcaatcccttcgagaacgataacgtccagctgttcgccgcctgcggattggatagcaagcaattgaatgacatcgatttggccagcctaacctcgtccacgacggaggatccgctacaggagctaacggatctacgtagacaggtggtttaccttcaggtatttgcacgttttttgcatttcgtttgctcgttaagctgggggaacacgaaaactgggtctcacaaatcgaagcgatccaatccaatggatatcgatacgattcgaagcaggacaagaattttctatcgcatttttactatctcgctgttgttctttaatgtttattagatacacggaatcttactctgtgtagcatgttgcatatccaatcatgagaatactataaccatgcttattatatatctatctttaaatacaacatatacattttatataaatacagtcatagtttcgtgttgatattgcacttttacttgataccgaacacagatcatacaaaattcctataaatgaaaagatctttctttctgagtatcaaaggagcagaataaagcctttaaaatgttcacaataaaatttaaacaaatttgtagaatgttttaaatatttaaattgctcctttgaatagtacacttctttatatacattgttaatagctatttagtttaactatatgctttgattgagaaaaaccaattggccactgagtaagccgaaagaaaaagctcttatataaactaatcaaagcatgaaagtcttaaaagccaaaaacaaagccaagttagcattttgccaacctgcatatacatatatatatatatatattatatatagatatgattttcacactgtctggcttagatacgtttaaccactagtgacctttcatggctcgctccacaagagtgaactgacatttactgacctctgcctctccatcttacctcccaatccaatccacctgtccaattgcctgctcctccagggtcaagtggacgatcgtgatcgcaccattcgcctgcagcgcgatctcatcgagcaactggaggccgagaagaggcagaaggcttcgcatggaccgggatctggcgcggatccgggcaaggagctaatcagcatggccacccaaacggagcgggtaagtttggcaaatgccaaaatgccatcgtgtaatatatacatacatatcatatgtgtttgcacaacattgactaacccgaaggctatcgtcaattgcaattacaattacgaatacaatttcaactacaatttcaattccaattccgattccactttcacagacacgaccacttgccattggtgcggagggtttgtccaggtaggcaaactttcatgtttcaatttcaatttcggccatatatgtacttactgcattatttacctgtttcgctattatttcgttactgcattttattgtgtttcggtcatttggtataaatacttgtaattttcgggggcttttcatcaaccgcagctgcatggccgcaaactaacaaaactaatacaaaacgctgccgcctgttgctgctcgttaatgttgcaagtgcacttgggaaaaagttgagaaaagttaattaacatcttgttattataaagtaagcgaaagtaatatttgataatgtttactacttttgaatggactaagtacagcaacatatgttatgcttgaacttaatgtataataataacaatcttttgataagtcttaaaactgttatttaaagatacttattttatttgatttccagtactattatagttaattcaattaaattaaacatttttgttattacttttgaagcagttaaaatccatttagttgaattttttgtgtgtagttgctgctggtcagttgatgttgcaagttgccgttgcaagttgctagttgctgctggaatcggtttcggctggcttcacgctccgctggcatgcaaatcagttggccactttttgcggcacttgacgttaatggcagcaaattgcaattggagcagtctaattagggacgattctgcagtagctgcagctgtaagctgcaaatctgcaaaactgtatatctgcaacatccaacgtggcagcaacaggaggcggtattaccattttgttcaacacgaactaacaatagaccagatctcgccccgattaacccatctgaaaatttctttctttcccactcgcaatgctcccatggaatttatatacaaatacactgaaacaaacacctctttccactctaaccataacgatatttagactacaatttggggagcaacaggtactattttgtgatttcatcctagccatcattgtgctgtgtgccatcaatcttatatgtatactacacctaagctacaactgtatagataattgtaattcatgcacttgagaaactataatccaaagcccaaaagcatccactaactaccatcaaatgatacctaactaagctttaatctatctaagataaccaagttactaagcttagctttaagaacgttactaatttgtcactgaaaatttaacactgtttgtgaaacgttttaattgcatgcggcaattaaatagagtcccaaggtaatgcaaacttaaaaaataacccacaacacgtcgagaagatgggatgggtcgaaagaaaaatgtaacctcgatgattcagatgagtcatgaatcattaagaataatgaatcataagtgaacaaagttgttcccccaaagcgggatttcttgtaaatttaaaccaatgccgtctagagaatatttaaaattccaattgaaaaacaacctattagtaactatatcttttactaattccaagtacagagatctcaaaatattccttcccatcttctcaacattactaatcgtttttggcatggacaaaaagctaatggttcctctctataaagtaaattattgtcctggaactgaccactaatctccatctctctgtccgcagaagtaagcccgaatataccagttataccacgcactttccgatgctccacttgcacgattccacgctggcagccaccacgataatccgtcatcatcagagcaaccatgagcagcaacagccggagaaatcctgtccagctctcagccaaacccgccggcacaccattatttccaccacgctgaccaactacaatcagcagctggcggccgcatttcccgatgctacgcgacgctcctccatcggttgggataccactccgaccacgcccaccccgcatggcaacgcctccaagccggtaaggattacgctaatcggcgaggcacagccgctgcagagcaagtcatcaaccggatcgctatgctcgtcatcatcatcgtcgtcgtcatcctcctcatcatcaacatccttgttggcacaaaatgccaatgtggtcaagatgcgatataccaatggctgtcagagtgttaagaacggatcgagtgcccattatcagccgttgtacaacagcaacaagatgacaagcccaaccgtaactatagtctgatttggataccagttttcagttcttcagttatcgaaccacaactaatttgtcttctgactggcgctcccacatggaaacgcagaattcataattgtgaaaatagacctagtacaagatcttaattttttgtaagcgccaatatattgtatttgcatcttagccaagagaaaagtcctggaaaagcagtttagtaaaatattttcgtattaggcatacgtactttaaaatatctccatatatgtatatgtatgtgtatgtccattgcttcaatataatgttaaacttaaatttaatcgtctttctgctggcttagttttggcttccaaatgaaactttgttagccagattaaaacatacatatatttaataaccgccaatctgagcattttcaagagcctccaaacggaataatacccattagcacaagggctatatactctttgcatatatgtataatctaaagttagatcctagttaattttccattgttacttgtttttgcctaagttttagtctaagctagtgagtttttcttgtttcaatattcccataatttgtacaatatgtctaatctcgctaaagaggagaaaaattgataagagctaaattgaatatattttctccaagagcacaataatcgtcaagtaattaaccgatattatataacgcatactgtatgtaaaccactattaaagttatagaaagtacctatcaatagagaaagataaactagcgtgcgtgtgtgtgtgtgtgtttgatttggaggcatttcacagctgttgagtgtggacggccctctgctcgagatcccattgatgacgccccaaaccggcttggagcccactaccttcgcctccgcctccatccaaactggatttgcattcccattcgcattctgcggctgttcgcggatcctcagttgagaccgaactctggagcaggaatgtcgcagactgccaactgggttctgccgcttttgctgtggcttctctgcatggga

SEQ ID NO: 33980 - DNA, 1344 bp, DROSOPHILA
atgtttttttttcttttcagcgcccaactgcctgcgcgtgccaccagattgctgaaccgctcacgtctgcaggaccaacaactcaccggcaacgattcggataacagcttgaggtcctcccacagcggcggagcttcggcggcggccaggaagcgaagcacgaccaactcaaggacctcgtcgggttccacggccagcctgcctcgtcagcgtcatctgcagcagcagcatctgggatcgggtggcggagcaggagcgggtggtggaggtggaggtggtggagccactgcgtccggtacatccacccagaggtgcgggggagagctgcacagctcgtcggacgatctaatgttgtatgacaagtccttccgcaatgcgatgatccaggatgtgctgcagttcaagaagcagctgctccgactgcggcgaatactccaggagacggaaacgctcaatcccttcgagaacgataacgtccagctgttcgccgcctgcggattggatagcaagcaattgaatgacatcgatttggccagcctaacctcgtccacgacggaggatccgctacaggagctaacggatctacgtagacaggtggtttaccttcagggtcaagtggacgatcgtgatcgcaccattcgcctgcagcgcgatctcatcgagcaactggaggccgagaagaggcagaaggcttcgcatggaccgggatctggcgcggatccgggcaaggagctaatcagcatggccacccaaacggagcggacacgaccacttgccattggtgcggagggtttgtccagaagtaagcccgaatataccagttataccacgcactttccgatgctccacttgcacgattccacgctggcagccaccacgataatccgtcatcatcagagcaaccatgagcagcaacagccggagaaatcctgtccagctctcagccaaacccgccggcacaccattatttccaccacgctgaccaactacaatcagcagctggcggccgcatttcccgatgctacgcgacgctcctccatcggttgggataccactccgaccacgcccaccccgcatggcaacgcctccaagccggtaaggattacgctaatcggcgaggcacagccgctgcagagcaagtcatcaaccggatcgctatgctcgtcatcatcatcgtcgtcgtcatcctcctcatcatcaacatccttgttggcacaaaatgccaatgtggtcaagatgcgatataccaatggctgtcagagtgttaagaacggatcgagtgcccattatcagccgttgtacaacagcaacaagatgacaagcccaaccgtaactatagtctga

SEQ ID NO: 33981 - protein, 447 aa, DROSOPHILA
MFFFLFSAQLPARATRLLNRSRLQDQQLTGNDSDNSLRSSHSGGASAAARKRSTTNSRTSSGSTASLPRQRHLQQQHLGSGGGAGAGGGGGGGGATASGTSTQRCGGELHSSSDDLMLYDKSFRNAMIQDVLQFKKQLLRLRRILQETETLNPFENDNVQLFAACGLDSKQLNDIDLASLTSSTTEDPLQELTDLRRQVVYLQGQVDDRDRTIRLQRDLIEQLEAEKRQKASHGPGSGADPGKELISMATQTERTRPLAIGAEGLSRSKPEYTSYTTHFPMLHLHDSTLAATTIIRHHQSNHEQQQPEKSCPALSQTRRHTIISTTLTNYNQQLAAAFPDATRRSSIGWDTTPTTPTPHGNASKPVRITLIGEAQPLQSKSSTGSLCSSSSSSSSSSSSSTSLLAQNANVVKMRYTNGCQSVKNGSSAHYQPLYNSNKMTSPTVTIV

SEQ ID NO: 33982 - DNA, 3652 bp, DROSOPHILA
caattgattggccaatcaaactaattcacttggcactttcacacgaatttctgtttccgcttaacttaatcttaattaagaaatttttaactttcaaactttgtgccaaacttttctttcggcaaacttgttgaaacttccgattgctgttcgcctatgtgttataagttcattatcggccaaacattttttccacacagttcgtaatgatgtaaacaaagaagaaacgccaggtaaaatcataaaaaaaaaacttttgccacacacaaaaagttcttgttttcctcaaaaaacttctgagggttcttgttttcacaaagcacaatttatttgcagtctagttttatttttgaattgaatttttttttgcgcaagccatagacattcttcgatattttttcaattaattgataattctcggaatcgaatgcgtgtgtttatattcgggattcgctgtctttcaaacgctctgttgagtttggcggccaattgggctgttgattccttgccggttcgtccaaccagcaggacaatgagcgcgcaactaagccgagacaatggacgtggcagccttttaaactgctttcgattgactcttggaaggcgccaagtgaaagctttttagctcgaccactgcgccggcgcggattcattcataaaatcaacaggtgacaaggtcagggttggcaggaacagcagcagcagcagcagtggcaacaagtggtagttggtgccgtcgaaggattagcccagcaggattcgcaggaggagaacggcgccactaggtggtagacaatgggccgctaaacagccaattctcgcgcaattcttgtggtcacattgtcactgggcggtaatgaaaacaataacaagccgccgccgtcgcggcttttccagttgccggaaaagctcttttcagtggcattggaaaatggccaacagcattaccggaggttatacttagttgccttttggccgtcctccagtgaggagccctgaaatggccacgcagcctggggcattgcttcctggttgggctttaaaatgtcgtaaaattttacgagatctactactgaattaactcgtcgttttctttcccattttcagaggatgacaaggtgggcaccttggacgtcttgctgagcagcgcttactgtcgatcccagcgcttcctgtcgaaacaactggcgcagctacgaccggaacttaccatgtccatattttctggtgagtatttcatctctgttaacttgaaacagaagaaaaaatctaaatttatcaatatttattttatattgggatatatattacagaaatcacccatcgattccaaagtgctcgagaggatgtgcgtgccctgctgctacagtgtctccttccctggctgcaaaacatggagctggtggccacaagtgtgccgcccgccacgcccctttcctacattatggtaagcgaagcatgaaatggctcatcctctttgaaaaccggagacgcattcaaacctttgctcccttctatcctttggcagtattttccggattcagggacgcgaggacgacgcgagggcaccggttcaacggaggcaacggaaatgattctgaacaatctcttctacatcacagccaaggtatgacgatatactgcttatcttcacgtcacagcggatggactttaatctttaattgtttccactgcagttctccgacgcccatccacgcgacatcgaggagctgtggggcacactttgccagttctggccgaacaatctgaaggttatcctgcgctacttggtaatcatgagtggcatggcacccactgaactgctgccctatgtaagtgccgtacttcaacggtaaccaggagtatctttgatgttttcgaaaatttctttaatcaggccaagcgagtggcactttatctggtgcggagttgtccggatcggttgttggatgagctcatggccgagctgcagacggtggagacgctcaactgtctgattgagcgcacggagacgccacctttctaccgattgaccagcatgcgaaaggcatccagtcacagtgctgatggtaggtcttaaaattggcctctcggcaatctaatacttaagtgttgaatttaaattgatcattttgtgacaggccaagctgcaggtggcattaatgactccaggattcaggacctggctgttgaaaagggcacaattcacaccaagcggcacagcggagaggatcccatgaaaatagggtaagtccatttgattgattaaaattttatatggtattaatatattcaatattcaattcccgcagaacctgcaaatcggacagcggcattagagcctacacacaagcagccgcagctgctgccgccgctgcagttactcccggctcaagtggaaatcgtccacctcgaggcgccgataagattcgcgccgcatcgggaccttccatacttcctcgaccagaggatatactgattaacgatccggagttgcggcaagaggaaaatgtagagctgcgcggaacgtcggatgctgcgccaaacggccatccacatccactgccaatgccagaatatggaggatactttgctccactcactgagtttctacccgatgttagtttaccgatcagtgggttccacaggtgagttgtttcgatattttttgtacatttaaatacatttccttaatattcagtacgcaagttaatacttttcaatagatagtcaagaaatttggtttgcagttttcgaatgaatttatttagaaaagcaaagactttgctgaagaatcctcaacattgtcattactgttcctaagtcaattagtaggagatgccagtctggtcgcggatccattctaggtagtccgagacgcgggtgtagccagagggtccgtcgtggcagctgacggaggcaaaggtgatcacaccgacgagacgagcattgtcgtgtgtaaccagggggccaccggagtcacctccgcacacggactttccgtcggcgtgacgggtgcacatgtcggtactggcaaccgagccgtaggcctgctcgcactcgctgttgctgatgatctggacatcgacgcactgcagccagtcggccaggtttccgttgtccataccaccccatccgcaagcgacgcaccaggtgtcctggtagcggtcgttctgctcgttcatgcttggcagagggatcttgttgatcagtccgttgaagtcgacatggggagtgcggatcagaccaatgtctcggccgccctgggaaggccagtcggggtggctaatgaagttgtcgcgacggacggtctgcctgtaggcaccgttccagccccagttggatccgtagtggatctccacgtagtctccggtcaagcaatgggcggcagtcaggatccagtcgttggcaatgatggtaccagcaccaacggcaccactgttgcttccatcggtacggatgaacaggcccacaatgtagggagccttgccctcgggcgctgggtagccgttgacaatgcgaccctcggctccctgggacaggagggtggtgcggttcagaccggtcggggaggcggccaccagggccaaagccgcggagagagttagcaggaacagtttcatggctgtgaagaaacttattcttctagtcg

SEQ ID NO: 33983 - DNA, 1137 bp, DROSOPHILA
atggccacgcagcctggggcattgcttcctgaggatgacaaggtgggcaccttggacgtcttgctgagcagcgcttactgtcgatcccagcgcttcctgtcgaaacaactggcgcagctacgaccggaacttaccatgtccatattttctgaaatcacccatcgattccaaagtgctcgagaggatgtgcgtgccctgctgctacagtgtctccttccctggctgcaaaacatggagctggtggccacaagtgtgccgcccgccacgcccctttcctacattatgtattttccggattcagggacgcgaggacgacgcgagggcaccggttcaacggaggcaacggaaatgattctgaacaatctcttctacatcacagccaagttctccgacgcccatccacgcgacatcgaggagctgtggggcacactttgccagttctggccgaacaatctgaaggttatcctgcgctacttggtaatcatgagtggcatggcacccactgaactgctgccctatgccaagcgagtggcactttatctggtgcggagttgtccggatcggttgttggatgagctcatggccgagctgcagacggtggagacgctcaactgtctgattgagcgcacggagacgccacctttctaccgattgaccagcatgcgaaaggcatccagtcacagtgctgatggccaagctgcaggtggcattaatgactccaggattcaggacctggctgttgaaaagggcacaattcacaccaagcggcacagcggagaggatcccatgaaaataggaacctgcaaatcggacagcggcattagagcctacacacaagcagccgcagctgctgccgccgctgcagttactcccggctcaagtggaaatcgtccacctcgaggcgccgataagattcgcgccgcatcgggaccttccatacttcctcgaccagaggatatactgattaacgatccggagttgcggcaagaggaaaatgtagagctgcgcggaacgtcggatgctgcgccaaacggccatccacatccactgccaatgccagaatatggaggatactttgctccactcactgagtttctacccgatgttagtttaccgatcagtgggttccacaggtga

SEQ ID NO: 33984 - protein, 378 aa, DROSOPHILA
MATQPGALLPEDDKVGTLDVLLSSAYCRSQRFLSKQLAQLRPELTMSIFSEITHRFQSAREDVRALLLQCLLPWLQNMELVATSVPPATPLSYIMYFPDSGTRGRREGTGSTEATEMILNNLFYITAKFSDAHPRDIEELWGTLCQFWPNNLKVILRYLVIMSGMAPTELLPYAKRVALYLVRSCPDRLLDELMAELQTVETLNCLIERTETPPFYRLTSMRKASSHSADGQAAGGINDSRIQDLAVEKGTIHTKRHSGEDPMKIGTCKSDSGIRAYTQAAAAAAAAAVTPGSSGNRPPRGADKIRAASGPSILPRPEDILINDPELRQEENVELRGTSDAAPNGHPHPLPMPEYGGYFAPLTEFLPDVSLPISGFHR

SEQ ID NO: 33985 - DNA, 6222 bp, DROSOPHILA
atctatatctttaattctatatatatatataaatatacatatatgtatatatatagtgggggatatatgcgcatactgcgcggctctttgcccagttctatataggatgcccaagtaggttggatgactgtttattgttatggcgatttgttatgcctgggcggcaaatcaagtgggcgcaccacacgtccatccatcttgcggatatagtctgatcccggccaactaactatctatcatctatcttgtggccaaagcagatataagtagttttgtgactcaaaagccagcgaatcgttggctaaatttaaacggctgtcattttgggcgaactaaaacaaatctgtttttaaacgtattcacacaggtgtacatggcaaaagttggctcattaaaattattagcaagcttgtaactcatatgtgtgtgtctgccatatcatccattgaaataatccctacgctcgcaattatttgatataataggaatggtttgctcgttagccacgcaacaaattcgttttgaccgtcaaacgtcacagataaatacgaaaaattttacgttcacaatatctagttgccacacaaagagtcatttaatttgtgcatgcatgacaattaattttggctacaaacgagtctgttgtttacatataaatactcaacatacatttgagatatgtttatgcacacaaaggtataaattacttaaagggacaacgaattcttgtttcgagttattgactatttcgactgggcagaaaatgtgtggcaaaatacctagttaattaaaacattcattggtcccgaatatatatgcacatacatatatctgtgatatatgtctgctcataaagtcagcaatataattcgaaaatagacgcatatgatctgtctgcaaagcatataagctgaagaaaaatgaaattttaaagaaaaatatcaatagcgagaaaatttgaaattcgcataatccctaaatgcccaaggtttctctaaatctactgagtcactgaaaagaacactgaatcatgtggaagaatcccttggatcacacataatgggatacacaaatcggtggggatgtcacgcaccttcaatacccagatatggacgaggtgatacattatcgaatgatcggttaacgccgaaatctcgctgcacctcgtcgaaggaggccagggatttgaacttgtgctgctcctccgcctgctcgagactggggaattcgaagggcgtgggctgtgccgcagaacgtgggggcgtggcagccagcattgtagaggatgccgacatgctctgctgcagtggctctgtggccgttttcaccaggagtccaatattgtgaccttcgagctgggggacatgcgtgaatttcgccggaagattaaccggcgatggtggagctttcgtctggacgggattgaggccatagggtgagctggagcgctgcggagcttctatgagtggagcgggatacttgcgagatggcagcggactgggcgaacgactacgctcccatgttacttccgtttccggtttctgaagtgccaactgtctgggtggaggaggtggcggcggcggcggcgtcgatggaggcggagattctgtcgctggtgtggtcacaatttccacaaaacttcgttgtcgttgcagtttctccggtggcacattctccttggccgactgcatatcctcccaggagatttgccgcgagatatacggactccgtatctcataggtggctttgtagttcttcaagggttcgttgtgcagattggcaatccgccactgatcggctttgttaagtttgccccaggtgtttggtgagcagcgcatttcatcacaaactgggcagtagactgaggaatcgccatggccgcaggatctctccgtttcctccaccgcatccgcatcctttgtaagatctgctggggcttcactagtacccaaatcttttttactctctttttggatagctgatttgtcttccaccaactcctctttggatgctgctaccgcctttgcatcctttttcacatccttttcaacatccagtttggtcacgggtttttcctctccttcaagtacctttttacctccccttaatccttttttggccagctgctcctctatagcttttctcaactctgttttgggcagcatctcctcgctatttaccacctgctcctccttccactcctcgaactcctttttggccaattgctcatagttggcaattacatccgatacgtgtctgtactccatgtccgcgtcctgttcctcgtccttgatgactacgtgctccgcttcagagacagctggcgttgtccggagttctacgtgcatgagtttcgcgggctccgatttttgctccagtgccaccgcaatcttgtgcagatcctccagtgcccgctccacgatgggcacgttttcggtaagagattcctcctccgcctcggcgtcggcatcctccttaatctctttggaaagcctttttggtaatccagctgcccgggtgtaaatctgtcggagtattgcctgcaatgggctttccacggccaaaatgggtgactggcgatgggcgaagatgtcccacgcttcgttggacgccgaactgattggtctggcgggtagggctgttggtggtggcggaggaggtggcggtggagttgctgttgctgttggtggtattggtaccggagttgatactggtgtggtctgagcgctcctttgcagcgcctgcttggcattctccatataggcatcgatctggagcaagtgctcagctatggattgctggatgtgggcatacttagcctccaactgggcgatttcaacatgtgcctcatgctgcttctccgttgcggtctccagactgtagatgcgtccctgtcttttcgtctgattttccttagcctgcgaatcctgaccagacttggaacgcattatcggcgatggcaagggtggtggaactggagtgcttggcgtactgctcgactgccgttggagcaacttaatcccaccggtggcactcacataggtgggactctcggttcgcggctggatgtcctccatctcctggtgatcctgcagatacgaacaggcgtcgtcgtagatctgctgggcactcagcttgagctggtccgccgatgcctccacgcgaatgggcacaatgcgagtgttggccaacggacttggactcggattcaccggactgatgctcccatttgtggccaaagccaaagccatctgctgctgctgtttaactgccacgttgtcaattaccattcgccctgctgtcttcgcttgattgagatttgcggcagctggcgacaccggtgtcggtggcagcggcaaggtctccaaatccacatcttgaccagaattgggatcatcctcgctgtcgccgtcgtggccatatgagatctttacctcagtggccagttttatgcaccgccgttggacttttggctttgaagttctcggcttaggtggcggcaattccggagcacccactgtacgtttccgggagcggctacgatccagggaatgagcctgtctcttgtatcttggcctatatggagtgatttgagtgggcagagttggtgtggcggaccttttgtgggccaattgctcgtagtactcacatcgcggagccaccaaacccaaatccacatcggctgccttggtctctggagcggagaatcccttggatatgggagtttgatggaaaacttccgccaggtcaggttctttggtgtgcttttggagcgtttttgatctctctttggagccaccatcgcgtcgtcgctgctctctcacttcattggcagtgggttcgataaccagggtgggactctggaacttctccctcagagcctcaatactgtgcgatgggctgcaggagatctgatggctctgttcgggattgatagttggttgatcctgctcagctggaggccagctgtgatcccgtttgagcagatgcctcttggtggccagacggttgattttcagcaccgtgtcccgatcgatagtgatgtcctgctgatgactgagatagtctgttttgatctggttcagaagctgctggtgcagcgtgtgatgcagtgcatccacctcgcctcgttgacgcgggcgactctgcctttcagtggggtaaaaatctttgtgggggaagtcccctgaatttatttaaatttatctgtaaaaaacactaatattggacgagcactgggactggagtttgctgttttgttgtatgtttctacactgtttctttttgtctaggcaacataaaataaacgcgcatagacaaatatccaaaaaagagaggtatatcttaccacatttggcttgttgttcttcctcttcgacggcgcgcagaacggccgagttggccaagttcaggggcttcgttatttgatcgtcgacttcaatcctaaaaataacgtaaaaatacaatacaattagtaagaatcaatgcacatcgtatattgtatgaggtaaaattttaaatttcgcggtatatactgcttgtgtgtttggcgcactgcttcgactgcttgcaagcagttagcgccaaatttaaatttatttttaaatatgctctcctcgcaggcatgtattcgattgtcatgcgttcttttggtatatgttatagaattatacatgtgaacaggcaaaaatgtaatatacgactttactttcttagatatacaataagtacattacttaaatatttcatgaaatacaaacttatgatcgtatgcactatttgcacgataagccaattaaacatattgaaaatgaaagcccttctaactaaagaccatatatatcgttatacattttgatttcagctattatatatagattccgccacccccttggtgcatccgattaagcgaaagttacgctaatccatgggcataaattaatgatagcaccctgcgatgtcctgacattgaaaattagcaagtacgctcctgcccacgctgaccccaaaagactaatccaatctgacaggtgaaagtgcgccggcggatataaaaatggctgacagcggcggaaactgcaccacatcctatccagcagcagttccagcaaggcaatgatgttccgctccgtgatcccagttctcctgttcctgatcccgctcctgctatccgcccaggccgcaaactcgctgcgggcttgtggccccgccttgatggacatgctgagggttgcctgtcccaatggattcaattcaatgttcgccaaacgaggcacctgtgagtatcggctgcgtttttttggggtttggggtttccaaacggcacgaactcacttattttacttgcagtgggcctattcgattatgaggaccacttggcggatttggatagctccgaatctcaccacatgaactcactgtcgagcattcggcgcgattttcgcggcgttgtcgactcctgttgccgcaaatcgtgttccttttccacgttgagggcatactgcgactcctaaaaatgctgcgatacctggtccatcagtttacatacatacatatatgagacatgttacgtaaaagtattaagtataaactatatgcacggctttgaaacttgaaactacaataaataagcgcaattcgaaacatcgctttttaatttcttcaaacattaaatattataaatatttcgataataattttagcctttaaaagtgaacagatacactaaatggttagcaaaagaacaatatgaacaattttaaacacactttgatatatccaaattctattataacaatgtttatttttttccatacgaaaatatgctcctttgagcggaaggaaaatcaaattttgatttaaatcgcagcaagttgggtggaaattttgcacacaaacaaaactatgcctttcgcttgcctggcgattttctttaagctggcaaaaagagttttcaactttaattataatttgcttgaaatgttttgctttcaacgcatcatcttaatctgggacgaaatgttttgcctcaacaaaacgagataacaaacagaaatatttaagctaagaaaatgtgcctgctgagataagaccttaaagaatttatggacgacaaagtccagagataatcgccaagctttaagctttttcggcaatttaagacgaacgtcagccattcctcattagatccgacattgaccttttagctgggaacatttggca

SEQ ID NO: 33986 - DNA, 3423 bp, DROSOPHILA
atgtccatcaaggcggggccacaagcccgcagcgagtttgcggcctgggcggatagcaggagcgggatcaggaacaggagaactgggatcacggagcggaacatcattgccttgctggaactgctgctggataggatgtggtgcagtttccgccgctgtcagccatttttatatccgccggcgcactttcacctgtcagattggattagtcttttggggtcagcgattgaagtcgacgatcaaataacgaagcccctgaacttggccaactcggccgttctgcgcgccgtcgaagaggaagaacaacaagccaaatgtggggacttcccccacaaagatttttaccccactgaaaggcagagtcgcccgcgtcaacgaggcgaggtggatgcactgcatcacacgctgcaccagcagcttctgaaccagatcaaaacagactatctcagtcatcagcaggacatcactatcgatcgggacacggtgctgaaaatcaaccgtctggccaccaagaggcatctgctcaaacgggatcacagctggcctccagctgagcaggatcaaccaactatcaatcccgaacagagccatcagatctcctgcagcccatcgcacagtattgaggctctgagggagaagttccagagtcccaccctggttatcgaacccactgccaatgaagtgagagagcagcgacgacgcgatggtggctccaaagagagatcaaaaacgctccaaaagcacaccaaagaacctgacctggcggaagttttccatcaaactcccatatccaagggattctccgctccagagaccaaggcagccgatgtggatttgggtttggtggctccgcgatgtgagtactacgagcaattggcccacaaaaggtccgccacaccaactctgcccactcaaatcactccatataggccaagatacaagagacaggctcattccctggatcgtagccgctcccggaaacgtacagtgggtgctccggaattgccgccacctaagccgagaacttcaaagccaaaagtccaacggcggtgcataaaactggccactgaggtaaagatctcatatggccacgacggcgacagcgaggatgatcccaattctggtcaagatgtggatttggagaccttgccgctgccaccgacaccggtgtcgccagctgccgcaaatctcaatcaagcgaagacagcagggcgaatggtaattgacaacgtggcagttaaacagcagcagcagatggctttggctttggccacaaatgggagcatcagtccggtgaatccgagtccaagtccgttggccaacactcgcattgtgcccattcgcgtggaggcatcggcggaccagctcaagctgagtgcccagcagatctacgacgacgcctgttcgtatctgcaggatcaccaggagatggaggacatccagccgcgaaccgagagtcccacctatgtgagtgccaccggtgggattaagttgctccaacggcagtcgagcagtacgccaagcactccagttccaccacccttgccatcgccgataatgcgttccaagtctggtcaggattcgcaggctaaggaaaatcagacgaaaagacagggacgcatctacagtctggagaccgcaacggagaagcagcatgaggcacatgttgaaatcgcccagttggaggctaagtatgcccacatccagcaatccatagctgagcacttgctccagatcgatgcctatatggagaatgccaagcaggcgctgcaaaggagcgctcagaccacaccagtatcaactccggtaccaataccaccaacagcaacagcaactccaccgccacctcctccgccaccaccaacagccctacccgccagaccaatcagttcggcgtccaacgaagcgtgggacatcttcgcccatcgccagtcacccattttggccgtggaaagcccattgcaggcaatactccgacagatttacacccgggcagctggattaccaaaaaggctttccaaagagattaaggaggatgccgacgccgaggcggaggaggaatctcttaccgaaaacgtgcccatcgtggagcgggcactggaggatctgcacaagattgcggtggcactggagcaaaaatcggagcccgcgaaactcatgcacgtagaactccggacaacgccagctgtctctgaagcggagcacgtagtcatcaaggacgaggaacaggacgcggacatggagtacagacacgtatcggatgtaattgccaactatgagcaattggccaaaaaggagttcgaggagtggaaggaggagcaggtggtaaatagcgaggagatgctgcccaaaacagagttgagaaaagctatagaggagcagctggccaaaaaaggattaaggggaggtaaaaaggtacttgaaggagaggaaaaacccgtgaccaaactggatgttgaaaaggatgtgaaaaaggatgcaaaggcggtagcagcatccaaagaggagttggtggaagacaaatcagctatccaaaaagagagtaaaaaagatttgggtactagtgaagccccagcagatcttacaaaggatgcggatgcggtggaggaaacggagagatcctgcggccatggcgattcctcagtctactgcccagtttgtgatgaaatgcgctgctcaccaaacacctggggcaaacttaacaaagccgatcagtggcggattgccaatctgcacaacgaacccttgaagaactacaaagccacctatgagatacggagtccgtatatctcgcggcaaatctcctgggaggatatgcagtcggccaaggagaatgtgccaccggagaaactgcaacgacaacgaagttttgtggaaattgtgaccacaccagcgacagaatctccgcctccatcgacgccgccgccgccgccacctcctccacccagacagttggcacttcagaaaccggaaacggaagtaacatgggagcgtagtcgttcgcccagtccgctgccatctcgcaagtatcccgctccactcatagaagctccgcagcgctccagctcaccctatggcctcaatcccgtccagacgaaagctccaccatcgccggttaatcttccggcgaaattcacgcatgtcccccagctcgaaggtcacaatattggactcctggtgaaaacggccacagagccactgcagcagagcatgtcggcatcctctacaatgctggctgccacgcccccacgttctgcggcacagcccacgcccttcgaattccccagtctcgagcaggcggaggagcagcacaagttcaaatccctggcctccttcgacgaggtgcagcgagatttcggcgttaaccgatcattcgataatgtatcacctcgtccatatctgggtattgaagtgactcagtag

SEQ ID NO: 33987 - protein, 1140 aa, DROSOPHILA
MSIKAGPQARSEFAAWADSRSGIRNRRTGITERNIIALLELLLDRMWCSFRRCQPFLYPPAHFHLSDWISLLGSAIEVDDQITKPLNLANSAVLRAVEEEEQQAKCGDFPHKDFYPTERQSRPRQRGEVDALHHTLHQQLLNQIKTDYLSHQQDITIDRDTVLKINRLATKRHLLKRDHSWPPAEQDQPTINPEQSHQISCSPSHSIEALREKFQSPTLVIEPTANEVREQRRRDGGSKERSKTLQKHTKEPDLAEVFHQTPISKGFSAPETKAADVDLGLVAPRCEYYEQLAHKRSATPTLPTQITPYRPRYKRQAHSLDRSRSRKRTVGAPELPPPKPRTSKPKVQRRCIKLATEVKISYGHDGDSEDDPNSGQDVDLETLPLPPTPVSPAAANLNQAKTAGRMVIDNVAVKQQQQMALALATNGSISPVNPSPSPLANTRIVPIRVEASADQLKLSAQQIYDDACSYLQDHQEMEDIQPRTESPTYVSATGGIKLLQRQSSSTPSTPVPPPLPSPIMRSKSGQDSQAKENQTKRQGRIYSLETATEKQHEAHVEIAQLEAKYAHIQQSIAEHLLQIDAYMENAKQALQRSAQTTPVSTPVPIPPTATATPPPPPPPPPTALPARPISSASNEAWDIFAHRQSPILAVESPLQAILRQIYTRAAGLPKRLSKEIKEDADAEAEEESLTENVPIVERALEDLHKIAVALEQKSEPAKLMHVELRTTPAVSEAEHVVIKDEEQDADMEYRHVSDVIANYEQLAKKEFEEWKEEQVVNSEEMLPKTELRKAIEEQLAKKGLRGGKKVLEGEEKPVTKLDVEKDVKKDAKAVAASKEELVEDKSAIQKESKKDLGTSEAPADLTKDADAVEETERSCGHGDSSVYCPVCDEMRCSPNTWGKLNKADQWRIANLHNEPLKNYKATYEIRSPYISRQISWEDMQSAKENVPPEKLQRQRSFVEIVTTPATESPPPSTPPPPPPPPPRQLALQKPETEVTWERSRSPSPLPSRKYPAPLIEAPQRSSSPYGLNPVQTKAPPSPVNLPAKFTHVPQLEGHNIGLLVKTATEPLQQSMSASSTMLAATPPRSAAQPTPFEFPSLEQAEEQHKFKSLASFDEVQRDFGVNRSFDNVSPRPYLGIEVTQ

SEQ ID NO: 33988 - DNA, 2465 bp, DROSOPHILA
attatactcctcgcacaccatactcagcacctcgttgagcttttcactgcagagcgttccttgggccaacttcactgtggagctggccagcaaaatcacggccaccatcgagatgaaggacaaaggcttgctcatggttatgggtttactgcttaggttgctttacgatcaaatggattaagttgggtcgagccgggtcgaaagctaactgatgatgtttggcccaaagtaactggcttatatactgcctcgtaagaaacttaaactgggtctgggtcggggtcggtctctcggggtcggggtctggatccacacacatgttatcctcaaaagtcaggttgtcaaattgtgttaggatgcgatgagtgcattccggagttggctcttctctctaacgcctggctaaactcattcaatgtcaaagctgacttatgcaaatggctattggaaaattgtgggtggtttttgggtggctgtgtttgggagaagaagggctttgtgggcgttttgctgtcagccaattaaacaatttatgtataaacagccaggccgtactaagccctgcatttatgaataccaaataagtccttggtcttaaagttacctcgcctttacagcccgtttgcctctaccatttctaccctatacttaccaatccgcgcctgggcgcccggcaggccggagtaggccaacaagaacccgagccagctgattggagccagcagcatcctggcaacgaattacgcctccttggtacttttcctttgactgtcttgtctttgccgctcacacaaattcttctttttgcactgtctacttttattcattagtcaaagttggtgctgcataaataagtgattacgaattggattacgaatgctgttaggagaacgggtgtacatatagtatgtatgtgggaatgccatgttcaagtgttcgtatgtatgtatgtatgtgtatgcatgctgggtaatgaatgtgtgtgtgttggccaagtgtcctatttcggtagacagtagatggctaactccaagtagctgcaggtcttgacgcagcactcgtcgtagacgccaccggtcaggtgtctcctgtggcgacgcatcttgatcaggacctcggatccgtacagattggttagcagtggactaaaagagtatcctgccccgtccagtgtctgccacatgctgctatcatcctgcacctcctgctccgtgtcctcgtcgtcgtcgctgttgcccagcaagctttcacgtttccttggcagcgtattaaagccatggggacacaccacatccatggcatcggacagtgcggggccgcagagtttgtggtttccggggggcagcaactggtgaccactgccagtcggcgtgaccattgccattgcagcggtgagcatggctgcgatgagcagcgactggagccgaaggccatgtactgctgcaccgttgtgctggctaaacatcttggatatgcagtgaatgctctgggctgcaactggtatttataccactaaatcggaagcgctagctaatgcagttcaatggcctcttctgcagtctagcattgcagtggcatagcaagccccacgggcgtacaaactgcaaatcctttgatcacccatgtttcaggtaccgtttttcccctaaaaatgcaaactctatttctagctctactccccaatttggatggaaaagcgatgcactgttgttttggtagttggggtattgtattgtatttcttagcaaatatcagttgtatcattacctatatctatctataccaatagtttggaatgtatttgtaagacatttttaagatattcagaagagttagccttatgggacttgctctaaagtgtgaattgatgcacacagctttatcgagcatagttttcagtgtaatcaccgccaaaaaatccgcccacttcaaagcataacccgttcgcccaacctgttacattgccgctaagaggctctgactgctgtcgattgcgattacgattacgaccagatatctgtggggcatggggataaggggtatgtgggccgatggctgacagtgtggcagcctcattagcatgtcgtggccaggaggaaagtatgcttcgatgaagctcctccggcggcagtgtgcgaaatcgcttcgatcaccatcatcgccatcgccatggccactcgattgtcgagttgcacgcacggcgatgccaacagttggttgccagcgctgcactcgaaacactcgcttcttcccaccgaccgcaaagtgccggaaaagctagaaaaaaagcaaaaaaaaaagtggaagaaaattcgcgatagaaaacggaaaaatcgaaacgaacaaaaaaagtcggaataaatcaaggaaacatggtgctcgacattaagatgtgccgatttgataatgtgccctggggctttcgcctggtgggcggggcggactacgattatccgctgacggtg

SEQ ID NO: 33989 - DNA, 465 bp, DROSOPHILA
atgtttagccagcacaacggtgcagcagtacatggccttcggctccagtcgctgctcatcgcagccatgctcaccgctgcaatggcaatggtcacgccgactggcagtggtcaccagttgctgccccccggaaaccacaaactctgcggccccgcactgtccgatgccatggatgtggtgtgtccccatggctttaatacgctgccaaggaaacgtgaaagcttgctgggcaacagcgacgacgacgaggacacggagcaggaggtgcaggatgatagcagcatgtggcagacactggacggggcaggatactcttttagtccactgctaaccaatctgtacggatccgaggtcctgatcaagatgcgtcgccacaggagacacctgaccggtggcgtctacgacgagtgctgcgtcaagacctgcagctacttggagttagccatctactgtctaccgaaatag

SEQ ID NO: 33990 - protein, 154 aa, DROSOPHILA
MFSQHNGAAVHGLRLQSLLIAAMLTAAMAMVTPTGSGHQLLPPGNHKLCGPALSDAMDVVCPHGFNTLPRKRESLLGNSDDDEDTEQEVQDDSSMWQTLDGAGYSFSPLLTNLYGSEVLIKMRRHRRHLTGGVYDECCVKTCSYLELAIYCLPK

SEQ ID NO: 33991 - DNA, 3108 bp, DROSOPHILA
aatgggaaatcattggccacaaatattaccaaccaaccggctgacaaacatgcagtgcctgcaaaacgtcctgttttatcggtggcctcgagtgacgaagaagatgaaggggacctatttcaattccgtaaatctccacagaagccagcagagactgtggttcagccaagaatcgcaggcaaaggcaatgcacctgccagaatcagtgtagtcgactttctagagaaatcacaggcacaagaaccagctccagtgccaccccaattggagtcccaatcccagacacaaccgcgcaagcgtttacgccttgagctgctaaacgaaagcgacagcgatgattgtgataatctttttaactttgcagacagcaaaaagaaacgaaagacgcaagaggctcagagaaatgatgactccacggatggcttgtttaacttcaactctgaaagaccgtctgatcatgatgacgaggattcccggttaaccgaaccatttgtacccgaaacggaaagcaagaagcaatccaagtacatagtggcaccgcgtagagatagacccaagaaagtggacatcagtggttggttatcgtgtagcaggctaaacgataatatcaaatccgaaatagatgcagactcagttaagatggaaacctctattaaggcggatcccgatgaggagcaatggctggccgccatgaaagacagcattgaggtgcgcatgtgcaacttaaacattgtcattcgctcccaggaggaagtggatgcttctcttgaggattctgtgaacaagcatggcggccgcaagaactttaagaagtttgtaaaggtgagtctcgaattaataacaaatattaaaacgacttatttatttgtgtacctctgttagaccaaaaatcctcatccccaaaagcgaattgttgcgcttaagagtcttcggctggctgatggtatggtaacctgtgtttaatgtcgtgcctaaacgtaattaaccgtcgcttgtgaagttactttattttgctaacaataaacttgcgaaatatgttcaacgccttttccggctccttggacaacttgcgattgaacatcgtctgtgcggccagccactcgtgcttggctatctttctggtaaaacaactttctggaggaggattcagtttcctggcctgcgactcgcgttcaatgaacttctgtgcatccgccaccgtggccagaacgttttcattgaatgtgggtttctttgtatcttgaacgggtgtttccttcctggcaattatggtgcccacatcagatttggccaacagtttggctttttctactttggtgacgacttttttcggtatcaggacaatgtctggtgtttcgtctttctgcgtttggttattagttctcgttggaggttctaatctggcaggaagctcttgattctccgccagaaacttgtgcttctccacctgcggaaagttagcaatctgggggcgcagtttgttgtaaagtatggcacttttgccggcctgcaaggagctcagtttgctaatcttggcaatggcagcgattagcagcgtggtgaagtccatgaagaagttgttgcgcaggagttgagtgaagtatgcggctgcactgaggcagcattccctgatccgctcgtgcagatgataaaaacccaggagacgcaccaaaataaactcaaagctgcttcgcgtgggcatggctccgcccaaatcttcatcgcacacatccggcagcacaccgcgaaagtttttcagatccctggccaaatccaagcgcagcaggcggcacagtgccgcattaagtttgcagacggaacgaaatcccggcatattgcggaaggagttcttccggcgagccattagtcgtccaatcatcgccgccgtctcctcgaaatccttggcatccggttcggacaactgttgcaggaacctgttgatgaccacgaacacattttttgctgtttggaaggagagatcccttgattttgtgattgtttcagatggccaagggtaacaacataccgaaacccgtgtccttcaccagcagcgtcaccaacggaggttgtttcaatttaaagtcattccaaaagaattcattttccattttcgtgttgtggtttgaaaattctaaataaaagaaactgtccgtcagagctgtttgtttttttatagctagatttgttgtatcggaattagccgaagtccacagcgccaatacaaagtatcggtatatatttaaaccatatataggctatgcatcttaattctataaaaaatttatacattcattaaatattttctaatatatacactttcggttagattttggtaagcagattgtcatcactaattctagctttgattagtcggcctttagttttttgttaagatctggtcacaccgccgtttacacgtgcaagttgaattcgaaaagaaaacattttaattttccggtaaaacatgaagaaaaagcaggtggaaagtgcatccgaggaggaggaagtgcagtccgaaaactccgaggcttccgacgaggaggagctacaggcagaggactccgacgaggaccagctgcaggcggacgactccgaagacgaagattccgatggatccgaactggatctggacgccagtgacaccgaatccgatgaagatgatggtgaggaggaagatacaatcaaaccgcagcccaaaagccgtgccgagattatcgacgagaagatccacaccaagtacgagcagttaaagggcacccggctgtatgtccggtttccccaaaaactgcccctggacttggatgaattcaatgccaaggtgaaggctctgcatccactggttctgaagtccacaaagcctcgccagaagcatgcacgtttctgcctcgtcgatttcaagtcgaaggaagatcgcgatcaagcctttaaggatatcaaggcttcgatcgaaaaggatgacaagcacaagggcttattcgtatcactgcctaagacggattccgatgattttgtcaacgagctggtgacccgcaagcagacatccatcgtaaacaaacgtaccaaggccctgatgaagcgtgctactaagaaggtcctcaccaagggtaa

SEQ ID NO: 33992 - DNA, 1044 bp, DROSOPHILA
atggaaaatgaattcttttggaatgactttaaattgaaacaacctccgttggtgacgctgctggtgaaggacacgggtttcgcaaaaaatgtgttcgtggtcatcaacaggttcctgcaacagttgtccgaaccggatgccaaggatttcgaggagacggcggcgatgattggacgactaatggctcgccggaagaactccttccgcaatatgccgggatttcgttccgtctgcaaacttaatgcggcactgtgccgcctgctgcgcttggatttggccagggatctgaaaaactttcgcggtgtgctgccggatgtgtgcgatgaagatttgggcggagccatgcccacgcgaagcagctttgagtttattttggtgcgtctcctgggtttttatcatctgcacgagcggatcagggaatgctgcctcagtgcagccgcatacttcactcaactcctgcgcaacaacttcttcatggacttcaccacgctgctaatcgctgccattgccaagattagcaaactgagctccttgcaggccggcaaaagtgccatactttacaacaaactgcgcccccagattgctaactttccgcaggtggagaagcacaagtttctggcggagaatcaagagcttcctgccagattagaacctccaacgagaactaataaccaaacgcagaaagacgaaacaccagacattgtcctgataccgaaaaaagtcgtcaccaaagtagaaaaagccaaactgttggccaaatctgatgtgggcaccataattgccaggaaggaaacacccgttcaagatacaaagaaacccacattcaatgaaaacgttctggccacggtggcggatgcacagaagttcattgaacgcgagtcgcaggccaggaaactgaatcctcctccagaaagttgttttaccagaaagatagccaagcacgagtggctggccgcacagacgatgttcaatcgcaagttgtccaaggagccggaaaaggcgttgaacatatttcgcaagtttattgttagcaaaataaagtaa

SEQ ID NO: 33993 - protein, 347 aa, DROSOPHILA
MENEFFWNDFKLKQPPLVTLLVKDTGFAKNVFVVINRFLQQLSEPDAKDFEETAAMIGRLMARRKNSFRNMPGFRSVCKLNAALCRLLRLDLARDLKNFRGVLPDVCDEDLGGAMPTRSSFEFILVRLLGFYHLHERIRECCLSAAAYFTQLLRNNFFMDFTTLLIAAIAKISKLSSLQAGKSAILYNKLRPQIANFPQVEKHKFLAENQELPARLEPPTRTNNQTQKDETPDIVLIPKKVVTKVEKAKLLAKSDVGTIIARKETPVQDTKKPTFNENVLATVADAQKFIERESQARKLNPPPESCFTRKIAKHEWLAAQTMFNRKLSKEPEKALNIFRKFIVSKIK

SEQ ID NO: 33994 - DNA, 3082 bp, DROSOPHILA
gatgttccctcttactcgatattgctaacactaatttcattattagccttttttgaggcctttgtagccatggaccttcgatgagttctaaatttttaatgcttttgagtaacgcccatccaatttgtataattatttgtgtctcctatcgagttgcacaataaccacaacgaatagcaaattattttgaaggaaccatataatttgggaagcctaattgagacccaaacgccaatgcaaatgcataaaaagcgtaggatacgagctctcttcaattagtacaggattcatcaatacggaatgcaggaccaactggatcacgagctggagcggatcgacaagctgccaaaactggggcttctctgggtggagtacagtgcctatgcactgggagttaatattgcaccgaggaagcgtagctcgaaatactgtcgattgtatggcttaacctactatataaagattgtttttgttaaattagggtctttcttatccagaactcgcattttggtgttgattgttaacttgagtataatctacagtctcgtcgcctttattatggagaactatatgatctccttcgagacctacgttgaggtttggtttaatgtgccttattcctaatctgcgcacttctaattctttatatattctattaggctgttttgcttacctttcaattaagcgttggtgtggttaagatgtttcactttcagaacaaagtggaatcgtgttcccaactagtgttttctacggagactggagaggtattaaagtccctgggtctttttcaattgggtaagacagtagagtcagtgatatctgttctttaatatgttcgaaacatttcaaaaacagatttgccgagaaaaaaggaactgctgagctcagttagtttgattttgcttaacaattggatgataatcgatcgtcaggtgatgttcttcttcaagatcgtttgcatgcctgttctatactattgtgtgcgaccatactttcaatatatcttcgattgctatatcaaggacaaggatacctgtgaaatgaccttgagtaggcaaactaagggtaccacttcaacattctgatttaattaatatatgtatattacagcttacccggcaattgtgccttatttgcaattgggaaattatgaatttccttcctatgtgattcgcttctttttacttcaatctggtcctctttggtgcttttttggtgggtctgctaagttattaacttgaataataattaaaaaacttttcccttaagccgtttttggctttaacagccttttcgtggtccttaccagatatgagtctggtctgataaaagtcctaaggtttctggtccaaaattccacctcggatatcctggttcccaaggaccaaagagttaaatatcttcaatgttgcgtgaggctttttgctcgcatatcaaggtgagaggatagacttcttaaaactaactcttcaaaccacttttcatttagccatcataatcaaattgaaaacctcttcaagtatatcatcctggttcagtgttccgttagcagtattttgatctgcatgctgctctacaagatcagcacggttttggtgagttgattgataagctatagaatttacaaatctttttatttaaaaattgtttcattaggaagtgggctgggtgtggatgggcatgattatggtctactttgtgaccatagctctggagatcactctgtacaacgtgagtgcacagaaggtggagagccaggtatattatattgtataatttcaatttttatgtaaggaattattgtatttttagagtgaactgctgttccatgactggtacaactgtagttggtataatgagtcaagggaattcaagttcatgatcaaaatgatgctgcttttctcacgccgaacttttgttttaagcgtgggtgggtttacaagtctctcccacaagttcctagtgcaggtattgtattgaaattgtcttttatttcataccatattaagattccactttcaggtctttcggttgagtgcaaacttctttctgctcctgcgcaacatgaacaacaaataggtttcctagtacttacttggaactatttcgttattgcggttacggattcgatagtaacttgcagttattaaaacagagtcgtgcagttttgttcataaaaataacaatttctatttattatatcgtgttctttctacactttcaagctacgcctgaggcctattgctcctcctcttcgtcgtcatcttgatttggctgcacactgccctccacatcgaagaaggattttctactgcgtttggccgcagtggccgcttgactgccatcgaatttggctgccgttcgcttgcgaagctcctccacgtcctggttgtcgtcgttggcgctccactcaagcaccaaacgacgaccgtaaagatgcgtactggcgcttagggcgtcgaaggcgcgtttggcctccgccttggacatgtagtcaacgaaaccgaaaccacgatgcgcatcctcgcccgtggtcgcctttttaggaatacgtaaggatcgcagttcgccaaaagccctaaaagcacggattagaatttttcctaaccggtatgacctatacgtacttgaatatatctcgaacctcgcggtattgtgcctggaagggaatatttcgcaccaggattttggttcccgtttgcttcttctgtgaggccagtcgacgttgtgcgccatcattatcttgggttctggaaaagattatcccattagcaaagaaaaagtaaagttcggttttccgaggcttacttgagcacacgatcgctgcgcttcagttccacgggattaccatctatgtgggtgagctgcaagttcttgagagcgtgctctgccactgaggacttcttgaactgaatgaagccgtagccaagggacttgaattcccggggattctcgggatcccttcgcttagcaatttcaacagtgtgaatgctacccaaatggcggaagtgtttctcaacggtttcctgtacggttttaaagttaaggttccgtagaaatagtgttgtattcggttcgg

SEQ ID NO: 33995 - DNA, 948 bp, DROSOPHILA
atgcaggaccaactggatcacgagctggagcggatcgacaagctgccaaaactggggcttctctgggtggagtacagtgcctatgcactgggagttaatattgcaccgaggaagcgtagctcgaaatactgtcgattaactcgcattttggtgttgattgttaacttgagtataatctacagtctcgtcgcctttattatggagaactatatgatctccttcgagacctacgttgagaacaaagtggaatcgtgttcccaactagtgttttctacggagactggagaggtattaaagtccctgggtctttttcaattggatttgccgagaaaaaaggaactgctgagctcagttagtttgattttgcttaacaattggatgataatcgatcgtcaggtgatgttcttcttcaagatcgtttgcatgcctgttctatactattgtgtgcgaccatactttcaatatatcttcgattgctatatcaaggacaaggatacctgtgaaatgaccttgaccgtttttggctttaacagccttttcgtggtccttaccagatatgagtctggtctgataaaagtcctaaggtttctggtccaaaattccacctcggatatcctggttcccaaggaccaaagagttaaatatcttcaatgttgcgtgaggctttttgctcgcatatcaagccatcataatcaaattgaaaacctcttcaagtatatcatcctggttcagtgttccgttagcagtattttgatctgcatgctgctctacaagatcagcacggttttggaagtgggctgggtgtggatgggcatgattatggtctactttgtgaccatagctctggagatcactctgtacaacgtgagtgcacagaaggtggagagccaggtctttcggttgagtgcaaacttctttctgctcctgcgcaacatgaacaacaaatag

SEQ ID NO: 33996 - protein, 315 aa, DROSOPHILA
MQDQLDHELERIDKLPKLGLLWVEYSAYALGVNIAPRKRSSKYCRLTRILVLIVNLSIIYSLVAFIMENYMISFETYVENKVESCSQLVFSTETGEVLKSLGLFQLDLPRKKELLSSVSLILLNNWMIIDRQVMFFFKIVCMPVLYYCVRPYFQYIFDCYIKDKDTCEMTLTVFGFNSLFVVLTRYESGLIKVLRFLVQNSTSDILVPKDQRVKYLQCCVRLFARISSHHNQIENLFKYIILVQCSVSSILICMLLYKISTVLEVGWVWMGMIMVYFVTIALEITLYNVSAQKVESQVFRLSANFFLLLRNMNNK

SEQ ID NO: 33997 - DNA, 2342 bp, DROSOPHILA
cccatccggatagcggtagcttccaaatccgtccatcacattcaccaatctatcccaggcgccctcataactgctgcgcgtgatgaagtgcctctgctgggtctccgcgttcagctgcgacattttctcaactttttttgtttctctgtgtttggggtgtggggacgaattttgtgtgtgtagtcgaagcaaccaaaccaactcgaacgtgcgaactgacaaacttctgacccacttggaatggcctggcttgttgagattacgcatcagctttatgactaaataaatgtttgccccactcgaccgatcccatccccaatttcccgcttcctccactgaccgagccccgagtccagggtgtgcccatccgcatccactcggttttggccaatgtcgcatgtctggcctaatgaacactgggatacccttgtgtggcaatgtgaagttggctgtgctatttgctgtgctacctgctgcctaagtagccaagtgatttaacttgtttattaactaccataaagtagagacctccggtgatctgagattttgcatgcatatgtagagtgagtttgccaaattatactaatgagctttaaagttagaccaggaaaaccacacatgatatgcgttcagttcattagcaatgtttacaacttagaggagataagagtcgaggcttggttaagcaaaagagagacagtacttaaattatgcaaatgtacagaatttttaatgcagttaaattgaaaattcatttttaagagcctcaaaaccaatgctcgaaaaattctaagttctaagttttactaagcctgtcaagcgaaacttctgcattgacctaagaatagctccacctgtccaccgatggttgtaaaacaaaatgattttaacagccaaccgggtcgagctgcattgcttaacccggccagaagcgaaagccagttaagtgcgattggtgtttatggctattggctgtggcagcggcacttgctgttcccacctatcctcctggtccgctctcggatatagccattccgtagaccgtgtcgtcgttgttggtcaggccaaatcgtaagcactcccgaatgggccgtaaatcatgctcacttacctcactgttggcgccagtggccacgttgctggtgttcccattgctgctgctgctgcccacgcatcggaaatcgacggaaccacctgatgagcgtcgcggtttgccgatgtccagtcgcaggatacctggcttgggtcgtcgtggagccggggccggtggactccgcaaggattctccattgcttagccccgaagttccggctgcagctgctggttcctcgtcgttctgcatggccaaaaaggagcgcacactcacgttgcgaatcgcgattattcaccgcgcacacacgaccgccgtgcagcgccaacgcggactgactacatccgtgtcctggccaggactttgaagcaacaattacgcgcgcagccacgggcgctggaaataaaatgtgaattaaacgcgccacccacgcgataagtgacaatgaatgtgccatgtgagtgtgcggtgtccgtttctctgactccagcgagtccagcgagtcctgctagtttggccacaggatgacgatgacgttggacaggacacgcggcactttcaactgcttctcctggctgtcacatgacacaaagtgaacttcctgctttcagggtcacatcgcggcctacctctgtgtaattatgtctgccgctgccccaaaaagtgtcaacagctcggccccgaaaacacaaaatatcgcatgtcgcattcgccatgtgagcggggaaaaaaaggccatttttcattttgacttatactttcacttttcattttcatacatttttgcgccttccattagtgcgctgcgttgtgtccttagtgtccttaattatgagcgcacaaaaggtgccttcactttgttttctaattgtgttactccgtaattggtaggatgagtctttttcctactcaataaaaagtttaattgctattttatttatacatttattatttttaatcttgatattatcttaagcttcatcaattcccagcaatgaatgacttgacattaccaacgactgttctcttcgaagtacaactaaccataaatacctacgaaagctgggaatatatgtttatcccagtggggggtattgccaagtcgagcccatgctagtttgcgtagatgatatctcctccgcgccccggccacttggccagaatgcgcttgttagtcggcacagccgttccatacgagccaagccctcctgctgcgaactgggctcctccggcgccatgtcctggcacatcc

SEQ ID NO: 33998 - DNA, 342 bp, DROSOPHILA
atgcagaacgacgaggaaccagcagctgcagccggaacttcggggctaagcaatggagaatccttgcggagtccaccggccccggctccacgacgacccaagccaggtatcctgcgactggacatcggcaaaccgcgacgctcatcaggtggttccgtcgatttccgatgcgtgggcagcagcagcagcaatgggaacaccagcaacgtggccactggcgccaacagtgaggtaagtgagcatgatttacggcccattcgggagtgcttacgatttggcctgaccaacaacgacgacacggtctacggaatggctatatccgagagcggaccaggaggatag

SEQ ID NO: 33999 - protein, 113 aa, DROSOPHILA
MQNDEEPAAAAGTSGLSNGESLRSPPAPAPRRPKPGILRLDIGKPRRSSGGSVDFRCVGSSSSNGNTSNVATGANSEVSEHDLRPIRECLRFGLTNNDDTVYGMAISESGPGG

SEQ ID NO: 34000 - DNA, 3760 bp, DROSOPHILA
aatcagcaaagcaaataaatacaattaatgttacattacgcatacgccgtgttgcacagctactgaaatatccttgagtcctcgggaaaggaggtcgtgtggcaaaatttatgccaagcaacaattcatcgcaactttatgcatgtcaacgatgacgactccgaggagcaggaaatgaaaagtatgtctcgactttatgcaaaagcacgaaataagagcagacgagtgaaatatgaataaaaaaaaaaagggaaaatcaaatatgcactcgcgtgaaaattaatgcgacacgctcctcaagcagctcgcacttgactcattcagtgcttttctcactcctcactcgcattttcccacattaaacttgcttaattgagggaaaatgtaggagcataatgaagaagctagcaggcgcaagtggtaagaacttgttgaaaacttgatgaacagtttagagttatggcttgtggcttggctaaagttaaaacaatacataatacaagccaagcaattagtaatttggctctacaaatggcaagtggtatcaatctacagaatgcaataaatattgtttgcaaaccgcatccggtatcaaaatcaattgcaaacaagcttaatatgaagtcaaaaggataaagatacatacagatatgcaaattctcccgaaaaacagtgaaggcaatttgccaaggcaattagaaatgttcaaatattccaaccaagacacaaatcattgtaaaatattcaaccggagatggaaataattgacgcccactcacccatatttcctctagccccattttccttaacttataattgagcccgtaagtaggcacatttaagccgtaaaacttaatgctaatgacgcccatttttcaatgcctgcaatccgtagtccattagcgagcccccaaatcatttgtaacctccgttaattagcgtttatttgagagatagtgtccgacctgcccggtttgccagacagccattcagccaggatatgttgcccatactggtaccagttttgctgctcttcaacgagacaagttggatcaacccaatcctgaccagcatctacaaggacaggcatcatgaaacggtccttctgctccagcatagccagcatggcaatgcatctggcttggagagatttccctggccggttttcagtttcaacgaacagatggacttctatgtgcgtggcaagtacaacagtgaaatgctcgtccttatttggcaaaccggaaattcggactgggacttggatttgtggcaggctctcgaccggagtctactgaatatgaggaaggtgagggtgttgctattgaggaaatgggagaaaatcccaacggctgacgttgccgctaccgctgagcacctacttttccttcatgtcgccgtaattggacagggaaataggatatatcgactgcagccctacgctccgcaaagttggctgcaagtagatcccatcgaatcgcccatcttcataaagattcgaaactattttggcagatatatagtaactctgccagatcaatttccaccccgttcgattgtatatcgcaatccgaaaacagatgaaatacaaatgacgggctatgtgtacaaatttctattggaatttattcgtatttacaactttacgtttcgctggcaaagacccattgtacaaggtgagcgaatgaatttgattcttttgcggaatatgaccctcaacggcaccattaacttggctatcagcctttgtggctttgaaacacccagttagttgggtgttttctcggatgtatacgatatggaagagtggtacataatggttccgcgggcccaggaaatttccatcgccgatgtgtatgtggtgatggttagcggaaatttcctaatcgttctgatcattttctacttcattttcaccattttggacacatgtttcggaccactattgctcaaggaacgtgtagattggtcgaatttgatgctaaatgaacgtatgatttcgggaattatgggacagtcgttcaatatgagtgcacggaatacaatcagttcgaaggtcaccaatgccacactctttctactaggattggttctgagtaccctatatgcagcacatcttaaaacgcttctaaccaagcggcctacatcgcaacagatctccaactttaaacagcttcgagattctccggtaaccgtgttttttgaagaagccgaacgattttacctaaaacatgcatgggaccgacccattcgctacattaaggatcagttgaattttagggaaaccatcgaatataatgcactgaggatgggtttgaacagatcgaatgccttttccgctttgacatccgaatggatgattgtggccaagagacaggagctcttcaagcaaccgattttcacggttcagccggagttacgagtcatccagaccagtgtccttctatcgctggtcatgcagtcgaactccatatacgaggatcatatcaacgatctgatccatcgggttcagagtgccggtattgtggaatattggaagcatcaaactctgcgcgagatgatcaccatgggcatgatctcccaaaaggatccatttccatatgttgctttccgagaattcaaagttggtgatctattttggatttggctcctgtgggtcagttttttgttcatgtcctttgtcatattcctgtgtgaacttttggttgattgctttattagcaaaaccctaattaggaacaaaagacctcactgaactgattgactcattaaagattacaatttatggcatgcaaacgtttgattaattatggttacatgaccttaaattagccacctgatttgaactttcatttgtgtgaactctaattggtttattattatgcataatctttcatgttgattaatataatatgaaatttaaaaaaaaatttgtttattggaattacttgggataatctgtgggattatatctgtaagattttcaaagcatgtttaaacattggcttgagatagcaagaaatagaaacttcaacgttctgcgatagttaaacaccccccccccccctttgccgcactgaaaccccacacccatggcccgcatattttcccgaccaactaatggtctacagcactttccccacgttgacataaatcaaacatttcgtcgggattactttcaaaaaatgtcactcccatggctgccgttggcgttgacgagatttaagcgttggcttggtttttgttttcgacatcgggccgcctccgtcattcaatcatccgggcttgggttacggttagtacgcccccataattgacgtttacgccgggcttatctttaagggaatacaaaccggcgaaatggggcagacaagctggattttccgtttattggcgaagtaacgtgcgcattatggatgccaaacgggatgtttatggtaaaatcaatagtgcaatagggctttaaggcgagcatcgttgggaaaatgcacagaataatgttacaccaatatcaagctggcagacaggcaatcgaattattgacgcactataagcggcgtaaaattttttaatcaagccgaacaacattgtgcctcgttgcctgattccatgccaacgtaacccatccaggcccttgactagttggaaattttcgcgtaatgcaatatgcaaattagcggctagcgggctgtaatgatgaactccaattaagaacacaagtccgttttaagttgaaggcagccgtcgggctgacatatat

SEQ ID NO: 34001 - DNA, 1275 bp, DROSOPHILA
atgttgcccatactggtaccagttttgctgctcttcaacgagacaagttggatcaacccaatcctgaccagcatctacaaggacaggcatcatgaaacggtccttctgctccagcatagccagcatggcaatgcatctggcttggagagatttccctggccggttttcagtttcaacgaacagatggacttctatgtgcgtggcaagtacaacagtgaaatgctcgtccttatttggcaaaccggaaattcggactgggacttggatttgtggcaggctctcgaccggagtctactgaatatgaggaaggtgagggtgttgctattgaggaaatgggagaaaatcccaacggctgacgttgccgctaccgctgagcacctacttttccttcatgtcgccgtaattggacagggaaataggatatatcgactgcagccctacgctccgcaaagttggctgcaagaaatttccatcgccgatgtgtatgtggtgatggttagcggaaatttcctaatcgttctgatcattttctacttcattttcaccattttggacacatgtttcggaccactattgctcaaggaacgtgtagattggtcgaatttgatgctaaatgaacgtatgatttcgggaattatgggacagtcgttcaatatgagtgcacggaatacaatcagttcgaaggtcaccaatgccacactctttctactaggattggttctgagtaccctatatgcagcacatcttaaaacgcttctaaccaagcggcctacatcgcaacagatctccaactttaaacagcttcgagattctccggtaaccgtgttttttgaagaagccgaacgattttacctaaaacatgcatgggaccgacccattcgctacattaaggatcagttgaattttagggaaaccatcgaatataatgcactgaggatgggtttgaacagatcgaatgccttttccgctttgacatccgaatggatgattgtggccaagagacaggagctcttcaagcaaccgattttcacggttcagccggagttacgagtcatccagaccagtgtccttctatcgctggtcatgcagtcgaactccatatacgaggatcatatcaacgatctgatccatcgggttcagagtgccggtattgtggaatattggaagcatcaaactctgcgcgagatgatcaccatgggcatgatctcccaaaaggatccatttccatatgttgctttccgagaattcaaagaacaaaagacctcactgaactga

SEQ ID NO: 34002 - protein, 424 aa, DROSOPHILA
MLPILVPVLLLFNETSWINPILTSIYKDRHHETVLLLQHSQHGNASGLERFPWPVFSFNEQMDFYVRGKYNSEMLVLIWQTGNSDWDLDLWQALDRSLLNMRKVRVLLLRKWEKIPTADVAATAEHLLFLHVAVIGQGNRIYRLQPYAPQSWLQEISIADVYVVMVSGNFLIVLIIFYFIFTILDTCFGPLLLKERVDWSNLMLNERMISGIMGQSFNMSARNTISSKVTNATLFLLGLVLSTLYAAHLKTLLTKRPTSQQISNFKQLRDSPVTVFFEEAERFYLKHAWDRPIRYIKDQLNFRETIEYNALRMGLNRSNAFSALTSEWMIVAKRQELFKQPIFTVQPELRVIQTSVLLSLVMQSNSIYEDHINDLIHRVQSAGIVEYWKHQTLREMITMGMISQKDPFPYVAFREFKEQKTSLN

SEQ ID NO: 34003 - DNA, 2246 bp, DROSOPHILA
ttaccaccctctatatagtattatatacacatatatatacatatgtatatatgtatatgtcagcatacataacaaaaacaaagcagtgcggtaattgtgacagttgactaactctttgagttgaaaactctttattgccgcttccgtcaaccgcaaaagcattgaaaaatgctgaatatacattaaaccaactacaccaaaagcaaaatgtggcaaacaaatttaattgcatttacaaattgtgcagagcagtttactcgctcaaatgtcacaatcgtaaaattggaaattcgagatgtttgaatgatttgaatgattgtatttactcgcaaatttcgaaaactgatgcagcggagatttcgatttacacaatgcgaatttcacaaaggaatgtaaacaattctgcggaagacgatcccagacaaacaagcaaaaatatatattcagaaatctaaaaacatacaagtgaatgatatttagccaaaagtaattccacaataatctttgcattattattacaaattatttctaatgagatacttcatttaactcaaatctggccaaatctatataaataaatgaaatgaaatgatagtaagcaagtccgttatgtgtaaatcgtatacttttgccatggatcacttaaaaagttatactcttgtgtagaaagtgtgcttcaaaagttactgatctgttttaaatttgtgcgctttccaagctgccaagctgcaaatgcttaatttattgaaaaataaaaacactccaaaaggcgatagatctctttttaaagaaatactcctatagacaagtggcccaacccaatcctttcaattataaatagattccaatgactcaccttggcctgaaatgtgatgccgtggaagaaggcctgctcggcgtgcagcggcacccgcagatcctggtcatcctggaccagatcgtacggcgtcgacggcattctcagatagttcaatagcaccgattcggaccacttgtagtatcatgaaatggttttcatcttcctcgtgctacgcttttgcagctgatggcgcaattgccataaaacgccacttggccgacgctttggctgttgattttggctgcttggatgctgttgctgatggccctgtatctgaatctgtgtcggttgattcagattcagattcagattcggattctggttcggattcagcttcagattcggactcagtttcgtattctgctggctgccttcgagttggctcatgcaaattgtggtggggcgacgagcgctcagtgattgatttgctattgctatgactctatgctgttggccaaaaccctccgagtacccgaaccgtctgttttgccaagttgagcgctcttgcttaatctcaatttatgagcttgcggttactgtgatgctggcaaattgaattgcgtcagttggattctttggccgtactgctgcttttacgttgttttatgaaatcgtcagtgtctgcggtgtatctgcaagtggaaagaaaacagatacaatatccgtgatgaaaaagtagaaagaggcattattctgctgtaatcaaacgacgcctaatcgctgtgacttcgtctatccatcgatctgtctattaaagtgagtcattaactgaatgatttgagtcagcttcggattcgctggaaagcaacagcatgctaaacacgagctttaattgactcactcactagtcgagctcgtggtgcgatgacaccgttccgaatcgaattttgaattggtctttcgattcgcattggaacttggacgccagcccacctacatacacgtgtcgcattcgagctttgaattcgtaattcgatttgctgctcaggaagtgtgtgcactttaattcagctcggccgatgaaatacaatattacgtattttcacatggttataaacataattcaaataggcaactacagtaatacgaccctttgatctaatttattattctatttccgaagatttaacacatggctattttaggtggagtataacaaaaggttatttatagtaacttgcttaatatgaatatgttaatatattacacctttcactatattaagtgcccactgtaagcaaacacagccaaactttaagctcaactactgattatttgctactttggtctctttgttcgtctctttaatgtgacgtttgaatttacggagagtctgcactttaattagacattaaatatttatatgattcacaacttcgctggcatt

SEQ ID NO: 34004 - DNA, 246 bp, DROSOPHILA
atgagccaactcgaaggcagccagcagaatacgaaactgagtccgaatctgaagctgaatccgaaccagaatccgaatctgaatctgaatctgaatcaaccgacacagattcagatacagggccatcagcaacagcatccaagcagccaaaatcaacagccaaagcgtcggccaagtggcgttttatggcaattgcgccatcagctgcaaaagcgtagcacgaggaagatgaaaaccatttcatga

SEQ ID NO: 34005 - protein, 81 aa, DROSOPHILA
MSQLEGSQQNTKLSPNLKLNPNQNPNLNLNLNQPTQIQIQGHQQQHPSSQNQQPKRRPSGVLWQLRHQLQKRSTRKMKTIS

SEQ ID NO: 34006 - DNA, 2926 bp, DROSOPHILA
acagtaatccccgagccgagctcatctttgtgacctctaaagctggccgttgatttgacactgcctggtcttaagtcctgttcctggccaatcctccttgtccataaatcaatccatggagaattttgaaagcattaaaagcattacaaagaacgccatttcgtggttgttgtacttctagcgtgctgctgtcgctgtcatgtctttgtcatgttgaacaaaagccgccatggcggcagcattacgtatacgccctgtggcccagtggagatatagggactcacacatgcaaagcgacatttccaggcaaccgaatgaatgcgagaatgaatgactgaacgagtgaatgggcgggaggggaggggtaagaagtatgtactatgtaagaatccttgggccatcttttgtctgcccgcttttccgcttttcctcaggcggctgtgctcttttcgccaggcacttgattgttttccatgtatctccttgatgccagccatgtacactgcgaagagattctggtaacaatagtttgtattatgtttttgaaatattttcaatgcgatatattgaatttttctcccttttttttattggctctacttgattaatgcgttctacttttgaatattacgtgattacataatttttatatgccaagtaatacatatcagcatttattgatacatagtcctcacagcgcagaaaaacttatacgacataccaagaaactgaaatgcgtcagaaatatataaatatataccattggatactagctataatatcggctacttacgatgctcatagttggcatggataagtccaagacaactgtggctttaaggcaaactggcttctgggatcgcatagatataaaaattaaaattttcttgaatcgtttgtcggaacctaaccaatccatatcgtatgccgcatggcccacgttttcgctctaaaaaaaattatgggttagtaatattttttttttatagaatagatatttttaacatacagcatctattaacctctggctgaaggagcaaaggagatagacctcaagcagtacggaaatcagaaatagcatctgcttgcaaaaatactctggacttaaagcgatggttaattgaactcccaccaggcagaccagcagcgcagatgcaataaagtttagcaacaagggaattccaaagacctcgttcatcagatcagtgagtctgaaagtttaatactttaatttatgaataatcaattaatatatatatattttttatcaaccaaccgaagtatatcaatgtgattggcgactagggactgcaacttccttatatcctccttagctccattgggtgcgttatgggcttgaatcttaaactccctaagaaccttggccagtctttcgtagtgcatgatgacctgcaggaccacagcgaagatcattaggtcaccggcaatggatccacatgtagccgtatatccggccgacgactggtgaaaatagcttggataaaacaaccaggagtcgcgaaattcccaaggttcgagttggtaaaacggcataatctgcttggcatccggatagtggagcagcactctttgaatgaagtatatgaataagggaatcagagcgtgagcgaaatacatgatcatgaagagaccaccaaatccctttgtgtatatatggcagcgtttcagccaggacttcacagcatattcctcttgaacctttgcacttggcgacggaaagcaggtctccaattgcctgaccaaagctgtcatttttggcttttttttcattacagcacctatcttggagaggcccatgaccacaaaggacacgtagctcagtaagatgcagctctcgagaaaattttcattatcgcgtaacctgtccaccagagtcgctacctcggcataaaaactaaacaccatattaaacatattcaatgcgaaatatatttgaaaccaaatagttcgttttcgtccagtttcatagggatcaatgcccaaagtattgtagaatttcacagctagcctcaaaaaatcatcgacttcgacatacttttcttcaggcatttccgcgacgttatccatttttcagaatagaatttttacactttcaatatggtttgaataaacactgattgatacaggaaagaaatttgggttcttataggcccaatgcaatgcagaaaccgcaatattttcacgaccttgaaaagtttacaccgaacgaatttacaaatgaaatttaggatcgggatatagaaaatttgttgtagtacttattcaaagtgaataaattacatcaggtacttaaaaaatttttattcttcatataatattatgtttttgataaatttagcctcatagtaataactattgtgtaagtattttccattaatattaataactattacaggtgactactttagtggcaaaacaaaggccagtaattgttggtcgaccacatacatcaattacctcaattgctaggtatcttatatatttatacaacctacgacccactttccaaaatacacttgctaactacgtatatagttatagtaaaatttaaaatgggtaaagtatttctaggcctattcagaatcgcaaatgtacgcattatatgtaggccgaattttttccagtgctctatgacgacgaaaacgagctcgtctcagatccttaagggtcctttgctcatttatatgcatttggtctgaaggacacaatatcggtagatacttgctttaagagcgttacattattgtttcatatccgaaaggtcagcaaatgtcttttggctaagattggatagcatgcatgtagcatacaacatgtaccacaaggagaggcatcaagaacgaaatcgaatccgaaactgaatacgaaccgaaacaagcttcatttcggtttcattggcgagcaa

SEQ ID NO: 34007 - DNA, 861 bp, DROSOPHILA
atggtgtttagtttttatgccgaggtagcgactctggtggacaggttacgcgataatgaaaattttctcgagagctgcatcttactgagctacgtgtcctttgtggtcatgggcctctccaagataggtgctgtaatgaaaaaaaagccaaaaatgacagctttggtcaggcaattggagacctgctttccgtcgccaagtgcaaaggttcaagaggaatatgctgtgaagtcctggctgaaacgctgccatatatacacaaagggatttggtggtctcttcatgatcatgtatttcgctcacgctctgattcccttattcatatacttcattcaaagagtgctgctccactatccggatgccaagcagattatgccgttttaccaactcgaaccttgggaatttcgcgactcctggttgttttatccaagctattttcaccagtcgtcggccggatatacggctacatgtggatccattgccggtgacctaatgatcttcgctgtggtcctgcaggtcatcatgcactacgaaagactggccaaggttcttagggagtttaagattcaagcccataacgcacccaatggagctaaggaggatataaggaagttgcagtccctagtcgccaatcacattgatatacttcgactcactgatctgatgaacgaggtctttggaattcccttgttgctaaactttattgcatctgcgctgctggtctgcctggtgggagttcaattaaccatcgctttaagtccagagtatttttgcaagcagatgctatttctgatttccgtactgcttgaggtctatctcctttgctccttcagccagaggttaatagatgctgtatgttaa

SEQ ID NO: 34008 - protein, 286 aa, DROSOPHILA
MVFSFYAEVATLVDRLRDNENFLESCILLSYVSFVVMGLSKIGAVMKKKPKMTALVRQLETCFPSPSAKVQEEYAVKSWLKRCHIYTKGFGGLFMIMYFAHALIPLFIYFIQRVLLHYPDAKQIMPFYQLEPWEFRDSWLFYPSYFHQSSAGYTATCGSIAGDLMIFAVVLQVIMHYERLAKVLREFKIQAHNAPNGAKEDIRKLQSLVANHIDILRLTDLMNEVFGIPLLLNFIASALLVCLVGVQLTIALSPEYFCKQMLFLISVLLEVYLLCSFSQRLIDAVC

SEQ ID NO: 34009 - DNA, 2794 bp, DROSOPHILA
ttatctgatttgtcacacctgcctgttggaaccgcatactcatataagggttaatcttatcagaggcccaccgttgttgccaccgcctttcaaatcaaatcagaccgctttgccatagtaatggtctggcaacaacaaatgagtatcgctacatggaaatgtgcgcgtgtgtgtgagagaccaacaacaaaacaagaaaacaagcaaacgcacgaagaaagttgtgaaaattcaattttccaatggcccagtctgattgggactgccttgaagcgtcctctaatcagataactatcaatgtaaatgcgtaaatatcaacgcatatgcgttgtatttgtggaaaatattacgctttaaccacatatacacacacccccgcttccggtgggtgttttttttacgctggaggggggagggtggtttactcacctatgcgctggccaactggagtggagaaaacatttcccaaggcgccaacgttgaaaaatgaagccatcgtggagaagtttcttattaatgctcgccgttgggttgcagtgcggttaaaattgttctttatttactttttgttcacctggatgaaatgtttatgcacttgtctacagcagagtgaccatggctggcctcagcgaaaaatacccacaaagaaatgcattacaataagtgggtaaataggaataggtttttttccagggctgcagcattttatttcattttatttaaaagaattatccacagtttttgagataatgacatagttatacccgttactcgtagagtaaaagggtttattagattcgttgaaaagtatgtaacaggcagaccatataaagtatatatattcttgatcaggatcagtagccgagtcgatctggcgatgtccgcctgtctgtacgtttgaacgtcgagatctcaggaactatttaagctagaatgtttagattaagcgtgcagattccagagacatagacgcagcccaagattgttgacccatgtttccatgaccactccaacgcccacattagattgttcttagttttattgttcaccttgcaccttgcaccttttggattgtaatcacacccacatctttaaacaattttaattttttctcattttattcgcaatccgactagctgagtaacgggtacctcatagtcatggttgttcacagagcgtgttatgtatctcaaaaactttgtaatttcaaagagttatttcacaattcattccacagatttcgtggataatgaattttcgattgttcaaccttgcacctgtctcaaaaatgagctttccgtcagcggtccttctgacggtaccgctggcggtcccactgatggttccgctgatggtcccgttgatagccccacggacggtccccttgacggttccgctgacggtcccttcgatggttccgctgccggtcgtgctgacggccccgtcgacggtccggctgatggtcccttcgacggtcccgctgagggttccgctgaggatcccgctgagagtcccactgaatggcattggaacgaactcgttgatgaccaatccaatgacggtcgcgctgacggtcccgctgacggtagcgctgacggtctggctgagggtcccgctgaaggctcctctagcgttcccgctgactttcccgctgacgttcccgctgacgttcccgctgacgttcgcgctgacgctaacgctcctgctgacgggcacgtcgtcggtctcgctgtcagtgatctccatgtcgacggcccagatttccgaggacagttcataggattcgtcctctgaaagaagagaacgtagggtatattagtgagtgaggctttgagacttatattttgatagtcccgacttggttagtcggctaaacttctctgttccaagacccataatcttaagcccatttagatctaactataagttgcatgattcttacagaatattgtgttctgactataatagtcattatcctattatctgtaatctttgctctctgccgctcttaaagcaatcaatcaaatcaatcggtgcattattcacaaatacgacgcaaaatttgtttttggttagattaaggaatatatgagttagcggttccaacaggctgataggacaaatcatatgcctcgcacgtagggtataaactgagaagaaacgtgtttttccccggaattctttgcgacacatacagtttgtcaagaaactgtttacacactgtgaaataagttgaatttttgactttaaagctaaaaataaagggttttttgcttaattaaacgcaatttttttataaaatataattaaacaatatttattttacttataaatcaaaaaacaaattaaaaatattaaatatacaagaaaataaacaacaaattccaagtttacacacttttgagactgtcaagaaactctttacacattttgttttcctactttgttttgttctttttcttagaacgaactcgatttttccgttatttttggctttgcattgctttttacaacgcttcctattgaaattttgttgactttgcttgtgaaattttgctgatcaaacgtgcttaaagcgaattattaaatttaataaaatgcctggaaagagattaacttttgaagttacccaattaataaactataaccaccagttgggaaaatcttttccagaattagtataaatgtttcctgtatcccgtaagaccgtctacaatgttttaaaaggctcggaaaaagagggcaggcttgaacctaagagcggtggtgggcggaaaattaaaattaaaaagcg

SEQ ID NO: 34010 - DNA, 585 bp, DROSOPHILA
atgaccactccaacgcccacattagattatttcgtggataatgaattttcgattgttcaaccttgcacctgtctcaaaaatgagctttccgtcagcggtccttctgacggtaccgctggcggtcccactgatggttccgctgatggtcccgttgatagccccacggacggtccccttgacggttccgctgacggtcccttcgatggttccgctgccggtcgtgctgacggccccgtcgacggtccggctgatggtcccttcgacggtcccgctgagggttccgctgaggatcccgctgagagtcccactgaatggcattggaacgaactcgttgatgaccaatccaatgacggtcgcgctgacggtcccgctgacggtagcgctgacggtctggctgagggtcccgctgaaggctcctctagcgttcccgctgactttcccgctgacgttcccgctgacgttcccgctgacgttcgcgctgacgctaacgctcctgctgacgggcacgtcgtcggtctcgctgtcagtgatctccatgtcgacggcccagatttccgaggacagttcataggattcgtcctctga

SEQ ID NO: 34011 - protein, 194 aa, DROSOPHILA
MTTPTPTLDYFVDNEFSIVQPCTCLKNELSVSGPSDGTAGGPTDGSADGPVDSPTDGPLDGSADGPFDGSAAGRADGPVDGPADGPFDGPAEGSAEDPAESPTEWHWNELVDDQSNDGRADGPADGSADGLAEGPAEGSSSVPADFPADVPADVPADVRADANAPADGHVVGLAVSDLHVDGPDFRGQFIGFVL

SEQ ID NO: 34012 - DNA, 3635 bp, DROSOPHILA
cgtaaagaaaacacgagtggagtggatttggttttgcctttgttcgtatagaatatatttggtatatataatttacaattgctatgttttggttgtattcttctgcctctttgcatttgatttttgcgtatattcactttgaatttgatgctgcgcttgttgtatataatatgtatattgtatataggaatatttagtttgttaatcgtctgtgccgctcgccagttctatgctaaaaatttgtatctcgtcttaaaaactaggctctacatgttacttagtatgcgtatttcgggaactttcattgggaggtctttgatttagtattctcaattttggtgttttcacttatcagctaatcgctactactaatgcagctcattttggggctaaagttttgggagcggttttttagttgggggggggatatggctgggctggaaggaaaccgaagctaatatgtttgtagagttctggccaggatttggccatgtggaagtgtgctgcaccctctaagcgctatggcaactacagaaatatatttatgtatgtgtgtgtatgtatatatatactcgtaatatgtatattgttgtatatggttaccttgcgtataaatatctgaatttggcttaaactaatctttctcctgcctgttgcgtcgtgttgatatctggttggcttaattgaattttattcgattaaagttaaattttgttaacatttaggctaattttactagtgtctggtagttatccatcgggagacatcattttgtttgtctcccgctcatttaatttagcacttagttttcaatgatttcgcacgcggcgattaaattactctcatttttatgtttcgaagacacaacagttactggtccagttccaggaagaagtatatgtatatgcgtgtgtatgtgtgtgtgtgtgtgtgagggctctcatctgccgatgaggattgcattgtttttcggatggggtctatatgataatgccaatttctaccggggtccggtgtaactgtactgcaatcccgtgtgcgtcaattcgttgcatacttcgctgcgctgcgtcacagcatttagggcggcgaaggcgtgatgtgggcgtggcgtggccagatgtgcttgggcattatgctgtcccgattcataggcagttaggtcaatgctgggcgctataaaaatcaagtataatattaatatccctattatatttcataataattttattcttaccagcggcatgcatacgattatatagattctttcgtttctttttcaacagggtgtccaaattatagctctccatgccagctctgtgggaaaataatgaattttaaataaatttgctactcaaatcaagacacttgggaacccacttttcgggccttccattgcccagtagctccttgaaggcgacatagatcttgtttagcgtcagattggatagcccctggcccaaatatcgtacaaatttaagttgttcacatttggataaagcgctctcgtggaagtccaaaaagggtcgatgatcggatatctgatattcctgtcgaaatgcaaaagtacgaaacgaaaaaagtgcggaaatggaagagaatagttgaaatacattaagttctattccataatggatgggcaagagttttgttcattgcacttgatatcaattgatgaggatgcaatttggatatacatgtatatatctacatggatggagtgccaatgtttcgaatgccaattggggggccaaagaacaaagctccgctagactacagtggtgcctcctgctattatctgctttcgatacacttttgctcacattgcaaaacttgatgaagttttcgatgagtatgtacttttcataattgctcagacaatgctggctactactctgtataccgaactgtttcaatagctcctgcttcttgggcggcaggcggctaatgtgagtgcaaaccccatcctcgatccggtgcgtttcgtgcacgtcgaagttctcgtagatgattagctgctccagcgatctgggcggtggtcccagtgccggaagcggcggtggaggcaatagggccggtggagctccacatccgtagcgcggatccatggtcatcgggtgttgatgttgatgttgatgctgctgttgctgcgccgtcgatgatgtcacatagcctgctggcatggtcacggcattgggattaatcaccgatcctggcactaacactgggttgctgctgccactgctgacactgctgttgctgttgctaccgatgttcatgttgcacgtgttgctgttgttgctgctgctgctgccgccgccgctgccggtggcgaactccagggagccatcgttggccgccgccatgttcttgaggtctacaagagagaatcggaataccaacacactcaggaagcgaaactccaaggatgtgtgcgagtcgactttcatttgaaatcgcccctgagctcagaacaaaattttgaaaaaatatgtggtatcaataggaatgatttgcattaagttcacaaagtaaaataacatttctactatatttataactaaagttcattacatttaaaaataaataaaaatatgaatcaataaattctgttaagtaatttatagtaggataagataaaatatcgattgtgcttggctgaaaatcaaaggcgattttttacttgaatcgcatgttttccttggcgctgtatgatttgattaattatattgcaccaaggtgaaggaggaactatgaccattaagtgaccattaacattgcattctcttttccattttcaattggtagtcccaagaaaatgaaagttctcctctgtattaattggtttagcgcaaatgcagaggcgcgacgcaggcaataaatctcaagtaaaaacaacaatcaaatcgattttctctcaatcgcttcttgctagttgtgtatatatattttctgggttcgcaaacaatttccatatatatgtatgtatatcgtatgttgtgtttagttaggattggttttacattaacatacatatcatttgttcttggcttactaaaatatatatttatatattaccatattaaatagcattagcatgattttctatactcgtgtcgttcgtgttggtgagtgtgtaaatgtgtgatgtttgtgtgtaaatgtaataatctcttttcaaggaataacattgcatagttttggggtaatgatcgatcgttgtacaacaatttcattttatcgtcgtcaaacgtaatacaaaatttgcatagttttataaaatttggcaaaaagcttgtgtaaaattagtctaaataaacgaaacataaactaaaaacgaggagcacactaaaaaactaatatgacgatgcacatcaacggaaaactataatctaggacaggttgggaggatgatgggggatgggccgaaatcctgaatcctctgccatgtccttctgcaacagcctatgcgtgtcaacaggtggcgccaccaccgctgtccttggcgccacgccgaccccaatctcacatggccgtgggcggcaatggcccgccacctcctcctgcggatccagcgcctcctgttgctccgccagcacctccgccaccaacacctcctcccccaaccgcctgct

SEQ ID NO: 34013 - DNA, 1142 bp, DROSOPHILA
ttatcctactataaattacttaacagaatttattgattcatatttttatttatttttaaatgtaatgaactttagttataaatatagtagaaatgttattttactttgtgaacttaatgcaaatcattcctattgataccacatattttttcaaaattttgttctgagctcaggggcgatttcaaatgaaagtcgactcgcacacatccttggagtttcgcttcctgagtgtgttggtattccgattctctcttgtagacctcaagaacatggcggcggccaacgatggctccctggagttcgccaccggcagcggcggcggcagcagcagcagcaacaacagcaacacgtgcaacatgaacatcggtagcaacagcaacagcagtgtcagcagtggcagcagcaacccagtgttagtgccaggatcggtgattaatcccaatgccgtgaccatgccagcaggctatgtgacatcatcgacggcgcagcaacagcagcatcaacatcaacatcaacacccgatgaccatggatccgcgctacggatgtggagctccaccggccctattgcctccaccgccgcttccggcactgggaccaccgcccagatcgctggagcagctaatcatctacgagaacttcgacgtgcacgaaacgcaccggatcgaggatggggtttgcactcacattagccgcctgccgcccaagaagcaggagctattgaaacagttcggtatacagagtagtagccagcattgtctgagcaattatgaaaagtacatactcatcgaaaacttcatcaagttttgcaatgggctatccaatctgacgctaaacaagatctatgtcgccttcaaggagctactgggcaatggaaggcccgaaaaagctggcatggagagctataatttggacaccctgttgaaaaagaaacgaaagaatctatataatcgtatgcatgccgctgcgcccagcattgacctaactgcctatgaatcgggacagcataatgcccaagcacatctggccacgccacgcccacatcacgccttcgccgccctaaatgctgtgacgcagcgcagcgaagtatgcaacgaattgacgcacacgggattgcagtacagttacaccggaccccggtag

SEQ ID NO: 34014 - protein, 318 aa, DROSOPHILA
MKVDSHTSLEFRFLSVLVFRFSLVDLKNMAAANDGSLEFATGSGGGSSSSNNSNTCNMNIGSNSNSSVSSGSSNPVLVPGSVINPNAVTMPAGYVTSSTAQQQQHQHQHQHPMTMDPRYGCGAPPALLPPPPLPALGPPPRSLEQLIIYENFDVHETHRIEDGVCTHISRLPPKKQELLKQFGIQSSSQHCLSNYEKYILIENFIKFCNGLSNLTLNKIYVAFKELLGNGRPEKAGMESYNLDTLLKKKRKNLYNRMHAAAPSIDLTAYESGQHNAQAHLATPRPHHAFAALNAVTQRSEVCNELTHTGLQYSYTGPR

SEQ ID NO: 34015 - DNA, 2198 bp, DROSOPHILA
tattgagttgcggcgcatttgttgtttttgtttattaaaaatattaatcagtcatttgaatgcaatgaattgcagtgtttacgtgtatacatatactatatatgttagtatgcagttggccgcttatttatgtgtgtgtgtgtgtgtgtttatggttattttatgtttggcatgttgtcctttccgcctgtatgtatgttgtcatttgcttgtttgtcctcgcacctctcatttcaccactccacctgactgcatctcatccaaaccgaaccgaaccgaaccgatccgatccaatccaatccgatcctgcccagctcagctgactgttaacagtaatgcaataatttataccattcatttgcattgccctgccgacaggctctaaaaaaattgtttgccaaatgattgcgcagcgcaattatttgaatgcggccgcataaataaagctgcatactttgctgcatcgcacggctatgagatttattgtgaaattcttgcgcacttattgcaaattaataactatccattttattctcaacgcgagctatgcatttttcaacgcattttcctcgcattttcactttggaaatcgaaattgaaatttaattttcaaattacttgcacttttcaataacgcaaaaatttttggatgaaacgatttaagtgcgttgcaaaatttaacgcattttcgaaactggttaatgatttcgtgtcttatatgggtcgattttttgaataaagcttacattctaataacaagtggtcttgggtaatgataaaaatatttataattttttaaaaatgtggtttaaacagctaaatttttaactaaatttttttctcaagtcaaaattgtaaaatcctgttaaaaatgccgcgcttcaaagtatgcagcgttttttaagcttctgacgatgtgttactgcgtgtgcttggtttgcggcttctcgtccggcacttacgactaggtgtccttatagctaacaacccatccgagcacttacttgccatacggatgctggttgatgtccggcgagtggcgcatcagggtggcactcccgctgctcggcgacaatgcgagactgccctcgtggctgccgttcatgctgctggaacaggtggccggaacggatacggtcactgtgccgccgtgaccgccgcccatcatcttctccgtctcttggcggctgttggccattattcggcggatcgtgggcgcgcagggagtgcgtcagagtcgcgactcctgcgcatgctcatgtcagacctgcccgtgggcgttcatgtgcagggagtccccggcgtcggggggcgtggccgagagctgggcgggcggatagtactgcaacgatgcgcaattgagatactgtgcgtggattagaatcaatgcttggatgaacatcgcaagtgcgttagaaatagaacgtaattctagcactctataaactggtgccgtacactaggaaaaataaaactggtatttacattttattttatttacaagtattaaattttagattatattaaataagccacttttaagccagtattcattttaaattactttaatatcaaatatgttctttttcaagtgcaacttaccccgacgcgtccgttgtcatagtcgcgactcgcttgaatagtcaatttcgccttggcatgcatggtgtccgtcagcgtgctcctttgatgtgaggacggcatcccgccgggcacggcgctcgatggacccaacatcatggatccattggccttacccagactaccgccactcatgccgccgcccagtcccatgcccaagcccatgccggaaccactggacgcggaacgcgagtccctgctgcggaagcagtactccagaatggcgacgaatacgctgacgagcaggccgccaatcaggatgtagaatataccggccacattgctcagcgaaagttcgctatgcgatgtctcaccgtccttgtgggtgctgcattccgccttttcgtaccaccatttgttccgcaacttgatcagctcgccgttttcctttagcgtcagcacggccagattgatggggtccctgttgaatggggagcggcaatggaaatgagaatggtggcgctttgttaagtatgtgggttaactttcatctctggctgaaaactccccagtttctcgcccgtaaaaggcatcaatttctgactccccgatgtcaa

SEQ ID NO: 34016 - DNA, 198 bp, DROSOPHILA
atggccaacagccgccaagagacggagaagatgatgggcggcggtcacggcggcacagtgaccgtatccgttccggccacctgttccagcagcatgaacggcagccacgagggcagtctcgcattgtcgccgagcagcgggagtgccaccctgatgcgccactcgccggacatcaaccagcatccgtatggcaagtaa

SEQ ID NO: 34017 - protein, 65 aa, DROSOPHILA
MANSRQETEKMMGGGHGGTVTVSVPATCSSSMNGSHEGSLALSPSSGSATLMRHSPDINQHPYGK

SEQ ID NO: 34018 - DNA, 3246 bp, DROSOPHILA
gtatcgtatcgatttctctggccccggactagcttattttttttaagcatttacaccaactacgttattcaaaacacttggctaacactttttttggacatggccggttaagatggttgtttttcagctggattagtactttttgggattcttatcgctgggttttcactgaaatttgtggtctttttctgggcagctaaaatccgttgcttacttatcgatttcgattttcacgacgtttgtgtgagaacttttcaacatgcaccgttaactgctggtgctgctgcgcaagaagagaccgccaaagagagcggtgagagaaagtcgagagagaacgaagtcgtgtttcattcatggcctctagtaccgttaacaaagagggtgagttttattgtttttgccccgtcagctgtttgataacacctcacttgcgtgtaacggcacttaaggaaaatgaagaaaaaaaaactactataaaaattcaacctttgaatggtatgccatttgatcttgacacctggcgtacgacaacagctaaaacaaaaatgtgcgtttgcgtgaaactactcatatgctgtggctatcaaaaacggtttaattgataacttcagatattggccaagaggtttgataagattttcgagtcgcgcccagaagtatgcatgcaataatataaatgcattacgttatcttgagaaagtagacataagcttataaatatggcatattgggaacttgatgttttttttcaaaaatttttaaaaattaaattttaacaggattagaagattatttgtttgttatgttttttttactttatacatttttacattcttacattttacatacacatcctcaataatttttcatcactactcacgacaacctatcgataagtttctatcgctaataggaccagctgctgacaacaaataggtttcgacctggtattttaatttaggaatttgtactttgttgttttcatgttttcaacttgaaaatggccacgaagctaaatgtaaatattcgcaccctgctggccaactgcgaggaactggccaaaagcgaacagaacttctggaggctgcagaagttcattaagtccctggacacaatgcttgccgagctggaggcgatgggcgatccgcagagtgtcaaacgtatcccgggctacttggagcgcctacaggcccttaaaatatccaccggatatgcagacgttcccggttccacaacaaagactccttcacaatcctcagccgtcagcgaaactggggaaaatgcactgaaagaaataaggcagctgcaaaacagcaaatatcacaacgaactgcgaaaggaactgctccagggtaataaagaattaacaaacagttttgtacatattttaaaatttcttaaattcaaaaatgtaatagttcataacttaaaaaacatttattttagattccgatgccctgcgaagacgtcgaggagcagatgaatcctcctccagttctggaagcgcaaacgttcaggaaacttctggtgaaaacatgaaccaggctgccaagtattatacgaatgcccaggagaagatcaccgagcacatgctctcgctgactcggaacttaaaggaacagacggagaccgccaacaggattatccgaagagacacggaggttgtgtcgcgttccgccggaatggcggatcgcaatatcaattcgctaggaaaagaggctgagaaactggagcaacattcgaaaaaagcctacaagtgctggctgtggctgatgattgccttcgtaattgccacttttataggtgagtcattgtattttgtggaagttttgttcaagctgcaaaaaagaacccctcttggaaaatcccaattcatttacttaacaaatataccttaagttatccaactcaacaacacacatttaaacacgtttataaaccaagtttcctgaatatgttaatcacaatattataaatattcattataagaacgaaaacagataaatagatattagattccattgctattattattgtatttaaactgaatacgaaaacactgcgagtcacttcacttaagccaaataaacaagtttgccgtgactcagtttgaaattacatttcttaattggttcgatttattgcagttcgattgttgctgcttaattatactaatgagtttattaccctttcaatttacaggtatggttttattcatgaagattatgaagaagaagaagtcgtagaaacaatttccaaactaagcaaactaaagattgtactctaagcaagctttaaacgctcgttaagctcccgagttcaagaggttatccacccaaatcgtgtaagcagaaccacattaaacgatcgaaagccgcccagcgatttatttatgaatagtttatgtacaagcgaaagcgtttagattatggtttttgagcatttttgtttcatcattaagtgtcatttggattcgtatctgtatctcttagcctattcggcagcgataagctgcgtaatgccgtttgtggtgatcagctgcaacagggatccagttttgggcctctcctgatcttgggtccacttaaggaaaagtccggccacctcggtgagcggtgtccaggttccaaaatctgcatccggcatccatttacggttcatgggtgtatctagagttacgggaagtatggacacagccagggaaccagctggcagaccggatttctcagcgcccagcgagcgggtcagctggtggacagctgccttggccattccatagccgatcataccgggtgtgccctccaaagcgggcttagctccagtgagagccagcaagcctccggcctttagatgctgagcagccacagctgccgaaatggcggaggtcaacacgctctgcttccacatgagatcggcattcttggccagatccttcttggcattaccacctgcccagccgccagccacgcagatgacggcatccagtttctcgccggcaagggattccccgactttggacaccaccgtttcctcctgttccacccaactagcatcgcgtggcaccacaatgctaacgtcggccttctcgttctccgtcagatcgatgctgccaacccactgatggattatccaggtgaaggtcgtagttgacgcgagggaaaacaatagataatgaggcaattgtatttaataattaagtgaaaggtaactcacataattgttggctttaaagtgatcgacacaggc

SEQ ID NO: 34019 - DNA, 753 bp, DROSOPHILA
atggccacgaagctaaatgtaaatattcgcaccctgctggccaactgcgaggaactggccaaaagcgaacagaacttctggaggctgcagaagttcattaagtccctggacacaatgcttgccgagctggaggcgatgggcgatccgcagagtgtcaaacgtatcccgggctacttggagcgcctacaggcccttaaaatatccaccggatatgcagacgttcccggttccacaacaaagactccttcacaatcctcagccgtcagcgaaactggggaaaatgcactgaaagaaataaggcagctgcaaaacagcaaatatcacaacgaactgcgaaaggaactgctccaggattccgatgccctgcgaagacgtcgaggagcagatgaatcctcctccagttctggaagcgcaaacgttcaggaaacttctggtgaaaacatgaaccaggctgccaagtattatacgaatgcccaggagaagatcaccgagcacatgctctcgctgactcggaacttaaaggaacagacggagaccgccaacaggattatccgaagagacacggaggttgtgtcgcgttccgccggaatggcggatcgcaatatcaattcgctaggaaaagaggctgagaaactggagcaacattcgaaaaaagcctacaagtgctggctgtggctgatgattgccttcgtaattgccacttttataggtatggttttattcatgaagattatgaagaagaagaagtcgtag

SEQ ID NO: 34020 - protein, 250 aa, DROSOPHILA
MATKLNVNIRTLLANCEELAKSEQNFWRLQKFIKSLDTMLAELEAMGDPQSVKRIPGYLERLQALKISTGYADVPGSTTKTPSQSSAVSETGENALKEIRQLQNSKYHNELRKELLQDSDALRRRRGADESSSSSGSANVQETSGENMNQAAKYYTNAQEKITEHMLSLTRNLKEQTETANRIIRRDTEVVSRSAGMADRNINSLGKEAEKLEQHSKKAYKCWLWLMIAFVIATFIGMVLFMKIMKKKKS

SEQ ID NO: 34021 - DNA, 2575 bp, DROSOPHILA
cacctaacaacccatccacctatccacctgaacggaacccaccccgtttgcggcgctggccggcataacctgggtcaacctggacgaactgagtacactaaggacacgtcagcggcggccaggcgaatgtgacgtggccacattcaattccctcacttttaattggaatgttaactctatttttccacacaaggcagccagtttcaaatgcctgtgcatggcagacggatcaattcctggctgatgaagttctatgcactttttgcgatggctttgttttagttttgtgaatacttacggcccttattcttcctaatcaatcttgctcactgttaagctgatcttttaccaaattaatatttgtgcagtttttttttgctgtcaaaattgggtaaatttcattaagacatttcaatacatttttaagcccttcattttaattagccaacacttggaaatgtaatagggataaaggtgcactagccaaaataaaagaatttttaaacgtatttaatgagattcgccaaactggattggtgaatatatatatatgtataagcttgcttctatagcaattttattcatctagtaagaaaagtcaataggaaatataagccattaagtctggttttatttatcaaaaacgtaattcagtttgctatattttttaacatttactccagtgttcatcagtgcactgaatttatgaatttaccatatgaaatgagaatttgaatatactactattgatgagcatctgatgaattttattgaacattttaaggtagtttaagtgcagcatcaaatcaagaaaaagttttaaatttccaattcaaatttacgcgcctagttgtgaactagttttactgctagttccaattactagttcattcgattagtatatacagagctatcgccgtttggcattttttagtgcattgcgggcagtagaaaagcaaacacaaataagggaataaaaatatattaatttcggatcaggatggataaactaacgacaattagtgccacgctcttcatggcggccgatgtctttgcgattgtgagtctggcccttcccgactggatcatcacggagtccggaacgggtaaacatggcaaacaagaaagtgccagatgcactggatgaatcctaaatctctggggatatttgtaggtgacatccgattgggactgatgtggacctgcatgacgctatataaccgaccgcaagtgtgctatacacccgaactgcagccggagtggctgattgcactgatctgcatctttgtgggctgcatctgcgtgaccaccaccgtcattctgctggcgtcgtcatcctgcaaccggaatgtgattccgtacgcgcgctgggtgggattcacggccatggtgctcttctgcatggcggccgtcgtcttcccgctgggattccacgtagaggagatcggcggacaggcctaccagctgcccaacacattcaagattggcatctcctacatcatgttcgtcctggccctgtggatcaccgtcgtgtctgagctctttgccggcaaggtctgcctgccgcacttctaaagacgtgaccacggcatcgctagattcctcatttcatttgcagtttgctctgtgatttgttacatcttttgttttaccctaattgttttgggtttcaattggtagggtgcactttaaacactctatcttagttaacatatttaaattaggttaaataagctgaaaactcgaatatgagctacacgaatctctcatgcacttgatacattttaaaaattatttacttttaaacctgattttattttaattgataaatttagttgataaatgtttagtaagccagacttgatcatatctaaggaataagcgtagccctaagaacatttagttagtacaattttgttatacgaatacacattttgtatttaaactgagaaaaacatgtatttttgtgttctcaaaagcttaaggtaaatccggtgtgccaccaatcttcaagtctgaagctcaaatttaactcacaatctttcaaaataaataggtttttaagaaattgttgaaatgtgtgctgattccttcgtaaatgtggatctgcttaatttagacggttaaaaagtccatgcgtatatgaacttgcgcgtattcgcgattattggaaatacggttataactcttcaggtttttcattgacacaacttatttaatattgaacagaattagtattgaaacttcaaaaaaaatatatatttacatatatcttcgcggggagctccgtcacttggaaggtcgcgacagcaactgaagcaatatagccacattggaggagggatctcggcggagtcccgaggtctgcgcatgcgtcgtgtgtatacatacgagtgtagccatggccgcggggctactcgagatcccgagaatgctgagcaagctcctttcgatccaattctaataagggctgcaagagacgaaacactgctgacccagcactgaagactgtctacgctttgcttacaagatttgtttgcaatctgagccgccgaagcactttacaaattccttc

SEQ ID NO: 34022 - DNA, 507 bp, DROSOPHILA
atggataaactaacgacaattagtgccacgctcttcatggcggccgatgtctttgcgattgtgagtctggcccttcccgactggatcatcacggagtccggaacgggtgacatccgattgggactgatgtggacctgcatgacgctatataaccgaccgcaagtgtgctatacacccgaactgcagccggagtggctgattgcactgatctgcatctttgtgggctgcatctgcgtgaccaccaccgtcattctgctggcgtcgtcatcctgcaaccggaatgtgattccgtacgcgcgctgggtgggattcacggccatggtgctcttctgcatggcggccgtcgtcttcccgctgggattccacgtagaggagatcggcggacaggcctaccagctgcccaacacattcaagattggcatctcctacatcatgttcgtcctggccctgtggatcaccgtcgtgtctgagctctttgccggcaaggtctgcctgccgcacttctaa

SEQ ID NO: 34023 - protein, 168 aa, DROSOPHILA
MDKLTTISATLFMAADVFAIVSLALPDWIITESGTGDIRLGLMWTCMTLYNRPQVCYTPELQPEWLIALICIFVGCICVTTTVILLASSSCNRNVIPYARWVGFTAMVLFCMAAVVFPLGFHVEEIGGQAYQLPNTFKIGISYIMFVLALWITVVSELFAGKVCLPHF
